United States Patent Application Publication US 2007/0016976 A1 - sequence listing, part 2

SEQ ID NO: 2969 - DNA, 1095 bp, Oryza sativa
atggagatggaggaggtggtggaggacgccgcccatggcatcgtcatcgtcggcggcggcatctgcggcctcgccaccgctctcgcccttcaccggaaggggataagcagcctcgtgctggagaggtccgaggcgctgcgagcagacggcgtggccatcggcatccacgccaacggatggcgagctctggagcatcttggcgtcgcggcggtgctcagggaggccaccaacgccatcaccgcgtatcgcagcgtgtggcagctgcagaacaagaccaccctgctgcctgccaggaaggagcttcggtgcttgacaagaaaggatttggtggagacgctggccaagaacctgcctgcagggacgatccgcttcggctgtcgcgtcgcggccgtcgacgaagactccggcagccgctgcccggttcttaccacggaggatggacacaccatcaaggccaaggtgctgattggctgcgacggcgccaattcggtggtggctaaatacttgggattagggaatccgtcggagcttcctcgtttggccattcttggcctcgccagctacccggacggccatccatttggaacagagttcctgaccattgccggcgatgatctcgccgtcggacggctgcccatcaacgaccatctcgtccatttcttcctcagcaggcgcaggcattccacagacatggcacgagacgcgagcgccgcgagggagtacgtgctggagaagctgcaggagtgccccgccgacgtcgtcgacatggtgcggcggtgcgaccatgcgtcatcgctgtggaccacgacgaaggtgtggtacaggcccccctggcaggtggcgctcgccgccttcttccagctgaggcggcgcgccgccgtgacggtcgccggcgacgcgatgcacgtcatgggcccgttcatcggccagggcggctcctccgcgctggaggacgccktcgtgctcgcccgctygstatcgtcgtcgcgtgccaccgtagaaggtggcgccgacgacttggccggtgaccgtggtcgccggcacgatcagccgcaggtcgacggcgagatgggcgcggcgatagggagtacgtga

SEQ ID NO: 2970 - DNA, 1200 bp, Oryza sativa
atggccatggcgatggcgtcgccgcccgcttgcccattcctcctctcgctctcggccggcgccaccgccatttccaccgtgtccgccgcctacggttccgtttccgccccgcgcgcgcctctcttcctcctcgcctccccgcgtcccgtcccgcctcgccgacccctcgccgcgggctcctcatctcccaaggccgcggcacccgccgccgtcgagatccccgaggagtacgtggacgatgttgatgcggtgaacattgcgcaggacgtcacccagctgattgggaaaaccccaatggtgtatctgaataatgttgtcgacggatgtgttgctaatatcgctgcaaaacttgagtacatgggaccttgcaggagcgtcaaagacaggattggattaagcatgattaatgatgctgaagagaaaggattaatttttccaaacaagaccattttggttgaaccaactactggaaatactggtataggcctagcttctgtggctgctgctaggggatacaagctaatagcaactgtaccttcatcaatagatgttgagagatgtgttcttctacgtgcatttggagctgagattgtgttaactgatcctaacaagggactaaaaggagctcttgataaagcagaggaaattgtttcgaagacaccaaatgcatacatgtttcagcagtttaacaattccgctaatagtgagatccactttcaaaccacaggcccagaaatatgggaagacaccttgggtactgttgacatactagttgcaagcattggcacaggtggcaccattacaggcactgggcgttatctgaaaatgatgaacaaagatattaaggttattggggtagaacctgctgaaactagtgtaatctctggtgataatgctggttatattccaagcatattagatgttcagctgcttgatgaagttgtgaaggttaccaccacagaggcagtcgatgttgcaagggaacttgcactaaaagagggcctgctggttggcatttcgtcaggtgctgccacagttgctgctattaacgtcgctaaaagacctgaaaatgctggaaaattgattgcgattttgaagggtgaggttccaggtagattacaacgagtagtgcctgaaattttgaaacgccataggcactggtcagcctcacagaaggttgaaattgcgcacggttgctga

SEQ ID NO: 2971 - DNA, 1518 bp, Oryza sativa
atggctgtcaacctggtgctgtcttttgcccttgccattctgatatcctccagccctaccgcggttggtgtkgatgccaccgaggagctkaaggaggcggtcctaacgctggatgcgggcaacttctcggaggtggtggccaagcacccgttcattgtcgtcaagttctatgccccatggtgtggtcactgcaagcaactcgccccagaggtaaccgactactttgatactttcagcagtcagcaccatggacgtttcaacatcaagtacgaaaaggcagcctccattctgaggaagaacgagctgccagtggtactcgcgaaggtggacgcatacaacgagaggaacaaagagctgaaggataagtatggggtgtattcatacccaacaataaagatcatgaagaatggggggagcgacgtgcgtggctacggtggcccaagggaggccgatggcatcgtggagtaccttaagaggcaggtcggcccagcatccctcaagcttgaatcagcagaagaggcggcccattccgtcgtcgacaagggggtgatccttgtgggagttttccctgagtttgctggtatggaatatgaaaatttcatggttgtggcagagaaaatgcgagcagattatgattttttccacacgtctgatgcaagcattttgccacgtggtgatcagagtgtcaaaggccccattgtccgtctctttaagccgtttgatgagctgtttgttgattcggaggattttggtaaggacgcacttgagaagtttatcgaggtatctggtttcccaatggttgttacctacgatgctgatccaaccaaccataagtttcttgaaagatactatagcactcctagttctaaagcaatgcttttcgtgagcttcggtgatgacagaatcgagtccttcaagagccagattcatgaagcggccaggaaattcagtggtaataacataagttttttaattggtgatgttgcagacgctgatcgtgtcttccagggtacttcatgcccactcatttctaactatggcaacttgacaccatacgttaagtcagagcctatccctaaggtgaatgaccaacctgttaaggttgttgtggccgacaatatagatgacattgttttcaactctggcaaaaatgttttgcttgagttctatgcaccttggtgtggccattgccgcaagtttgccctgatcctggaggaaattgcagtgtcattgcaagatgaccaagatatagtgatagcaaagatggatggaactgtgaacgatataccaacagacttcacggttgagggatatccaactatctacttctattcatcaagtgggaaccttttgtcgtacgacggtgcaaggacagctgaggagatcatcagttttatcaacgagaacaggggaccgaaagctggtgcagctgctgcagtggatgagaaaacccagattgatgctgtggaagaggaggacactgatggtctctacactgcatacaacagagactactga

SEQ ID NO: 2972 - DNA, 2853 bp, Oryza sativa
atgttgcctcagcaacttcagatatatttgtgcttcatccttctgtctctgaagttcggaatatctgcatctctacctcttgaaacagatgctctcttggacataaagagtcatctggaggatccacaaaattacctaggcaattgggatgagtctcattcaccatgccaattttatggcgttacatgtgaccaaacttctggtggtgtcattggaatatcactctccaacgcctcactatcaggaactatatcgtcgtcgttttctcttctttcccaactacgtacgctggagcttggtgcaaactccatctcaggcactattcctgctgcactagctaactgcacaaatctgcaggttcttaacctgtcaacaaacagtttgacagggcaattacctgatctttcaacatttatcaatctacaagttcttgacctgtcaacaaacaatttttctggaccattcccagcatgggttggcaaattatcaggcctaactgaactaggtctaggagagaacaacttcaatgaaggtgatgttcctgaaagtattggaaagctgaagaacctgacatggctattcttggggcaatgcaaccttagaggagaattaccagtttcaatatttgatctggtctcacttgggaccctagacttctcacgcaatcagattattggtgtgtttccaatagcaatatccaacctgcgtaacctatggaagatcgagctctatcaaaacaatctgactggtgaaattcctcctgaacttgcacatttgacattgttatctgaatttgatgtgtcccagaatcagctaagtggtattctgcccaaagagatagcaaacctgaagaagctgaagatctttcatatttaccgaaacaacttctctggtgtgcttcctgaaggattaggggacttggagtttcttgagtcattttcaacctatgaaaatcaattctcaggaaagttccctgcaaaccttggccgattctcaccactcaatgcaattgacatatctgagaattatttttctggtgaatttccaaggttcctgtgccaaaacaacaaattgcagttcttgttggctttggacaacaacttctcaggtgaattccccagctcctactcttcttgcaaaacacttcagaggtttagaataagtcaaaatcagttcactgggagaattcacagtggcatatggggattgcctaatgctgtgatcatcgatgttgccaacaataaatttgttggcggcatatcctctgatataggcatttcggcttctctgaaccaactgtatgttcataataacgtcttctctggtgaacttccaatggagttggggaagctttccctgcttcagaagcttgttgctttcaacaatagattctctggccaaatccctgcacagattggaagtttgaagcagctgtcattcctgcacctggaacaaaatgctctggaaggatcgataccacctgatattggtatgtgcaacagcctagttgatctgaaccttgcagacaattctttgactggcaccattccagacacactagcatctctattcactctgaattcactcaacctatctcacaacatgatctctggtgaaatccctgaaggattgcaatatctgaagcttagttatgttgatttctcccacaacaatttatctggaccagtccctccagctctcctgatgatagctggagatgatgcattctctgaaaacgacggcctttgtattgctggagtttcagaaggttggaggcaaaatgccaccaatttaagatactgcccgtggaacgacaaccatcagaacttctcgcagagaaggctatttgtcgtgctgataatagtgacatctctggtggttctcctatctgggttggcatgcctgagatatgaaaattacaagcttgagcagttccacagcaagggagacatcgagagcggcgacgacagtgactcaaagtgggttcttgagtccttccacccccctgagcttgatcctgaggagatttgcaacttggatgtggacaatctgattggctgtggaggcactggcaaagtttataggcttgaattgagcaaagggaggggtgttgtggccgtgaagcaactatggaagcgtgatgatgcaaaggtcatgagaactgagatcaacacacttgggaaaatacgccaccggaacatcctgaaactccatgcattcttgaccggtggggaatcaaactttctggtgtatgagtatgtggctgggcagccggagctggactgggagaagcggtaccggattgcggttggaaccgcaaagggcatcatgtatcttcaccatgattgctccccggccataatccaccgtgacattaaatccacccatatactgctggatgaggagtatgaagcgaagcttgcggatttcggcatcgccaaattggtggaaggttcaccactcagctgcttcgctggtacccatggstacatggctcctgagcttgcttattctctcaaggtgacagagaagagtgatgtttacagctttggcattgtgctgttagagctgcttactggacgcagcccttcagaccaacagtttgacggtgaactggacattgtctcctgggtttcatcccatttggccaaccagaatcctgcagctgttcttgatccaaaggttagcagccatgcatcagaggacatgacaaaggtcttgaacattgccatcctttgcactgttcaactgccttctgaacggccaaccatgagagaagtcgtgaaaatgctcatcgacatcgactctatctcagcaaacgggaaggcaaagaacaagaatgataagaagtaa

SEQ ID NO: 2973 - DNA, 648 bp, Oryza sativa
atgaacgccttcaggctcgccggggacatgacgcacatcatgagcgtcctcgtcctcctgctcaagatccacaccatcaagtcttgcgctggtgtttccttgaaaacacaggagctatatgctcttgttttcgccactcgctacttggacatatttacagactttatatccctatacaatacagtcatgaagatgattttcctgggtagctcattctcaattgtttggtatataaggcgccacaagatggtccgcagatcatatgataaggatcacgatacatttcgacatcaatttcttgttctaccatgttttcttttggccttgcttatacatgagaagttcacttttagggaggtgatgtggacgttttccatttatctggaggctgttgcaattcttcctcaacttgtactactacagcgtacacggaacgttgataatttaacagggcaatatgtgttcttcctaggcgcataccgagcattatacatcctcaactgggcctaccgctacttcactgagccacactatgtgcattggataacctggatatcaggattcgtgcagacattgttgtatgcagatttcttctattattacctcaatagtttgaagaacaatgtgaagctcaccctaccagattga

SEQ ID NO: 2974 - DNA, 1116 bp, Oryza sativa
atggcgatcccccgcatctcgccgcgcaaaaccctgcccctcttcgccgccctggccctggccttggcctgggcctttgccgccccggcgttcgccgacggcgacgacgtcgtcgccctcacggagtccaccttcgagaaggaggtcggccaggaccgcggcgccctcgtcgagttctacgcgccctggtgtggtcactgcaagaagcttgcccctgagtatgaaaagcttggtgcaagtttcaagaaagccaaatctgtctttattgcaaaggttgattgcgatgagcacaagagtgtgtgcagcaagtatggagtttctgggtacccaacaattcaatggttccccaaaggatccctggagcccaaaaagtatgaaggacaacgcagtgcagaggcccttgctgaatttgttaacactgaaggaggcactaatgtaaagctggcaaccattccttcaagtgttgtagtgcttggcccagacaactttgactcaattgttcttgatgaaaacaaagacattcttgtggagttctatgcgccatggtgtggccactgcaagcatcttgctccgatatatgagaagctggcttctgtttataagttggacgatggagttgtaattgctaaccttgatgctgacaaacacaaagacttggccgaaaaatatggagtttctggctatcctacattgaagttcttcccaaagggaaacaaagctggtgaagattacgatggcggcagggagttggatgactttgtcaagttcattaatgagaagtgtggtaccagccgtgatactaagggccaacttacttcagaggcggggcgcatagcaagtttggatgccctcgcaaaggagttccttggtgctgccaatgacaagcggaaggaaatcctctccaatatggaagaggaggttgtgaagctcagtggttctgctgcaaagcatggaaaggtctacattgccattgcaaagaaaatcctggacaaaggtcacgactataccaagaaggaaacagagaggcttgaacgcatgttggagaagtccatcagcccatcaaaggccgatgaattcatcatcaagaagaacgtcctttcaaccttctcttcctaa

SEQ ID NO: 2975 - DNA, 465 bp, Oryza sativa
atgtcgatgatccgccgcagcaacgtgttcgaccccttctccctcgacctctgggaccccttcgacggcttccccttcggctccggcagcggcagcctcttccctcgcgccaactccgacgcggcggccttcgccggcgcgcggatcgactggaaggagacgcccgaggcgcacgtgttcaaggcggacgtgccggggctgaagaaggaggaggtcaaggtggaggttgaggacggcaacgtcctccagatcagcggcgagcgcatcaaggagcaggaggagaagacggacaagtggcaccgcgtggagcgcagcagcggcaagttcctccgcaggttccggctgccggagaacaccaagccggagcagatcaaggcgtccatggagaacggcgtgctcaccgtcaccgtgcccaaggaggagcccaagaagcccgacgtcaagtccatccagatcaccggctag

SEQ ID NO: 2976 - DNA, 1035 bp, Oryza sativa
atgggcagcatcggcggcgacgaggcggcggtgctgcgggcggaggagtcggcgtcggggggcgtcgacgtgtggagcgacgccgtctcctcccacgaccccgaccacctcctcgtcatggtccacggcatcctcggcagtaatgctgactggcaatatgcggctaacgaatttgtaaagcaacttcctgatgatgtaatcgtgcactgcagtgagaaaaacattaataccttgactctagaaggtgtagatgttatgggggaacgtttagcagatgaggtgatcgatgtaatcattcgaaagccagaactcactaagatttcctttcttgcacactctgttggaggattagcagcaagatatgcaattgcaaagctttatagacatccaagtgacacatccaagagtgaaacgaaaggaaccatcggcgggttggaagcaatgaactttataaccgtagcaacacctcaccttgggtctcgagggaacaatcaggttccccttctctttgggtccattgcaatggaaaattttgcttctcgtgtggtccattggatatttaggagaactgggaaacatctttttctcactgatgatgatgagggagaaccaccattattgcagcgcatggctgaagattatggtgatctttatttcataccttctacttgtcaattctttaattcatggcattcagacattgttggctggagaacatcgtctatcagaagaaagactgagctgcctaagtgggaggaatcgatatctgaaaagtacccccacattgtacatgaggaatactcagaagaactcggtgatgaaacatgtcaaaattcggcaacagtttgtgattcagacatattggaagaaaaaatggtgacaggacttcgacgagtatcatgggaaaaagtagatgttagcttccataccagcatgcagagatttgctgcacacagcataatccaggtcaagtaccagtttatgaacgaaggcgcggatgtcatacagcacataatagaccacttccaagtctga

SEQ ID NO: 2977 - DNA, 1077 bp, Oryza sativa
atgtcggcctactgcggcaagtacaaggacgagctcatcaagaacgctgcctacattggcactcctggcaagggtatccttgctgcggatgagtccactggcaccattggcaagcgcttcgccagcatcaacgtcgagaacgttgaggagaaccgccgctccctccgcgagctcctcttctgcacccctggcgccctccagtacctcagcggcgtgatcctcttcgaggagaccctgtaccagaagaccaaggatggcaagcccttcgtcgatgtcctcaaggagggtggtgtcctcccgggcatcaaggtggacaagggcacaatcgaggttgccggcaccgagaaggagaccaccacccagggccatgatgaccttggcaagagatgcgccaagtactacgaggctggtgcccgcttcgccaagtggcgcgccgtcctcaagatcggccccaacgagccgtcgcagctcgccattgatctgaatgcgcagggcctcgctcgctacgccatcatctgccaggagaacgggctggtgccgatcgtcgagcccgagatccttgttgatggccctcacgacatcgaccgctgcgcctacgtctcggaggtggtcctcgctgcgtgctacaaggccctcaacgagcaccatgtcctcctcgagggtaccctcctcaagcccaacatggtcaccccaggctctgacgccaagaaggtgtctcccgaggtcatcgctgagtacaccgtccgcaccctccagaggaccgtccccgctgccgtgcccgccatcgtcttcctgtccggtgggcagagcgaggaggaggcgaccctgaacctcaacgccatgaacaagctcagcaccaagaagccgtggtcgctgtccttctccttcggccgtgccctccagcagagcacgctcaaggcctggtccggcaaggcggagaacattgagaaggccagggcggccttccttaccaggtgcaaggccaactccgaggctaccctcggtacatacaagggtgacgctgtcctcggcgagggcgcctccgagagccttcacgtcaaggactacaagtactga

SEQ ID NO: 2978 - DNA, 1220 bp, Oryza sativa
atggcccccaamgccgccgtcctggtgcggccccacatcgccggcgtccaccatctgcccaccggccggcgactgccccgtctggctcctccccaggcgcaagcagagaagggatctgtagtggctgcgagtggacgtgtctgggcgagtgcgagtggttcgtttgagaaagatcgcattggagatgacgatgtgttagcttcgccgcagatagtggaggagagcaaagtcgatttgctgaagattctgaagagtgccaacaccattattccccacgtagtgctggggagcacaattcttgctctggtgtacccaccttcttttacatggttcacaactagatattatgcaccagcattgggattcttgatgtttgcagtgggtgtaaactcaagtgttaaggatttcattgaggctatacaaagaccagatgctatagctgctggctatgttggacaatttattatcaagcctttcttaggattcctttttggcactcttgcagttacaattttcaatcttcctactgctttaggtgctggtatcatgttggtttcatgtgtgagtggagcacaactatcaaactatgcaacgtttctgacagatccacatatggcccccctcagcattgttatgacatcattgtcaacagctactgccgtttttgtcaccccaactttatcctactttcttattggcaagaaattaccggtggatgtgaaagggatgatgtccagtattgttcaaatagtggttgctccaattgctgccggattgcttctgaatagatatcttccgcggctctgttcagctattcagccatttctccctccactatcggtatttgtgactgctttatgtgttggttcaccattggccataaatattaaggctgttttgtccccatttggactagccacagtgcttctcctttttgcattccatacatcatcttttatagctggatatcatcttgctggtacttggtttcgcgagtcagcagatgtaaaggcactacaaagaacagtatcttttgagacaggttgtgctgatgtccctaatggggtttgctcttgttatggtgtggtccaagagaacaaaagaatagctcatattgaactattaaagtcagtcagctacagagcagtgttcagtattaacagtgatgtacgctcttctaaaatcaccatgaagaacagccaatcacaaaattggaggtg

SEQ ID NO: 2979 - DNA, 2526 bp, Oryza sativa
atgggagggggagacgccagcggcggcgacgggccggagcaggagctgaagcgggctgctgcggcggcgtacaactacgagggcgacgcgcgctgggcggagtactggtccaacatcctcgtcccccctcacctcgcctcccgccccgacgtcgtcgaccactacaagcgcaagttctaccagcgatacatcgatcgtgatttggtggttgagccgatgtcatccactggttccacccagccaagcggaccagaagtaaggtcttcgtccttctcatccagtgagaatgtcagggcccgtagttcaggatcaagttccagatcagctgcaccaccgcccccaccgccacaaacagacagtgctacaaatcccttacggtttgatgcacggaccatacacttctccattaatgcctgggtacttgttgttgctggtctggggatgcttccaattttgccaaaacatcttgcagatagagcctgcaaactttcattgctgggaacaatactctcctctgcatactctctatacagcacttatgggaaaccaagagcatggaacatgcctgcagtccagggttggttgcaagctgtacttggaaccaaggattttatccatttgatgttctctcttatgctcttcacgtctcagttgcacttaaaaattgctgcactacctgtgttctgctgggcacttgatcatgttgctagattcctaaggcgtaattttgctcgctcatccttctataggagttacttggaggaaccctgtctttgggtagagacaaataacactacactcagtctcctcagttcaaatgctgagattgccttgggttttcttctgatcatatcacttttctcgtggcaacgtagcataattcagacattcatgtactggcaggtgttgaagcagatgtaccatgctcctgtaaccgctagctaccaccagagcgcgtgggcgaaaattggccggattgtcaacccgtacatccatcgctatgcaccattcctcaatacacccatttctgcagcccaaagatggtggttcagccagggaccgagtgacggtcagaatgcacaacacaggcagggcaaccgtttcgcccttctcccctcagcctccaggggcaatgatctctctggagggaacacctgcatttcctacatgaaagagaggtcaaataatatcgaagaaatcacatgggtgcagaactgcattttgccacaaccagacaggcaggctgatgcagaaagaaagatccttgatgatgctcttgacagaaagccgcagattgactgggttgaagaagatatctcttcttggatggataagagttacacaagcagcaatttggagtataacttattaatgcaaaacattcaggtcttagaaagtagtttggctggtaaagacttggtaaggctggaaagagatatccttgtacatatcgaacggctgggagcattgaaatcattcaacgcgtctatctccagggccactctaacacaaacatatgaattagagttttcacttcctggggatattattaagcttgatccagagattcctctcgaggagcaaaatgatgtggtaattgttcgaagtgggaaaagtcaagagaggaaactgaaaagaatgaaagcatcagaaaagggctctcgggtctccgtgaaaacaccctcacgaaaatcaaagaagtccagtagtagtcaatttatagctgagtggaaaaactatccaggccgaagaaggagcattgtacgagaacaatcagcattgctggttactatcaaggagtgtgcaaaccttgagaaaataagagaaaacttgttgaaggatgggagtgaagtcagccatgcaagctgggccaaggcagctggaattgatgaagcattgttgaggagtaggctgcaagaaggttactgctgccgagagagattactggtaaccaccgagtggctagtcaagtacattgcaaagacatacgctggaatgggaacagcttttgaggatctactgcaggctgggaaaatgggtgtccttaatggagctgagaaattcgacagccaaaaaggatgcaagttctcaacttatgtgaagtactggataaggaaagcaatgttagcacttcttgctgaaaactctggagtaatccagctgcccgcaaggatggagggtataattcgtaaggtcagggaagcgagaagggcgattcgctacaacacagggaggaacccaccagatgcagaaatcgcagccctcatcggtgtatcagttgccaatgaagtgactccggacacatctttagaagctccagatgaggctatgttccggatgcagttgagagagagactgcttcatgtcctggacaggctcccccaagagaagggcacgtccctggagcagattgggagcatttaccatgtctccaaggagtggataaggaaaatagagaagtcggccatgtccaagctgaggaacgacgacgtgcataatgaactcaaggacttctgtggattctag

SEQ ID NO: 2980 - DNA, 1152 bp, Oryza sativa
atggcgatcgttgacttggtcaatgccggagagcagcagcagatgggcagcaagagagcggcggcggaggatggcgacggcggcgtggacgacagccgcgagtactactgccggcgaggcgtccggcacctgtgcgacagcggcattaccaggcttcccggcaactacgtcctcccggcctccgaccgccctggccaagccgccggcgccgccgccgccgccggggggtcagtgaagctccccgtggtggacctgtcgcgcctccgcgtcccttcggagcgcggcgcggtgctccggacgctggacgcggcgttccgggagtacgggttcttccaggtggtgaaccacggcttgggcgccaagttgttggcggcatgctcgacgttgcgcgccgcttcttcgagctgccgcagccggagcgggaaccggtacatgtccgccgacgtgcgggcccccgttgagtacggcaccagcttaaaccaggtgagggacgccgtgctgtgctggcgcgacttcctcaagctcgcctgcatgccgctcgccgccgtcgtcgagtcatggcccacctcgccggccgacctgcgggaggtggcgtcgaggtacgcggaggcgaaccagcgcgtgttcatggaggtgatggaggcggcgctggaggcgctgggcgtgggcggcggcggcgtgatggaggacctggcggcggggacacagatgatgacggtgaactgctacccggagtgcccgcagccggagctgacgttggggatgccgccgcactcggactacggcttcctcacgctggtgctccaggacgaggtggccggactccaggtgatgcacgccggcgagtggctcaccgtcgacccgctcccgggctccttcgtcgtcaacgtcggcgaccacttggagatattgagcaatggacggtacaggagcgtgctgcacagggtgaaggtgaactcgaggaggcttcgggtgtcggtggcgtcgttccacagcgtggcgccggagagggtggtgtcgccggcgccggagctcatcgacgaccgccacgcgcgccgctacatggacaccgacctcgccaccttcctcgcctacctcgcctccgccgccggcaaccacaagtccttcctccactccaggaggctctactga

SEQ ID NO: 2981 - DNA, 1536 bp, Oryza sativa
atggcgaacatcgacatggggaagatcctggcggggctggagaacgacgacgcgcgggtgcccaagaccaagctggtctgcacgctcggcccggcctcccgctccgtccccatgctcgagaagctgctccgcgccgggatgaacgtcgcgcgcttcaacttctcccasggcacccacgagtaccaccaggagaccctcgacaacctccgccaggccatgcacaacaccggcgtcctctgcgccgtcatgctcgataccaagggtcctgagattcgtactggatttttgaaggatggcaagccaatcaagctaacaaagggtcaagaactcactgttaccaccgattatgagatcaagggtgatgagaacatgattaccatgagttacaagaaactgccagttgatgtgaagcctggaaatgtcattctctgcgccgatggtacaatctctttgactgttttgtcctgtgatccaaaggctggaactgtgaggtgtaggtgtgagaacacagcaatgcttggcgagagaaagaattgcaatctgccaggaattgttgtggaccttcctacactgactgagaaggataaagaagacattttgggatggggtgtgccaaatgacatagacatgattgctctgtcgtttgtccgtaaaggatcagatttggttaccgtcagacaacttcttggacagcatgcaaagcgcatcaagctgatgtcaaaggttgaaaaccaagagggtgttgtaaacttcgatgagatcttgagggaaacggatgcatttatggttgctagaggtgatcttggaatggagattccagttgagaagatattccttgcacagaagatgatgatttacaagtgcaaccttgctggaaagcctgttgtgactgctactcagatgcttgagtcgatgatcaaatcaccacgtccaactcgtgctgaggcaactgacgttgcaaatgcagttcttgatggaactgactgcgtcatgcttagtggagagagtgctgctggagcataccctgaagtagctgtgaagatcatggcacgtatatgtgttgaggcagagtcttcccttgacaacgaagctgtcttcaaggagatgatcaggtctgcgccccttccgatgagcccattggagtctctcgcatcctctgctgtacgcacagccaacaaggccaaggcagccctgattgttgtcttgactcgtggtggtaccacggcaaagctggttgccaagtatcgtcccagggttccaatcctctctgtggttgtccccgtgttgacaaccgattcattcgactggacaatcagctcggagggcccagcaaggcacagcctaatctacagaggtcttgttcctctcctggctgagggttctgccaaagccaccgattcggagtcgacagaggtcatccttgatgctgctctcaagtcagctgtacagaagcagttgtgcaagcctggtgatgctgttgttgctctgcaccgtattggcgtcgcatccgtgatcaagatctgcatcgtgaagtaa

SEQ ID NO: 2982 - DNA, 999 bp, Oryza sativa
atggctgaaggtcgtcagctcgaagcccagagcgtcgtcgtccctacagccaccggagacaagggagacgacatcctctcgtcgcttccgacgagggaaggatggtggacgacgttcgtcctctacgacggctgctggatggaccggcaggcagcgatgagcgtgtcgctggttcgtgcccagttcgtgccacgcgacgacgacgtgctcctcgccacctacccaaagtgcggcaccacctggctcaaggcgctctccttcgccatcgccaaccgccaccgccaccccgtcgtcagtgccggccaccaccccttgctcacccaaagcccgcatgacctcgtgccgttcatcgagctgcccttccgccatatccacccgctcgcggcggccctcgatgcgatcccctccccgaggctgctgggcacccatatgccgcaccatctgcttcccccgcgcatcggttgccgcatcgtctacctgtgtcgagagcccaaggacgtcgtcatctccacgtggcacttcatgaacaaggtaatagaaggattctccattgatttcgacaaggccttcgagctgtttgtcgatgggtgctcccccttcgggccgatctggaaccactacctaggttactggaacaagcacgtcgaggagcccgacagagttctcttcctcaagtacgacgacatgatggccgacccggccggccacgtcaagaagctcgccgagttcctccgcgtcccgttcaccgacgatgaggtcgacgccggcgtcgtcgaggaggtggtgaggctgtgcagcttcgagaagctgagccgcctaccggtgaactcctctgtggtggctggtcgggtcggcgtcgacgagcggccaatgaagaactcggtgttttttaggaagggtaaagtgcgggactggaagaactacttgaccgaagagatggccaagaaattagatgccgctatcgaggagaagctgaaaggatctggtctcaccttatga

SEQ ID NO: 2983 - DNA, 1194 bp, Oryza sativa
atggagctctgcgccgtcttcttctcctcggtcttctccctcctcctcctcctcctcctctcagcaggtgtccggcctcctccagtcgctgagcgtcaaccgggtgagctctacgacgccgacccggccgtcctcgccgccttcgccggcaccggcgtggagttcatcgtcggcaacgaggacctccacaacctgaccgacgcgcgcaaggcccgggcgtgggtggcgcagcacgtgcagccgttcctcccggccacccgcatcacctgcgtcaccgtcggcaacgaggtgctctccggcaaggacacggcggcgatgcagagcctcctcccggccatgcagtccgtccaccaggcgctgctcgacctcggcctcgccggcagggtgaacgtctcgacggcgcactccgtcaacatcctcgccaccagctacccgccgtccgccggcgcgttccgggaggacctcgcgcagtacatccagccgctgctcaacttccacgccgaggtcggctcgccgttcctcgtcaacgcctacccgttcttcgcctacaaggcgagcccggcgagcgtgtcgctgccgtacgtgctgttcgagcccaacccgggcgtacgcgacccggccaccaacctcacctacgacaacatgctgtacgcccagatcgacgccgtgtacgccgccatgaaggccatgggccacgccgacatcaccgtgaggatctccgagaccgggtggccgtccaagggggacgacgacgaggtgggcgccaccccgcagaacgccgccgcgtacaacggcaacctcatgaagcggatcgccgccggggaagggacgccgctcaagccggccgtccccgtcgacgtgttcgtgttcgcgctcttcaacgaggacatgaagcccggcccctcgtcggagaggaactacggcctgttctaccccaacggcacgccggtgtacaacatcggcttcgacgccgcgtccttcagcccgtcgccgacgacatccacgttttcctcctcttccaggccaacggatagcagggtccatttttcatctatagtttggattttaaagattgtaatcatagagcacaggagaagggtcatgcatatcataggcactcctacacaggaaatcgttttccccaaggaatcagattcaagccaagagttaaattggaaacacaggtggcagtga

SEQ ID NO: 2984 - DNA, 1520 bp, Oryza sativa
atggcggagggcttcgggcggtgggaggcggatccgctcttccccgccgccgagtgcgtgcaggactccgccgacaggatggagggtgtgtaccgcttgctcttgcatgaaagaaaactgatacaagatgatacctcacatacaaaacgtcgtgtatcaatgcagtatgagagagatgtgtgcactgctcttggaacaacaaagtggcagttggagcaatttgagcgagaagtgaatgcagcggcattgtctaataagtcaaattcaagggaaaatgccatcttgcaatttaggcaatttattagagctatagcggagcaaatttctcaggtggaagatagtttggagagtcttaggaatgattccattagaacaccaaaacattcatacttgactgaacatgatggagatgaattggcatcttttctttctggtagtaatagaaaggataatcatgtgatttattccactggaacagatgaaattgttgagctcaagcttgatagtgttcctgcagtaaatggttatcattccacccaagaacgtacatcatgtgaattcagatattcaggagaagatgtggaaggagcagccaagcctcaatgttcatgcggggaaaatgcatgtgaaggagatcataatggtagcagtatgcgtggtttggattctgatgattcaataggtaggaagcatcatttcaggagcaaactgagcaggaaataccacagttttatgcggaatttatggtttacaaatagaggacgtgagagttttacaaagaggaggaaagatggagaagttatggatagcttgagaaatggaagtacattaccttcattcaatctacctccagctggaagggctatgtatttctggcctgagcttatcaagaggagattaagtaaatttaaatgctctacacatcacaagcatcttcaagtccgtttagcaacagtactactaattgcccttgctgtacttgaactgccacgtgaatacacgatgtattgtattggcttgtttgtgatacttgcacaatcaagtaatcaaccattgtctgatcagactatcgagatggcaactgcaactgctccgagattgtgctttcctaaacccggcgcggccattgctccggcgaccaagagcccttccttcattggttacgcaaagcaaacattgaacatgtcaggcctaaggatctccaacaagttcagggtgtccgcgacagcggtgcacaaggtaaagcttataggcccggacggtgtcgagcacgagtttgaagcccctgaagatacctacattctcgaggccgctgaaactgccggggtggagctgccattctcatgccgtgctggatcatgctccacatgtgcgggtaagatgtcatcgggagaagttgatcagtcggaaggatccttcctcgacgagaaccagatgggcgagggatacgttctgacatgcatttcgtaccctaaggcggattgcgtcattcacacccacaaggaggaagaactctacta

SEQ ID NO: 2985 - DNA, 2658 bp, Oryza sativa
atggcgacgcgcggggaggcggcggcggcggcrgcggcggaccgggacatggagctcttccggagcgggtccgcgccgccgacggtggagggcgcgatggccagcgccgccgcggccgccggcgacgtgttcctggacgatgagctccgggccgacccggtgtaccagagctactactactccaatgcgcacctcaacccgcgcctcccgccgccgctgctctccaaggaggactggcgctcggcgcagcaccgcctccgctcctccgccctcggcgggatcggcgacggcaggaggcagccggccgcggcggcgcagggggatgggctcgtggggttgcccgggatcgacctcgatcggcaggggagcttctccagtatcttccagtttcatcttatccaatccaaggagagctcgtatcagctggacatgggtaagcagggcgccgaccgcaacattagtgactttctggattcttctcggccacagtatgctctgcatcgtgagactagtagagctatgggtggtctgcagagtgacagcaatatacaaagcttggctgaagttcagaacaatgattcatcagcacatacatatgcctctcttttaggatcatctctttctagaagcgcatctccagatcctgagcttgttaggagggtccccagtccttgcctccctccaattggtgtgaaagtcagtgctgatgataagaagaacaatggtggttcatcttccttccgtcgaagttcgtctgctattggtgaatctgataatctgatagctgctttatctgggatgaatttatcatcatctggagcagctagtggacagcaaactgtgacccagtctgagctctaccaggatgttgataatgtccgtaagtttctatttgatcgtcagggtgatcaatcaaatggcaaccagcaacactcctatatgaaacatcccgaacaaggacattttaaggcacctgatggttactctgcaaactcgcctaattcttctatgataagaaatcaaattaatgctgctagtttcacatcgtttgacaatctgtctgctggatcaggctttgcttctcctaggatcggttctaggtccccaggtgggactttatcttcaaggcagaatttggttggtggatctaactttctgaattacaatggaattggaagtccaaatgcagcaacttctcttcaaacagccattgatccgtcatatattcagtaccttcaggcagctgagattgctgcccaactcgcagctagctgtgatgatcctctcatggccagtggccatctgggaagttcttatatggatttacttggtcctcagaaagcttatgctagtccattgcttcagtcacagaagaactgtggctactatggaaaccttggatttggccttggttattctggaagtcctttgatgagtcctgttcttccctcttcccctgctgcacctggtagtccacttaggcatggtgaacgcagcatgcgcatgcaatcaggtataagaaactttggtggttcctttggttcatggaatcctgacctaggtggaaagatgaacatcaatatgatgccttcactcctggaggaattcaagagcaacaaaagcaaatcttatgagctctcagaaattgctggtcatgttgttgagttcagtgctgatcaatatggaagccgattcatacagcaaaagctagaaacggccagtactgaagagaaggacatggtcttttcagaaatcatgcctcaagctctcacgttgatgaccgatgtatttggaaattatgttgttcagaagttctttgagcacggaagccctacccagataaaggaattggccgaccagcttattggacgtgttcttgctctcagtcttcagatgtatggatgccgggttatacagaaggctatagaggttgttggtttagatcagcagactaaaatggttgctgagctggatggacacgtcatgcgctgtgtacgtgatcaaaatgggaaccatgtaatacagaaatgcatagaatgcatccctcaacatgctatccagttcattgtctcaacattctatggtcaagttgtgatgttatccactcatccatatggttgtcgggttatacagagggtgctggagcattgtgatgatcctacaacacagcaaataatgatggatgagattctccagtccgtttgcttgctggctcaagatcaatacggcaactacgttgttcagcatgtactggagcacggaaaaccacatgagagatctgctattatcgagaagttaattggacaaatagttcaaatgagccagcaaaagtttgcctcaaatgtcattgagaagtgcttagcctttgggaatcctgtagaacgacagattttgatcagtgaaatgcttggatccactaatgagagtgaacaccttgaggtaatgatgaaagatcagtttgcaaactatgtggtgcagaaggtgctagagacttgtgatgatcagcagagggaggcgatccttacaaggataaaagcacatctgaacacgctgaagaagtatacctatgggaagcacatagtagcacgcgtagagaagcttgttgctgctggagagaagcgactagggcttcaaccagcatgcaccagtgccgcctga

SEQ ID NO: 2986 - DNA, 2262 bp, Oryza sativa
atgacggtgatggagctcaagaagctgccgctcgggttcaggttccaccccaccgacgaggagctcgtcaggcactacctcaaggggaagatcacggggcagatcaggagcgaggccgatgtcatccccgagatcgatgtctgcaagtgcgagccgtgggatctccctgataagtctctgatccgctccgatgatccggagtggttcttcttcgcgccgaaggataggaagtatcccaatgggagcaggtcgaacagggcgacggaggccgggtactggaaggccaccgggaaggacagggtgatcaggtccaagggtgacaagaagaagcagcaagtaattggcatgaagaagacgctcgtgttccaccgggggcgtgcgccgaagggtgagcggactgggtggatcatgcatgagtaccgcaccaccgagccggagtttgagtccggtgagcagggaggttacgttctctaccggctgttccgaaagcaagaggagaaaattgagcgacccagtccggatgaagtggatagaagtggatactcacccactccttctcgttcaactcctgataacatggaaccaattgaagacggaaatacaccattaaacagggaatctccagaatctgctctgcatgaaagcccaattgatttgcctgctctaactgaggctcaagctgcgccaattacaaggtggcttgcagacagaactgataacgcgacaacaaatgaagtaaacatctctcacatgcctcatcatgggcttgatggaggagctaaggctagcccttcagctggtgctttccctcagctgattggttcacaacagaatatccatgataataatgaattagccacagtttctgcacccatgctaccacatgaagacttcaataatttccctctaggagccattggtaattttgatggcaatatgaatcctcgagatccagtggaggagttcttgaatcaaaccattgctgatccagatgagcattcatcaacaacatcaaaggctcagtatgattcggacactggaatcataccaactgagtttgagaaccatggggtgatgcagggtgaattcatggatgatctgagtgggttggaaaatttagatttctggccagatgaccgaaatccccagttgagtgcactgtatgaggacacaccattgctgccttatgatagcaccgaccaggatgtgctctccatggactctggtgctgaatccttgcaagatctattcaacagcatggacgattcaaacgcgaggaataatgtatggggcaacgaaccattcctccaggggactggatttcccatgtcttggccgttacagccgaactccgcatttccaaaccagggcactgcaaataggaggctcatgctacagctatcagaatcattatctcctgattttgatgtgagcatgactagagatgagtgtgaagatgaggaaccaggtattgttgtaacttcgaagtatgtgaatgaagctcctgaggagtcaactgcagaaaaggatatgccttctgatggagatgatgctgagccaacgggtattactatcctgaggcgacgccatgctccaactgcaagttcgttttctgatggagatgatgctgagtcaacgggtattaccatcctaagacagcaccaagctccaaatgcaagcttgctttctgatggagatgatgctgagtcaacgggtatcactatcctaagacgacgccaagctccaactgctagctcagctagttcatttactcaacagggtgctgcagtgcaaagggtgcggctacaatcaaaccttgatgcagcaccgtgttctagcgttgatggttcatcaagttgcatcataaatgaaggtgaaagtgaacgcaccatggagaaacctgagattgaagagaatgcaggaagtaccttggctgaaggtgggacttgccatgaggatgaccagaaggagcatgatgcttcagcagcaaatgctaaatctgttctgaggctgcggaagacagcagagggaagcgacaaggagaacaagcaggaggaagaggagggtgttcttgcttcacatatgttagtagccacataccctagttgttcagcagttgatactttgaaagagagagttgagcgaaagttgaaaaaagcttcatgcaaacgtgaggatggtcacctgctgcctagtggattatgggccaaagctgattttgatcttttagaaaatgattttaagggctggtttgggttgtga

SEQ ID NO: 2987 - DNA, 1662 bp, Oryza sativa
atggacttctttaccgagtatggtgaggggaacaggtataagatagaagaggtcataggaaaagggagttacggtgtagtatgctccgcgctggatactcatactggtgagaaagttgctatcaagaagattaatgacatttttgaacatgtgtctgatgctactcggatacttcgtgaaatcaagttgctccggctactgcgacacccagatatcgtggaaataaaacatattttgcttcctccgtcgaggagagaattcaaggacatttatgttgtttttgaactcatggagtctgatttgcaccaagttataaaggccaacgacgacttgactccagaacactaccagtttttcctctatcagttgcttcgaggattgaagtacatacatacagcaaatgtgtttcaccgagatcttaaaccaaaaaatattttggcaaatgctgattgtaagctcaaaatatgtgattttggccttgcaagagttgctttcagtgatacaccaactgccatcttttggacggattatgttgcaacaaggtggtatcgtgcacctgaactttgtggatcttttttctctaagggtcaatttctattgaccatttatgcacatgtgcccttcgaaaatcataaggggaaaagggagaatctaagtgtgcccaactgctctgccaatgggattgcagcttccatggtccattttgttggctatggtgtggcaagggcagaagctgaggtcaagcagccttacacaccagcaatagatatatggagcatcggttgcatatttgcagaacttttaacaggaaaacctcttttccccgggaaaaatgtggtgcatcaacttgatataattacagatcttttggggacaccttctacagaagcaatatctaggattcgaaatgagaaggccaggcgatatttgagcagtatgagacgcaaaaagcctataccatttactcagaagttcccaaatgcagatccacttgcattacgtttgttggagagaatgctatcttttgagcccaaagataggccaaatgctgaagaggctcttgccgatccttatttcagaaacatagcaaatgtagatagagaaccttcagcacagcctgtgacaaagctggaatttgagtttgaaaggaggaggattacaaaggaagatataagggaactcatctatagagatattctggagtatcatccaaatatgttgagggaataccttgaagggactgagtcagctggtttcatgtaccctagtgcggtagatcattttaaaaagcagtttgcatatcttgaagaacattatgctaagggatcaacagcagctccacctgagaggcaacataactctttaccaagaccttctgtgttatattcggatgaccgtccacaaaacacagccaacatcgccgaggatctttcaaaatgtgtacttggagataatacacaaaaaatgcatcaaggttctgcttctgtttgtgcgaatagagttcctcaaggtggtgctgcaagacctggtaaagttgttggttctgcgcttcgatatggtaactgctcaacatctactgctgagcaatatgagcatcgacgaaccgatagaaacccagcattggctactaacactgtttctccccgaggctcttacccctga

SEQ ID NO: 2988 - DNA, 924 bp, Oryza sativa
atggatctcggcctcagcctcggcctcggcctcgcctcgcagggcagcctcacctcctccaccaccaccacctcctcccccggcgccggatcatcctccccgtgggccgccgcgctcaactccatcgtcggcgacgtgaggcgggatcaggccgcggcgcatgctgccgcggcggtgggggttggggttgggggcgaggagatgtaccaggggagggcgtccacgtcgccggacagcgcggcggcgctgtcgagcgcgagcgggaagagggagagggagctggagcggtcgggatccggggttgacgacgacgacggcgcggacggcgccggcgggcggaagaagctcaggctgtccaaggaccaggccgccgtgctcgaggagtgcttcaagacgcactccactctcaaccccaagcagaaggtggcgctggcgaacaggctggggctgcggccgcggcaggtggaggtgtggktccagaaccggagggcgaggacgaagctgaagcagacggaggtggactgcgagtacctgaagcggtggtgcgagcgcctcgccgacgagaacaagcgcctcgagaaggagctcgccgacctcagggcgctcaaggccgcgccctcgccggcgtccgcgtccgcgatgcagccctcctcctccgccgccgccacgctcaccatgtgcccctcctgccgccgcgtcgccaccgccggcgcgccgcaccagcctaaccaccaacaatgccatcccaaatctaacaccaccatctcctcctcctccaccgccgccgccgccgtcgccgtcgccggcggcaacgtgctgcccagccactgccagttcttcccggccgccgccgccgccgccgaccggacaagccagagcacgtggaacgccgccgcgccgctcgtcaccagagagctcttctag

SEQ ID NO: 2989 - DNA, 1377 bp, Oryza sativa
atgaacaggggcggcggcgtcggcgtcggcgatgagagcggaagcgactacgagagcggcggcggcatgcggaagccgctgctgatgcacacggggagctggtacaggatggggtcgcggcaggggagcctcaccggcgcggggacctcgtccatggccatcctacgcgagtcccacgtctccgccttcctctgcacgctcatcgtcgcgctcggccccatccagttcggattcacggggggcttctcctccccgacgcaggacgccatcatccgagacctcgacctcaccctctccgagttctcggtgttcggatcgctgtccaacgtcggcgccatggttggggcgattgccagtggtcaaatgcccgagtacattgggcgcaaagggktgagaatttttttccttttttgggtacacatctcattgatgattgctgcaattccaaacatcattggttggcttgccatctcctttgcaaaagactcatcgtttctttatatgggacgattgctcgaggggtttggtgttggtgtcatctcttatacggtgccagtttacatagcagaaatatcacctcaaaacatgagaggtgctcttggctcagtgaatcagttatctgtaaccgttggtatattgttggcatatttgctcggcatgtttgttccttggaggcttcttgctgtaataggaatcttgccttgcactgtgttgatacctggcctattcttcattccagaatccccaagatggttggcaaagatgaacatgatggatgattttgagacttctttacaagttctgaggggatttgagactgacatcagcgcggaagtgaatgatataaaggtagcatcttcaaagcagcagtcatattttagccgatttggcttcgtgacacgcaaaatttcttcaggtctcacaaacagtgacttggctacatgtgcacttggtgctatccagatctcttctgctgggatgactctaagcctccttgcagttgctgttgtatttttcctcaaggatagcatttcacaagattctcacatgtactacaccttaagtatgatctccttggttgctcttgtggcttttgtaatcgccttctccttcggtatgggtgccattccatggatcataatgtcagagatcctcccggttagtatcaagagtctcgcaggaagctttgcgacgctcgccaactggcttacatcctttggaataacaatgacagcaaacttgatgcttagctggagtgctggagggacctttgtgtcctacatggtcgtgagtgctttcaccctcgtgttcgtcatcctttgggtgccagagacaaaaggaagaactctcgaagagatacaatggtccttccgctga

SEQ ID NO: 2990 - DNA, 1428 bp, Oryza sativa
atgcctaagcaaaatctttactccgattcgcatccgccgtttaggcttcatcgggcggcccccatctcgcgacgggattcagggaaacctgcgctagatgagatcggcggcgagatggtggcctcgccgcattacagctgcaagttgagacctcgtgttcgtccagctgggttccagtccaggagcagcatcgcagcatgctctcgccacagacaaccagaatgcatggaagcaactagccaacgaccacgaggcaaagcagcaagatatgatgatgatctgtacttacaacagcatatgttctcggctttcggttcgctgtccaacgtcggcgccatggtcggagcgatcgccagtgggcagatggcggagtacattggccggaaagggtcgttgataattgcggcggttcctaacatcattggttggcttgccatctcctttgcaaaagacgcgtcatttttatacatgggacgcttgcttgaaggttttggtgttggtgttatatcatatacggtgccagtatacatagcagagatatctcatcagaacacaagaggagcacttggctccgtgaaccagttgtccgttaccattggtatcttgttggcctatttgctaggcatgtttgttccttggaggctgcttgcagtgataggaagcatcccatgtacattgttaatacctggtctattcttcattccggaatccccaagatggctggcaaaaatgaaaatgatggatgattttgaggcttctctacaagttttgagggggtttgagactgatattactgcagaaagagcagtagcatcggcaaacaaaagaaccacagtccgttttaaagagttgaaccaaaagaaataccgcactcccttactgataggaactggccttcttgtacttcagaatctaagtggaataaatggtattctgttttatgcaagtagaatcttcagagatgcagggtttacaaacagtgacttggccacatgtgcactaggagcaattcagatctctactgctgggatgactctaagccttcttgcagtatctgttgtattttttctggagggtaatatttcacatgattctcattcgttctacatcttaagtatgatctccttggttgctcttgtggcttatatcatcaccttttccttcggcatgggtgccattccatgggtcatgatgtctgagatcctcccagttagcatcaagagtcttgggggaagctttgcgacacttgccaacatgcttacatcctgggcaataacaatgacagcaaatttgttactcagctggagtgctggaggaacatttttgtcctacatgattgtgagtgctttcactctcgtgttcgtcatattttgggtgccagagacaaagggaagaactctggaggagatacagttttcgttctgctaa

SEQ ID NO: 2991 - DNA, 480 bp, Oryza sativa
atggcgaccacgccggcggtggcgcagaactcgccgcaggacttcgtggacctccacaacgcggcgcgacgcgtggagggcgtcggcgaggtggtctgggacgacgccgtggcggcgtacgcggagaactacgcggcggagcgcgccggcgactgcgcgctcatccactccggcagctgggagaaggccggctacggcgagaacctcttcggaggctccggcagcgagtggacggcagcggacgccgtcaacagctgggtgggggagaaggatctgtacgactacgacagcaacagctgcctggggtcgtgggactcgtgcctccactacacgcaggtgatgtggagccgcacgacggcgatcggctgcgcccgcgtggactgcgacaacggcggcgtcttcatcacctgcaactacaaccccgccggcaacttccagggagagcgccccttcgagcgtggcctcactctctctgcttaa

SEQ ID NO: 2992 - DNA, 1434 bp, Oryza sativa
atgggggtggacgctgctccggatcgcatggacgcggcctcttcttggatgaatcctccggttgaggtctcctctccggtggccggcggcggcggaggagaggatggggcagcgaccaagctgcagaaggtgtaccggagctaccggacccggcgcaagctcgccgactccgccgtcgtcgtcgaggagctctggtggcaagcgttggatttcgcgcggctgagccacagcaccgtctccttcttcgacgacccgaaaccggagaccgtagcgtcgcgatggaaccgcgtcagcctcaatgcctccaaggtgggtcagggtttatccagagacggcaaggctctgaagctggcattccagcactggatcgaggctattgacccacggcatagatatggtcacaatctgcatttctactatgatgtttggtgccaaagccaggccggccagccattcttctactggcttgatattggggaaggaaaagatgttgaccttcctgagtgtcccagagctcgcctgaagaagcaatgcataaaatatcttggtccgcaagagcgtgagctctatgaatacatagttacagaagggaagattatccataagcactctggagaaccacttgatacaagccagggtcctaaagggacaaaatggatttttgttatgagcacaacaaagaaactttatgctggcaagaaagagagaggtgtattccagcactcaagctttttagcaggaggtgctaccatagctgctgggaggtttacagcagaaaatggagttatcaagtccatctgggcctatagtggtcactataaaccaagtgcagagaacctcgccaacttcatgaacttccttgaagagaatggagttgatctgaaagaagttgaggtgcgctcatccaccaacgaagactattatgaagatccagtgcctaataaacagaaccctcttgctaccgtcatggaatccaatcctccacaattgattctccctcagaacatgatagaagaagataaggcatctgagccgttttcgcaagctgaaggtgccgaaagcgataacgttcctaaagtgcaaacaaagccaacctaccaaagaaccctctcaggtggtctgaaaagccctagagctgctgatgtcccgcgggaagcaattctcgagagggtgaaatcgaagggagagtcgaaatcctatcagctcgggcacaggctctccctgaaatggagcactggggttggtccaaggattggatgtgtgaaggactacccaatggagctcagaatgcaagcactggagatggtaaacctgtcaccaagggcgtcgactccatcgccgtcatggaggctgccagcatgcctctcacctacacccaacttaccatcatctcctcttggaccaatccagacttcactgccccagccaagttag

SEQ ID NO: 2993 - DNA, 1824 bp, Oryza sativa
atgacgaggggttcctcgcctgacctccgaatggccgtggagaagttcccagacaacagaatgcttggtcaccgtgagattgttgacgggaaggctggtgcatacgtttggaagacatacaaggaggtgtttgacctttcgactaagattggtaactctattaggagccgtggacttgcaaagggaagccgttgtggtatctatggtgctaattgtcctgaatggattatcacgatggaggcctgcaatgctcatggaatctactgcgttccattatatgacactcttggagctggtgctgtagagtttattttgtgccatgcagaagttgagattgctttcacagaggagaaaaaaattgagcagatcttcaagactttccccaagtcagctgaattcttgaaaacaatcgttagttttgggaaggtaactcaggaacaaaaggaaaatgcctccaaatatgggctggagatctattcatgggatgaatttctttctttggcagaccaagaattcgatcttccagtgaaagcaaagactgacatatgtactataatgtataccagtggaactactggtgaccccaaaggtgtactgatctccaatgcaagcattatttgcctagtcgcaggtgtagatcggctgcttaactgtgtaaatgagcagctggagcaaaccgatgtttacatgtcttatcttccacttgctcatatctttgatcgtgttgtggaagagctatttatgttccatggtgcttccattggattttggcgtggggatgttaagctgcttgttgaagatattgggacactgaaaccaactatcttgtgtgctgttccacgtgtgcttgaccggatattttctggactccaagctaaaattgcatctgggggtttcataaagagtacattgttcaatcttgcttacaaattaatcgagtatgacctaggtattatattttgcagcaagcaatttagaatgatgaaaggagctaagcacaatgaagctgccgcaatatgtgacaaagtagttttcagtaaggtgaaagaaggtcttgggggaaatgttcgtgttattttgtccggagctgctccacttgctactcatgttgaagaatacctgagagtggtgacttgtgcacatgtcttacaaggatatggtctcacggagacttgtgctggatctttcgtctccctaccaaatcagatgtgcatgatagggactgttggtcctccagtgccaaatattgatgtctgcctggaatcagtgcctgaaatgaattatgatgcacttgcaactagaccgcgtggcgaaatctgcatcaggggagaaacagtattctcaggatactacaagcgtgaagaccttacaaaggatgttttgattgatggatggttccaaactggagacattggtgagtggcaacctgatggaagtatgaaaatcatagatcgcaaaaagaatatcttcaagctttcacaaggagaatatgtagcagtagaaaatttggagaacatttatggtcttgtttctgctatagattcggaagcattggagagctgggctgcagcaaatggaatcagtggtgatttggaggcattgtgtgagaaccccaaagcaaaagaatacattttgggagaactgtcaaaagtaggaaaagagaagaagctcaaaggttttgaattcataaaggctgtacatcttgaaccagtgccatttgacatggaccgtgatttgattactccaacatataaaaagaagcgccctcaattgctcaagtactaccagggaacaattgacaacatgtacagaagtgccaaatga

SEQ ID NO: 2994 - DNA, 1884 bp, Oryza sativa
atggcggcggcggcggcggtggcgaagtcggtggaggccggcggcgaaccgggcggtggtggtggtggtgcgtggtccaccgtctcccgctccggccgctcctcctactccgccggtggtggcgtcggcggcgggaaggtgggggagctcgcggaggggttggcgggggtggagatcggcggggaacggaggctggacaagtacgacatccccgtggaggtgagcggcgaggacgtgcccccgcccgcggacgggttcgaggcggccgggctggtggaggccgtgctccggaacgtggcgaggtgcgggtacgagagccccacgcccgtgcagcgctactcgatgccgatcgcgctcgccggcagggacctgatggcgtgcgcgcagacggggtccgggaagacggccgcgttctgcctccccgtcgtgagcggcctcgtcgcggcgggagggagcggaatcggccaccgggagaggtcgtcgttcaaccgcgccgccgcgaagccccgcgcgctcgtgctagcgcccacgagggagctcgccgcgcagtcatttgataatgtgattttcattgacactgttaaccaaaatttctctttgttctgctatgaagaacttgataatattaatgaggaggccaagaagttctctttccaaactggacttagagttgtggtggcctatggaggaactccaatgtataaccagctccgtgatctagagaggggcgctgatattcttgttgctacacccggtcgccttgtggacatggttgaaagatcaaaagtctcccttgaggcaatcaagtacctggtaatggatgaagccgacaggatgctggatatgggctttgagcctcagataaggaagattgttgaaagaatgaacatgccaaggaagtctgtgagacaaactatgcttttcagtgcaaccttcccaccagagattcagagactggcttcggactttttgtcgaactacatatttatcactgttgggagggtgggttcaagtactgacctaattatgcagaaggttgaactcctctctgacggggagaaacgaggctacctgcttgatcttttacagaggcaatctgtcggtgtggctaacagtaagctgcagcaacctctgacattggtgtttgtggagacaaaacgagaggccgactctctgaggtactggctatacagcaaaggtttccctgcaacagcgatccatggtgacagaacacagcaggaaagggagagcgcactgagatcctttaagactggcctcactcctataatggttgccactgatgtagcctcacggggcctggatgtcccaaatgttgctcatgtgatcaactacgatcttcccaagagcatagaggactacgtccacaggattggaagaactggcagagctgggaaggctgggtcagccacggccttcttcactgagtctgaccactcgctggcgaagggcttactggagctgatgaccgaggcgaaacaggatgttcctgactggctcgtacagtatgcagagaggccgtactatggaggttcaagctacggtggaagaaaccggaggtctggtggcgggggcaacaggtttgccggcagagatttccgccagggcagtggcggcggctactcaggtggtggtggtggcggcggctactcaggtggtggtggtggcggcggctactcaggtggtggtggtggctactcaggtggtggccgtggtggtggctactcacgcggtggccgtggtggctactcaggcggaggcggtggcggtggtggagacccctaccgagcaagtgctccacccccgcggtactacccttcgtacccgatgggcacggccgacatcaacgcctctggctgggactaa

SEQ ID NO: 2995 - DNA, 522 bp, Oryza sativa
atgcctcgcgtgcctctccccctcctcctcctcgtagccctcctcgtcgccggcggcggcggcgccgcggcggagacgaagccgacggcgtacgaggcgctggcgacgttcgacttcccgccggggattctccccaagggggtggtctcctacaccctcgacgacgccaccggcgacttcaccgccacgctcaacaccacctccacctgcgccttctccatccagggctcctactccctccggtaccagcgccggctctccggccgcatcgccgccgaccgcctcaccaacctccagggcgtctccgtcaagatcctcttcctgtgggtcaacatcgtcgaggtcacccgccacggcgacgagctcggcttctccgtcggcatcgcctccgccgacttcggcatcgacaacttcctcgagtccccgcagtgcggctgcggcttcgactgccacgaccaccgcgatctgtcgctgccgcttccgctgccggagcccagcctgcggctgcgaggtgcgttctag

SEQ ID NO: 2996 - DNA, 705 bp, Oryza sativa
atgcctcgcctccacctcctcctcctcgccgtcctcgccgtcgccgccgcggcggcgaaagcggcggcggagaagaagccgacggcgtacgaggtcctggagtcctacgacttccccgtcggcatcctccccaagggggtcacctcctacacgctcgaggccaccacgggcgacttcacggcgacgctcgacaccggcgacgacgacgactcatcctcctcmacctgcgagttcgccatcgagggctcctactcgctccgctaccagcgcgccatcaccggccgcatcgccacggggcacctcaccgacctccgcggcgtcgccgtcaaggtcctcttcttctggctcaacatcgtcgaggtcacccgccgcggggaccgcctcgagttctccgtcggcatcgcctccgccgacttcaccgtcgacaacttcctcgagtccccgcagtgcggctgcggcttcgactgcgacgacgacggcatctcctcctcctcgtccctcccgccgccgctcgagcccagcctgctgcgactgcgagggcctgtttggcacagctctagctccagctccamccctcctggagctggagctcagccaaacagtttcagctccactaatactgggagtggagttgggtggagctctctcacaaaatgtactagagttgtggagctgggtttaggcagctccmcaactgcactctag

SEQ ID NO: 2997 - DNA, 1305 bp, Oryza sativa
atggcggatttggatttttttcacacggtgcagtggcggcgggcggggatcgggaggaggtggttcgcgaccgaggcgtccgcggcgtcgacggcggctgagctggtggacgtgcccctggcgcagaccggggaaggcatcgccgagtgcgagctgctgcgctggttcgtcactgagggtgatcaagtagatgaattccagaggctctgtgaagtacagagtgacaaggcaactatcgaaataacaagtcgtttcaaaggaaaagtacatcagattcactttggtcctggtgacattgtgaaggtagctttgggattctttttcaatctcaacagagtggatgctgcaaatccttctggtgaaggcagtgttcctagtggcacactctccacaccagcagttaggcatctagcaaagcagtatgggctcaacataagtgatattcagggaacaggaaaagatggtagagttttgaaagaagatgttctgagttatgctgccagcaagggtctttgcaaagaaccgacatcagctttggaagagaacattgatcaagtggagttactggagggaaggggatcattacccgatgctaactcttatgaagatagaagaatttctctcaggggctaccagaggtcaatggtcaaatcaatgaccctggctgcaaaagtaccacattttcattatctggaggaaataaactgtgatgctcttgtggaacttaaggcatcctttcaaaatgcgaataaagatcatactatcaagcacaccttcctaccattcctcataaagtctctttctaaggcactgagtaaataccctttgttgaacagttgttttgttgaggaaaccaatgaagttattttcaaaggatcccataacattggggtagctatggctacagaacatggattagtggtgccaaacatcaagaatgttcaatcgctttcaatattggagatcacaaaagaattgtcacgtctacatgagatggcatcgcacaacaggctgagcacagaagatattgctggtggaaccataacactaagcaacataggcgccattggtggcaagtttggctctccgcttctcaacttgcctgaagttgccattattgcactcggacgcattcaaaaacttcctcgctttgatgatgatgaaaatgtttatccttcctcaataatcaatgtgactgttggagctgatcaccgagttgttgacggcgccaccgttgcaaggttctgtaatgagtggaaaagccttgtggagaagccagaacggctattgctgcatatgcgatga

SEQ ID NO: 2998 - DNA, 1130 bp, Oryza sativa
atggttagtgggaggtcagcaaatggggaattggatgcatgcttcagaagcctcatgctttcgatcagcagcgggagggggcaggctgaaggtggtggtgcaatgccaaccttgtcaggctggaaggaccttcctattgagctgcttctgcggatcatgtcgataattggagatgaccggatgcttgtcgtggcatccggtgtttgcactggctggcgcgacgcgctgggatgggggcttactaatctttccctctcacggtgccagcagaacatgaataacttaatgatatcacttgctcacaagttcacgaagcttcaagttctcactcttcgccagaacatacctcagcttgaagacagtgcagtagaggccgtttccaactactgtcatgatctacgtgagttagaccttagcagaagttttaggcttagtgaccgttccttgtatgcattagcccgtggctgtcctcagcttacaaaattaaacattagtggatgttccaacttcagtgacactgccttgacctatcttactttccactgtaaaaattttaagtgcttgaatctatgtggttgtgggaaggcagcaaccgacagagctttgcaggccatagcccgtaattgcggccagctgcaatcattgaacttaggttggtgtgaggatgtcacagataagggagtgaccagcttggcatcagggtgtcctgatctcagggctctggacttgtgtggttgtgttcttataacagatgagagtgtgatcgctcttgccactgggtgtccacacctgcgatctttaggcttgtactactgccagaacatcaccgaccgagccatgtactccctcgcaaacagccgggtcaagagcaaacgcaggaggtgggacagtgtgaggagcagcagctctaaggaagaagacggtctcgcaaacctgaacatcagccagtgcacggccctgacacccccagcggtccaggcggtctgcgactccttcccggccctccacacttgccctgggaggcactccctgatcatcagtggctgcctcagcctgacgtctgtccactgcgcctgcgccctccacccgcaccgtgctggaagaaccatggtgcctagccacgcatactg

SEQ ID NO: 2999 - DNA, 1344 bp, Oryza sativa
atggcaacgcccaagctgtcccctgtatcgccggtgcggccggaagataagcagcgcgcgtcctcctcgtcgtcgtcgggggcggtggctgcgcctctgagggtgcaggacgatacggcggtcgaggagtacgagcagtacctgcggcttccggagctcgcaaggctgtggaaggataggtgctgtccggagtgggccgacgagggcctcgtcaagccggcgctgcaggcgctggagatcaccttccgcttcatctccgtcgcgctctccgacccgcggggctacgccagccgccgcgagctcgcgcggcggctggaggcgctcgcggcaagggaggtggagctggtggccgcgctctgcgagggcgagcagtgcccgccgctggccgagctgagcgcgtcagcgaggccagcctgctcccgcggctcgccgcttggggacaagtccgagaccgtggcggccaggatcaagtacgccatcgagagccagatgcagggctgcgtgttcaccctcggcctcggcgagcccaacctcgccggcaagccggtgctcgagtacgaccgcgtcgtgaggccgcacgagctgcacgccctcaaggcgaagatcgcgccggagcccaagaccggctaccgcaacaaggagaacgaggcgctgttcactatccaccagatactcgagtcctggctgtgcgcggcctcacagcttctcacccgcctaaacaaccggatcgaagcaagaaactgggaggccgcggcgagcgactgctggatcctggaacgcgtctggaagctgctcgccgacgtcgaggacctgcacctgctgatggacccggacgacttcctgcggctcaagagccagctcgcaatacgggcggcaccgggctccgacgcgtcctcctgcttccgctccagggcgctgctgcacgtcgctaacgccacgagggacctcaagaagcgtgtgccatgtgtgcttggcgtcgaggtggaccccaacggcgggccgagggtgcaggaggcagccatgaggctgttccacagccggcggcgcggcgagggcgaggaggccggcaaggtggagctgctgcaggcgttccaggccgtggaggcggcggtgaggaggttcttcttcgcgtaccggcagctcgtggcggcggtgatgggcaccgcggagtcgtcgaccaaccgcgcgctgttctcgccggcggaggagatggaccccctggcgcagatgttcctcgagccgccctacttccccagcctcgacgccgccaagacgttcttggccgactactgggtacggcggatggccggtgacggtgactctgcttcgtccaggcgaagctga

SEQ ID NO: 3000 - DNA, 1560 bp, Oryza sativa
atggagggtggtaggctaggaggagcggcggcttcagcatcggcggcggcggcggcggacgcgcgcggcgggatgtcgggcttcgcggctcctcagcacgccatagtgaagcatggaccagggagtgtgacacattgtggtggaaaatggacttttgctgaactatgccagtctgaacaaatttgggttcttgactgctactgcatgcaatgggcatgcaagtttgcgaccaatgcaactgaatgccatacaaatttgaacaacgtgcaacctactcaagttactgattttggggcacttgcgcagtctgctggattccgaatagaagatctcgctaatctcagtacaaatggtttgttcaatctgaagtcaaatgctcataccattatcaatgaccccctccaatttgagaattatgtaaagtctatttctccgtctaatattactacaacagcaacagtaacagtagttgaccctcagacactggtcccacaaaagggagcacaactgaatttggtaactataaggactggtaacgttgagaattggggggagtcgactattgctgatacaagtccaaggactgatacatcaacagatccagacactgatgagaggaatcagatgtttgaacaaggacagttagctgctcccactgcttctgattctagtgacaggtcaaaggacaaactagatcataagacacttcgccgccttgcccaaaatcgtgaagctgctaggaaaagccgtttaagaaagaaggcatatatccaaaaccttgagagtagcagattgaaacttactcagatagagcaagagcttcagcgggctcgtcaacagggcatttttatatcaacatcgagtgatcagtcccactcagcgagtggaaatggagctttggcatttgacatggagtatgcacggtggttggaggagcataacaaacatataaatgagttgagggctgcagttaatgcacacgctggtgataatgatctcaaaagtacagttgatagtattatggcacactacaatgaaattttcaagctcaagggtgtggcagccaaagcagacgtttttcatgtgctgtcgggaatgtggaaaacccctgctgagaggtgcttcatgtggctaggtggcttccgatcatctgagcttcttaagttactggcagggcaattagagcctcttacagagcagcagcttgctggcatagccaacctgcaacaatcctcccaacaggctgaagatgctctttctcaagggatggaagcactacaacagtcgcttgcagagaccctggcatcaggatctctcggccctgcaggatcttctggtaatgttgcaaactacatgggacaaatggcaatggctatggggaaacttggtaccctagaaaacttcctacggcaggctgataatctgcggcttcagactcttcagcaaatgcagcgcatattaaccactcgccagtcagcacgagctctacttgcaataagtgactacttctcccggcttcgtgccctgagttctctttggctcgcccgtccaagggaataa

SEQ ID NO: 3001 - DNA, 726 bp, Oryza sativa
atggcggcggcggcgaggcatcgggggacggtgaagtggttcaacgacaccaaggggttcggcttcatctcccccgacgacggcagcgaggatctcttcgtccaccagtcctccatcaaggccgacggcttccgctccctcgccgagggcgagcaggtcgagttcgccatctccgagagcgaggacggccgcaccaaggccgtcgacgtcaccggccccgacggatccttcgtcaagggcggcgccggcggcggcggcggtggcgggggaggcttcggatcgcgcggtgggggcggatctggcggtggcggccgcagctatggcggtagctgggscggggggaggagatccggcggtggtggacccggtgggggctgcttcaagtgtggggagtctggccacatggccagggactgcttcaacggcggcggtgtcggcgttggtggaggcggtggcggcggcggcggcgctggtggtggctgcttcaagtgcggcgagatgggccacatggctagggactgcttcaacagcggtggtggtggaggtggtggtggtggcggcggcggcggcggcgcctgctacaactgcggcgagaccggccacctcgcgagggactgctacaacggcggcggtggaggcggaggcgggcgattcggcggtggaggcgaccgctcctgctacaactgcggcgaggctggacacatcgcccgcgactgccacaagtga

SEQ ID NO: 3002 - DNA, 2883 bp, Oryza sativa
atggcgtactgcatatttttcacattctatatggggcatgtagtcaccattagtgatatgatatatcctgacaggtgcaagcttcttgacaatatgctagacattagcattagcagagtagaagttaatgagataacaatgatcacaggaggcttggaaatatggcgcatcgagaacttcaagccagttcctattcctgcgtcttcatatggaaaatttttcatgggtgattcttacatcatcttgaagacaactgccttgaaaaatggttctcttcgacatgacattcattactggattggcaaagatactagtcaggatgaatctggaactgcagcaattttaacagttgagcttgatgctgcacttggtggacgcgctgttcaataccgagagatacaaggcaatgaaacagataagttcctctcatattttagaccatgcatcatgccacagccaggaggagtggcatctgggttcaagcatgttgaggttccttttgctcgatcgtccctgaatcatgatgacatatttattctggacacgaagtccaaaattttccagttcaatggctccaattcgtctattcaagagcgtgcaaaggctcttgaagtcgtgcagtacatcaaagatacatttcacgagggcaagtgtgaagttgcagctgttgaggatggcaggttgatggccgatgctgaagctggtgaattttggggtttttttggtggctttgcccctctaccaaggagagcccctgtagaagataatgagaaatatgaagaaactgttttcaaattgctctgttttaaccaaggaaagttggagcctatcaattatgaatccttattgcacgagttgctcaagacaaataagtgttacttgttagattgtggtgtcgaattatttgtttggatgggcagaaccacatctttgcaggagaggaagagtgccagtgaagctgctgagaaattgctctctgatgataaccgaacaaaaacacatgtaatcaaagtaattgaggggtttgagacagttatgttcaagtcaaaatttaaagagtggccacagacacctgacttgaaattgtcatctgaggatggaagaggaaaagttgcagctcttctgaaacgccagggcttaaatgttaagggcctgatgaaagctgctcctgcaaaagaagaaccccaagcttacattgattgcactggcagtttgcaggtctggcgcataaatgataaggacaagatacttctgccatctgctgaccaatcaaaattttacactggcgattgctacatatttcaatatatgtaccctggagatgacaaggaggagtgtcttattggaagttggtttgggaagaagagcattgaggaggatagggtaactgctatttcacttgcaagcaagatggttgagtctgcgaaatttcaggctgtccagacacgactatatgagggaaaagaaccaattcaattcttcgtcatatttcaaagcttccaagtgtttaagggtggtctaagctctggatacaagaaatttattgctgaaaatggtattgatgatgacacttatttggaagatggacttgcgctcttccgaattcaaggttcaggaccagaaaacatgcaggcaattcaagttgatgctgcggcatcgtctttgaattcatcctattcgtacatcctacatgatggaaatactgtattcacttggactggaaaccttactacgtcattagatcaagaggtagttgagaggcagctagacataattaaggaagagaaaggactaacacacaggacgtggcagatgacatgttcacattgctcttcgagttttctgatatatatctgctcttctattctgccaacaacacctattggggtccatgaaggcaatttaaagatcaaagaaatataccacttcactcaagatgatctgatgacagaagatgtattcattctggactgtcactcagatatatttgtttgggttggccagcaggtagatgtcaaagtgcgattacaagctctggacattggtgagaaattcgttaagcttgatttcctgatggaaaatctatccagcgacacaccaatttttgttatcatggaaggaagtgagcctacatttttcacaaggttcttcacttgggactcagcaaagtcacttatgcatggcaattcataccagaggaagctttccattgtaaagggtggaggttctcctgctttggataaaccaaagcgacgaacaccaacatattcagggagaagcactgtacaagacaaatctcagcgctcgaggagtatgtctttcagccctgaacgtgtccgtgttaggggaagatctccggcattcactgcattggctgctaactttgaaagtgcaaacagcagaaatctttccacccctccacccgtagttaaaaaactttacccaaaatctgccacacctgactcatcaagtgcaccgtctaagtcatctgcaactgcttctctcactggttcttttgatcgccctaaatcagtaaaagatggatctgagttggagaagccaaagcaagaggaagatgcaaaagaaggcattaacaccatgaccagtagagttgaatctctcactattaatgaagatgtaaaagaaaatgaaccagaagatgacgaggggctcccagtatacccatatgatcgcctgataactacagctgctgatcctgtcactgaaattgacgttaccaggcgagaggtgtgccctcttaccatctcccattttaccaagcgttcagtactggttcgagggtcacacaggagagaagggttcccaatccttactcctaaacacagcctaaatagcatcttgagacagagagggcaagactaa

SEQ ID NO: 3003 - DNA, 2244 bp, Oryza sativa
atgccaacggttattggaggttggggcaacaacttagcatgcagatatgaagccatttactcatccaaaattggcgatccgktcttctccctctgtttcttccttgacttctcgccggcggcgtggtgtgcacgcggcaaccagaggaaccgcgaccgcgagcgcgcgcaggcgcggaagcccaacgccaaggacccccaggacgggctcacctcggagcagcgccgcgagagggataagaaggcacttgaggagaaggccgccaagaaggcggcgcakgccgcgggcggcggcggcggtacctccacggacaacaggagtaaggccggcggtgcaaagaacgaccttgccggggctcccgtgctcgccgcgtcggcccccgcggccgccaacccctacgccgccgcgtacgcgcccgcgccggctgctcccgtggcccccgctggtggcgacttctcgcgcttcggcgggagaggccgtggtggaggcgcgggcggcggtgggtggggtagaggtggtggtggtggtggtggcgctggcggataccgaggcggcggtgggagaggaggtggaagggacgcgctggactcgctctccttgccgaagcctgacttccggagccttatacccttcgagaagaacttctatgtggagtgccccgccgtgcaggccatgtcagacatggatgtgtcgcagtatcgtcgccagcgtgatatcactgttgaaggccacgacgtgcccaagccggttcgctacttccaggaggccaacttcccagattactgtatgcaagcaatagccaagagtggattcgtagagcccacgcctattcagtcacaaggttggccaatggctttgaagggcagggacatgatcggtatcgcacaaactggctctgggaaaacactatcttaccttctccctgggttggttcatgttggtgcacagcctcgactagaacaaggtgatggcccaattgttctgatccttgctcctacaagagaactggctgttcaaatacaacaagaatctggcaaatttggatcatactcaagaactagaagcacttgtatctatggtggagcacctaagggaccacaaatacgtgaccttaggagaggggttgagattgtcattgcaacacctggtcggttgatcgatatgctggaaggtggtcacactaacctgcgaagagtaacatacctcgtcctggatgaggctgaccgcatgcttgacatgggttttgagccccagattcgtaaaatagtggcacaggcatggcttatccggccagacaggcaaaccttgtattggagtgccacttggccaagagaagtagaatccttggctagacaatttctgcagaacccatacaaggtaatcataggatcacctgatctgaaagctaatcattccatacagcaaattattgaggtcatatctgaacacgaaaagtatcccagactcagtaaacttttatctgatctaatggatggaagcagaatcttgatatttttccaaactaaaaaggactgtgacaaggtcactcgtcaacttagaatggatggatggccagcattatctattcatggtgacaaagctcaagcagaaagggactatgttctggcagagttcaagagtgggaaaagtcctataatggctgccacagatgtagcggcacgtggtcttggggaacttatcttcagaagtttatatgctgctattttaaacgtgtgccctggtcttatcactgccaactggtcccaagatgtttgtagagctattgcctactactgtattgttcttgacagtgtgaagtgtgatcctcatattgaccttctgatgcagcaccttaagcattgcagcctgtgttggaattggttacagattttcattgggttcatttggatagttatggatactgatgtcaaggatattaagtgtgtgataaattttgattttccaacaactcttgaagattatattcacagaataggtcgaactggccgcgctggtgctagtggaactgcattcacctttttcacactctccaatgcaaaattctccaggaatcttgttaagatcttgagggaagctggccaggttgtgaatccagcgctagaatctatggctaaatctgccagttctatgggaggaggcaatttccggtcaagggggcgtggtgggtttggtaacagatctggctcaaatagcattcccataagaggaagaaggccatactga

SEQ ID NO: 3004 - DNA, 1896 bp, Oryza sativa
atggttgtcaacaacaaggtggacagcctctcctacgacgtcgaggcgccaccggcgcaggcgccgacgaccccggcggtggtctccgcgccgccgacgccgcggggcaaggccccggcgatgacgacgacggcggcggcggagctgcacaaggtttcggtcccggaaaggaggtcaacggcaaaggccctaaggcagcggctggcggaggtgttcttccccgacgacccgctccaccagttcaagaaccagtcgtccgcgcggcggctgggaatcagctacgccaagctcgccaacctgcctccaatcattggactatattcgagcttcgtgccgccgctgatctactcgttgttgggtagctcgcgggatctggctgtagggccggtgtcgatagcgtcgctggtgatggggtcgatgctccggcaggcggtgtcgccggaccaggagcccatcctctacctccagctcgccttcacctccaccttcttcgccggcgtcttccaagcctccctcggcttcctccggctggggttcatcgtggatttcttgtcgaaggcgacgctgacgggattcatgggcggcgcggcgatcatcgtgtcgctgcagcagctcaagggattgctcgggatcatccatttcacgtcgcagatggggttcgtccaggtgatgcactccgtcttcaagcaccacgacgagtgggcgtggcagaccatcctcatgggcgtcgccttcctcgccgtcctcctcaccacacgccacatcagcgccaggaacccaaagcttttctgggtgtcagcagctgctccactgacatcagtgatcatctctaccatcatctcgttcgtcagcaaagctcatggcatcagtgttattggcgatctccccaagggattgaaccctccttcagcgaatatgctgaccttcagtggctcctacgtaggactggccttaaacacaggaattatgactggcatactatctctcactgaagggatagcagtaggcaggacatttgcatccatcaacaactaccaggttgatggaaacaaggagatgatggccattggtgtcatgaacatggctggctcatgtgcctcctgctatgtcaccacaggatcgttctcgaggtcggcggtgaactacagcgcggggtgcaagacggcggtgtcgaacatcgtgatggcgtcggcggtgctggtgacgctgctgttcctgatgccgctgttccactacacccccaacgtgatcctctcggcgatcatcatcaccgccgtgatcggcctcatcgacgtccggggcgccgccaggctgtggaaggtcgacaagctcgacttcctcgcctgcatggccgccttcctcggcgtcctcctcgtctccgtccagatgggcctcgccatcgccgtcggcatctccctcttcaagatcctcctccaggtcacccgcccaaacatggtggtcaagggcgtcgtccccggcacggcgagctaccggagcatggcgcagtacagggaggccatgcgtgtgccgtccttcctcgtcgtcggcgtcgagtccgccatctacttcgccaactccatgtacctcggcgagaggatcatgaggtttctccgggaggaagacgagcgggccgccaagtgcaaccagtgccctgtcagatgcatcatcctcgacatgagtgctgttgcagcgatcgacacgagtggcctcgatgcacttgcagagctgaagaaggtgctggaaaaaagaaacatcgagcttgtgctggccaacccggttggatcggtgaccgagaggctgtacaactcggtggtcggcaagacgttcggctcagaccgcgtgttcttcagcgtcgccgaggccgtcgcggcggcgccgcacaaaacacagccctga

SEQ ID NO: 3005 - DNA, 1044 bp, Oryza sativa
atggggccgaacgtgtcgtcggagaagaaggcgttggcggcggcgaagaggagggcgtacgtgacgttcctggccggcgacggcgacgkcgactastggaagggcgtcgtggggctcgccaaggggctccgccgcgtccgctcggcgtacccgctggtggtcgccgtgctcccggacgtccccggcgagcaccggcggaagctggtcgagcargggtgcstggtccgggagattcagccggtgtacccgccggagagccagacgcagttcgccatggcctactacctcccgcattctgggagtttcgtggagtacgagcggatggtctacctcgacgccgacatacaggtgttcgacaacatcgaccacctgttcgacctcgacaagggcgccttctacgccgtcaaggactgcttctgcgagaagacgtggagccacacgccgcagtacgacatcggctactgccagcagcgccccgacgaggtggcgtggccggagcgcgagctcggccccccgccgccgctctacttcaacgccggcatgttcgtccacgagcccggcctcggcaccgccaaggacctgctcgacgcgctcgtcgtcacgccgcccaccccgttcgccgagcaggacttcctcaacatgttcttccgcgaacagtacaagcccatccccaacgtctacaacctcgttctcgccatgctctggaggcacccggagaacgtcgacctcgaccaggtcaaggtcgtccattactgtgcagcgggttcgaagccatggaggttcaccgggaaggaggagaacatgaacagagaagatataaagatgctggtgaagaggtggtgggacatctacaacgacgagagcctcgactacaaggaggaggaggacaacgccgacgaggccagccagcccgatgcggacggcgctcgccgaggccggcgccgtcaagtacttcccggcgccctccgccgcgtaggcgcgctcgtcgccggcagtggccgccgtcaagtcttgatagctacaataataattggcgcttattaa

SEQ ID NO: 3006 - DNA, 1248 bp, Oryza sativa
atggcggatcagctcaccgacgaccagatcgccgagttcaaggaggccttcagcctcttcgacaaggacggcgatggttgcatcacaaccaaggagttgggaactgtcatgcgttcactagggcagaacccaacggaagctgagctccaggacatgatcaacgaggttgatgctgatggcaatggaaccattgattttcctgagtttctcaatctgatggctcgcaagatgaaggacactgattcagaggaagaactcaaggaggccttccgggtgtttgacaaggaccaaaatggcttcatctccgctgctgagctccgccatgtgatgacaaatcttggcgagaagctaactgacgaggaggtggatgagatgatccgtgaggctgatgttgatggtgatggtcagataaactatgaggagtttgtgaaggtcatgatggccaataattcttgtccttggtatgtccagattgcagttgggcctagtcatacacgattgcgcatggagctggacaagaaatttaaggtgctttgcctgcacggcttccggacaagtgggagttttctgaagaagcaaatcagcaaatggaatccttccatcttccaacaatttgacatggtcttccctgatggcatattcccagctggagggaaatcagagatagaaggcatatttcccccaccctactttgagtggtttcagttcaacaaggacttcactgaatacacaaatctggatgagtgcatttcatacctgtgtgattacatggtgaaaaatggaccttttgatggcctgcttggattctcccagggtgcaactctttctgctcttttgataggttaccaagcacagggcaaagtactgaatgatcatccaccaatcaagttcatggtctcaatagctgggagcaagttcagggacccaagcatatgcaatgtagcctataaggatccgatcaaggtgaaatcagtgcatttcattggagagaaggattggctcaaagtgccttccgaggagctggccgctgcctttgaggaccctgtcatcataagacatccccagggccacactgtccctaggcttgatgaggcaagtgtgaagcagctttctgagtggagctcaagcatcctggaagacatcaagaatgcagatgatgttgccaaggcttcaattgtggagaagccatctgagggtaataccgtggcagagtccggtgaaaacctggtggagcaaattgcagcttga

SEQ ID NO: 3007 - DNA, 2103 bp, Oryza sativa
atgttcacctgccggccgctggtgtcccctccgctgccgcggcgcctcgccgtcgcgtcccctctggcgcccgcgcggccgcctccctcgtcggcgtcgtcgctgcgcgtggtgcggtgcatggcgaaggagcggcgggtgcggatggtggcgaagcagatccagcgggagctcgcggacatgctcacccgcgaccccgtcctccagcgcgccgtcytccccgaggccgcgctcggcgccgaccagtacctctcctccctcaccaccatcgccgacgtcgagctctccaacgacctccaggtgtgcaaggtgtatgtctccgtgtttggggacgagagggggaagaaggtggccattgctgggctcaaggctaagactaagtacgtcaggagccaaataggcaagcggatgaagctgcgcctcacgcctgagatacggttcatcgaggatgagtccatggagcggggaagcaggattcttgctatactggacaaattaaaggaggaaagggagcaacaagaaggaaatgaagaagaggaagatggagaaggtgcaaatctatcagaagaagaagaaggtggaagaaagcgttctcaggaaactgaaaagaaggcaaatccaactacaaaatggttgcatgcaatgtttgaacaacacaggaagcatcttttgatgcagcgtggaacttgcattagcgagggcgcatacatgccgagtatgtttgtgctactggtttctgatgaagaagagatagctaagctttatgagctgaaggagagttaccaccattcgatgggcaccgacacttgttttgcaggatcgtgctgtaaaatggcatcgtactcaaaggtagagggtcccactgcaggcgggccctacaaatactccctgccctcgttgcccactcttcccctcaaatttcctcctcgcctcgcctcgcctcgtcccccacccaccagatctaagcaggttgaaatggccacgacgcagcactccaacggcggcgccgccggcgacaacggcgaggccgcgccgccgtcggttccgccctccctcgcgccgccgcggaaggtggccctggtgacgggcatcacggggcaggacgggagctacctgacggagctgctcctcggcaagggctacgaggtgcacggcctcatccgccgctcctccaacttcaacacccagcgcctcgaccatatctaccacgacccgcactcccagccgtcgacgccgcgccccccgatgcgcctycactacgctgacctctccgactcctcctccctccgccgcgcgctcgaccacatcctccccgacgaggtctacaacctcgccgcccagtcccacgtcgccgtctccttcgaggtccccgactacaccgccgacgtcaccgccaccggcgcgctccgcctcctcgaggccgtgcgcctcgccagcaagcgcatccgctactaccaggcggggtcctccgagatgttcggctccacgccgccgccgcagagcgagtcctcccccttccacccgcgctccccctacgccgccgccaaggtcgccgcccactggtacaccgtcaactaccgcgaggcctacggcctcttcgcctgcaacggcgtgctcttcaaccacgaatccccacgccgcggcgagaacttcgtcacccgcaagatcacccgcgccgtcggccgaatcaaggtcgggctccagaccaaggtcttcctcggcaacctttccgccgccagggactggggattcgccggggactacgtcgaggcaatgtggcgcatgctgcagcaggacaagcccggcgactacgtcgtcgccaccgaggagtcccacaccgtcgaggagttcctccaggccgccttcggctatgcagggctcaactggaaggatcatgtagtcattgacaagaagtacttccgccccgccgaggtggacagcctccagggggatgcaaccaaggccaggaaggagcttgggtggaagcccaaggtcgggttccagcagctcgtcgagatgatggttgataacgacattgagcttgccaagaaggagaaggtcctcgtcgatgccgggtaccgtgatcccaagcagcagccatag

SEQ ID NO: 3008 - DNA, 3708 bp, Oryza sativa
atgggctgccgtgccctcgggccggcccgtttttattgggccgtgcctgggccgattaggatgagttcgaagaaggttccattccaccgacataaggagaacgaagaggcgaggaagaagagagagcaagatgaagcggcacgtgtgtacgaggaatttgtggagtcattcaagggtgatagcacatctgggtcgaagtttgtccgaggaggtgtgattgatcccaatgccaagctgaggattgattccgaaggtggaaagtccaaagatggggggtctgttccaaagaagggcagtaggtatgttccatcttttttgccgccgtcatttgggaaagagccggacaaaaagaaagaagaggagcgtccaaaggaaaaggaaagacgaaagccacgggtaatagacgagttcatggaggagctcaagtttgagaaagagcttcgacaaaagcgtaatcaggaacgcgagcaatggcgtgagggtcgacacactgacacatctgcttcctctagccgttttgatgaactaccagatgaattagatcccattgggaaacttccaggatcatttgatgatggggatccacaaaccacgaacttatatgttgggaatctttctcctaaggtggacgagaattttcttatgaggacatttggtcgttttggacctattgctagtgtcaagattatgtggcctcgaacagaagaggaacgcagaaggcaaagaaattgtggttttgttgccttcatgaatagggctgatggacaagcagccaaggatgaaatggaaggtgttgttgtgtacgactatgaactgaaactagggtggggcaaatctgttgctcttccttcacaagcactgcctgctcctccaccagggcacatggcaatccggaataaggagggtggtactgtcatcttatctggtcctggtggtccacctcttgcatctgttaaaccacagacctcagagctggtcctcacaccaaatgttcctgatatagtggttgctccgccagatgatgcacatgttcggcatgtgattgacacaatggctctgcatgtacttgacgggggatgtgcttttgaacaagctgttatggagagaggccgaggaaattctttatttagtttcttgtttgatcttaaatcaaaggagcacacatactatgtttggaggctatactcatttgctcagggaagtggtgatagtattttgttggaagtgaactgtgatagtaaagagggtgatactttgcagcggtggagaacagaaccatttatcatgattacaggaagtggaagatgggttccacctgctttgccatccagcagaagtcctgagcgtgaaaaagaatctacttttgcggctggtagaagcaggcgtgtcgaagtggagcgcacattgactgattcacagcgtgatgaatttgaggacatgctacgtgcattgacattggagagaagtcagataaaggaggctatgggatttgcattggataatgctgatgcagctggagagattgttgaagttcttacagaatctttgacactcaaggagacacccatcccaaccaagaaagcttcaaygmttttataccgcagtatcactggaaggattactgctgaagctctgaaggagagagttttgaaagttctacaagtatgggcggactggttcttattttccgatgcatatctgaatggactaagagctacctttcttagatcaagccacttaggggtcatcccttttcactctctatgtggtgatacaccagaaattgaaaagaaagctagctctgaggacggcagtgatggatttaggctcaacgaagatggtgccttggccacaggaaaggcagcggcaacaagggagctgttagggcttccgctagctgaacttgaacgccgttgcagacataatggcctctcgctatgtggtggtaaagagatgatggttgccaggttgcttagcttggaagaggctgagaaggaacgagtatatgagaaggacgcgggcattaaatatggacaaggagaatcgcatagaactggaagagatgacattgctgtgaatgctcgtaatgcttctagacctggagaaggtactgatagtggtgaatcagacatgttgggtctctctcattatgctatggaagcagggtacaaacgctctaatgaatccacacccgctgaacctgttccaagcaagaagccaaaagttgaccctgttttgcccgcttcaaaatggagtcgagaggatgatgtcagcgatgatgaagatagaaaaggtggcagaggcttaggattaagctattcatctggtagcgatattgctggtgattctgggaaagctgatgcaacagaagttagtactgatcactcgaatcatcaccaggatacgattcttgatgaagagcatagaaagaagttaaggcagattgaaattgctgttatgcagtatcgtgaatctcttgaggagaagggtttgcgaaacacagaagagattgagaagaaggttgccagccaccgtaggcgtcttcagtctgaatatggtttatcattttcaaatgatggtgcaaacagcaggcgctcttckggagccgtagtcctccaaggagatcactggaaagagatcgagagcacaatcgcaacagrgacacagacagatctcatggtaatgatgctggacgakagagagacaggattgaaggtgcattattctcatcctttgcgtttgtataattgtatcttaccagtctggtcaggcttgaaatgtgccaaagagaagtggatgttgagacttgagactgtatccttctgtgtcctacatggtagtagtacagacacttgtgtgatgtctgttaggtttttgtttctgtttttctccatcctgttacatcagcattggtgctttgcatacctgcttatcaacatgggaatctacctcagtacccccaaaaccgataagttctctgaagacggggaaaatgataagcttaaacttggtctttcgtctatgcaaggatggcgtgcaaacatggaagatgctcattcagcattgctaaatcttgacaatgagacatcgttctttggtgtttttgatggccatggaggaagagtggttgccaaattctgtgcaaaatatttacactctcaagttctcagaagtgaagcctattcagctggtgacttaggcactgctgttcatagagctttcttcaggatggacgaaatgatgcgaggacagagaggctggagagaactatctgcacttggagataagataaacaagattggtggtatgattgaagggttgatttggtctccgagaggcagtgattcgaataatggacaagatgattggtctttcgaagagggctggccaggagatatggaatttaaacagaacaaattcttgcctcctgagaagcaaatcgtgactgcaaatcctgacatcaacgttgttgagctttgcgacgacgacgactttcttgttttagcatgtgacggcatttgggactgcatgtcaagccaacagctggtggatttcatccacgagcatatacagaaggagagcagtctttctgcagtgtgcgaaagagtgctcgacagatgcctagctccatcaacaattggtggagagggatgtgacaacatgaccatggttctggtgcagttccaaaagsccwattactcagaatwa

SEQ ID NO: 3009 - DNA, 1155 bp, Oryza sativa
atgtcttctgtttgcaaacttatgccagaacaagagtctgaccatggcgaggacggctctgcaccaaaagccgccgccgtgcgtggtgggtcaccgagaggcggcgtccggtggtggctgtcggtggcggcggacatgttcatggtgctctgcggccagaccgtggccaccctcctcggccgcctgtactacaactccggcggcaacagcaagtggatggccacgctcacgcagtccgccggctcgccgctgctcgccatccttctcctcttcacgccggcgcccgccgccgacgagcccaggccggcggcggcaaagatggcgcccatctacgtcggcctcgggatcatcatcggcttcgacaacctgatgtactcgtacgcgctgcagtacctgccggtgtccaccttctcgctcgtggccgcgacgcagctcggcttcaactccgtcacctccaggctcatcaacgcgcagcggttcacggtgctgatcgccaactccgtcgtcgtgctcaccttctcggcggcgctgctcggcatcggggcctcctccgacgagaccgccagcagcgtgccgaggggcaagtaccccgccgggttcgccctgacgctcgccgcctccgccgtgttcgcgctcatcctgtcgctgttcgaggccaccttcgagaaggtggtccggacgcggacgctccggtgggttctgcgcgcgcagctgtggaccaacgtggtggcgtcgacggtgtcggcggtggggctgctcgcgtcgggggactggaggacgataccggcggagatggcggcgttcaaggacgggagggcgaggtacgtggcgacgctggtcgggacggcggtgtcgtggcaggtgatggcggtgggctcgctgcggctgatcgtgagggtgtcgtcgctgttcgccaacgtgacgggcacgctgtcgctgccgctggtgccggtgttcgccgtcgcgctgttcggggacaggatgaccgggatcaaggccgtatccatgctcatggccgtctggggtttcctctcgtacgcgtaccagcagtacatcgacggccggcgcgcggccggcgccgggaaggggagagcggcggcggagtgccgcgtttgcgccgcgcgcgccggcagcgatccggactcgcccgcgtga

SEQ ID NO: 3010 - DNA, 1190 bp, Oryza sativa
atgtccgcggcgtcggcgcccgcgccgaggaggtgggaaggggtggaccaggcgctggagcggatggtgctcagggcgtgcctcgaccaggcgcccgagcgccgccgcgtccgcgacgcgttcaaggacgtgcagctcagcatcgaccactgcctcttcaagggacagtatagcgatattggaacaaaggaggtgctatttcttgctctagctattrttttacagtttcttcatgcaaagcttgctattttaatgatcattggttgtggttcgcaaggtagtggcacttcatacgagaaaaactccaggggcgtggagattttctcaaaatgttggtatccagagaatcatcgcataaaagcaattgtttgtctctgccatggttatggagatacctgtaccttttttctcgatggtattgctaggaagattgcttcagctggatatggagtgtttgcattagattaccctggttttggtctctcggaaggacttcatggatttataccaagttttgacactcttgttgatgatgtagcagaacattttactaaggtcaaagaaaatcctgaacatagaggtcttccaagctttctgtttggtcaatctatgggtggagcagttgcattgaagattcattttaagcaaccaaatgaatgggatggtgcaatactagttgcgcccatgtgcaagcaagttctaatttttatggctagacttcttccaaaagagaagcttgttccacaaaaagatttagcagagttggctttcaaagagaagaaaaaacaggagcagtgttcttataatgtgattgcgtacaaggataaaccacgtctccgaacagctttggagatgctgagaaccacaaaggaaatcgagagtcgtttggaggagttttttacaagttgcagaattgccaatggtctacttttccgatctattaccatctcagttcctttggtttcgctgcccattatcattttgcatggtgagggtgatttggtcacagacccagctgtgagtaaagctctctatgataaagcgaagagctcagataagacgcttcgcctttataaagatgcatatcacgctatcttggaaggtgaaccagatgaggcaatttttcaagtcctcgatgatataatttcttggctggatcagcattctacaaagaaagttccatcgtcata

SEQ ID NO: 3011 - DNA, 1190 bp, Oryza sativa
atggctgatgcacgggcagttctaataaaattagctgaccgtgtgcataacatgaaaactttggaagctttacctcttggtaaacaacaaagatttgctaaggagaccatggagatctttgttcctttggctaatcgattagggattgccagctggaaagaccagttggaaaatctttgcttcaagcatctgaatccagaagagcacaaggatctatcatctaaactaaccaaatcctttgacgaagtgctaatcacatctgctgtggacaaactagatagaggtctgagggatgcaggcctctcatatcacaatctttctgggaggcacaaaagcctatacagtattcacaacaagatgctaaagaagaatttgacaatggatgagatccatgatatccatggcctgcgtctcgtgtttgagaaggaggaagattgctatcgagcacttgatgttgttcatgaactatggccccaagttcctggaagatttaaggactacatatctcgtccaaaattaaatgggtatcgatcattgcacactgttgtcatgagcgagaatgtccacccatttgaagtccagatccgtacaaaagagatgcacctgcaagctgagtatggattcgcagcacactggaggtacaaggaaggcacctgtaggcactcctttgtactccagatggtggaatgggctaggtgggtgcttacatggcaatgtgaagcaatgaacaaagaacgacctgcatctctaggcgacagtgatgcaattaggccaccctgtccatttcccatgcattcagaagactgcccttactcatatactcggcaatgcgaccatgatggaccgatatttgtcatcctactggaacatgacaagatgtctgtgcaagaattccaagcaaactcaactgtaatgaacctcatggatcgagttgggaccaacactccaagatggagtccctaccgcatccccatgaaggaagatctgcgaccgaaggttaaccacgagcccataagcgatctgaaccggaagctcagcatgggggatgtggtggagctgacaccggcccttcctcacgagtcgctccccaattaccgggaggagattcagcgcatgtacgaccgtggcggattcgcgcctcgccacccggggtggcagctcgaggcggtgacagtacttcgacaatctta

SEQ ID NO: 3012 - DNA, 860 bp, Oryza sativa
atggcggcttctgctgctgctccggccaccgtggcggggctgctggtggcggtggcggcgataatggcggcgtcgccggccggcgcgcagccttcgccggggtactacccgagctcggtgcacagggcaatggccttctctcgtgactacaccaacaagtggggcccgcagcaccagaccctctccgccgaccagtcctccctcaccatctggctcgacaaaacctgcgggagcgggttcaagtcaaggaagtcgtacaggaatggctacttcgccgctcgcgttaagctccccgccggctacaccgccggcaccaacaccgccttctacctgtcgaacaacgaggcgcacccggggttccacgacgagatcgacatggagttcctgggcaccatccccggcgagccctacaccctccagaccaacgtctacgtccgcggctccggcgacggccgcatcgtcggccgcgagatgcgcttccacctctggttcgaccccaccgccgacttccaccactacgccatcctctggaaccccgacgccatcacgtttttcgtggacgacgtgccgatcaggaggtacgagaggaagagcgagctgacgttyccggaccggccgatstgggtgtacggctccatctgggacgcgtcggactgggccaccgacgacggccgccaacgcgccgactaccgctaccagccgttcgtcgcgcgctttgamcgctttamcgttgccgggttcgccccgttggccccggctygtgccgccccgttccgggcttccccgccggggccggcyttaagccgsgccagtaatgtgggtgtgtgtgggccgctgccctaccgctgctgccgcctgtg

SEQ ID NO: 3013 - DNA, 1107 bp, Oryza sativa
atgccggcctctgatttggagcaagcctcatgggagacacccctcatacctggccttcctgatgatgctgctctcaactgtctcctccggctacctgttgagacccatgaggcatgcaggcttgtgtgtcgccggtggcatcacctcctagctgacaaggcgcggttcttcatgcagaggaaggtgatgggttttcggtcaccgttgttgttcaccctggctttccaccgttgcactggtaagatacagtggaaggtgctggacctgaactacttgacctggcatacaattcctgccatgccgtgtcgggatcgggcttgcccccgaggtttcggttgcgttgctatccccagtgacggcaccctccttgtttgcggcgggttggtctcggacatggattgcccattgcacttggtccttaagtatgatgtttataagaaccgatggaccgtgatgactcgaatgcttgctgcacggtctttctttgcgggtggcgtcattgatggacgggtttatgtagctggaggttatagtactgaccagtttgagctcaattcagcagaggttcttgatccggttaagggtgtgtggcaaccagttgctagtatgggcatgaacatggcatcctcggattctgctgtcatcagtggtaggctttatgtcactgaaggctgtgcatggcctttcttctcctcgccgagaggtcaggtttatgatccaaagattgaccgctgggaggttatgccagttggaatgcgtgaagggtggaccggtttaagtgttgtcatcgacaaacatttgttcgtcatttcagaatatgagaggatgaaggttaaagtctacgatccagaaacggactcatgggactctgtaaaaggccctcctatgcctgaacgaattatgaagccattttcggtgagttgtttggagaataagattgttgttgttggccgaggcctccatgtagctattggccatgtcaagaagcaacctggcagccatcctgatagtaggagctcaagctacttaattcagtggcaagatgtggatgttcctagggaatttggtgatctgacaccttcaaacagtcagattttgtatgcttaa

SEQ ID NO: 3014 - DNA, 1410 bp, Oryza sativa
atgggcaactgcgccagcgccatagattccttcttcttcaccaaaagggccaataacgagaacgacgatgacgatgctgccccaggaatgtctgcatccaagaggactactagctccaccaccaccgggaagctgtcaacacttagtaacagtactttcattccatccaccattagcggtgtaagcactgacgatgcttatccagacggccagattcttgagtcccgaaatctcaggatcttcacctttgctgaactcaagaatgctaccaagaatttcaggactgatacagttcttggggagggtggatttgggaaggtttacaagggatgggttgatgagaggaccatgaatccatccaagagtagcaccggtgtggtggttgctgtcaagaagctcaaccctgagagtgtacagggaacggagcaatgggagtctgaagtgaatttccttgggaggatttcacaccccaaccttgtcaaactcttgggctattgcaaggataatgacgaactacttcttgtgtacgagttcatggcaaaggggagtttggagaatcatctgttccgcagaggagcagtttacgagccactgccttggagcctcagactgaagattctcattggtgcagctcgtggccttgccttccttcattcatcagagagacagatcatctacagggacttcaaggcttccaacatcttactagattcgaacttcaatgcaaagctctcagactttgggttggccaagcatggtccagacggtggattgtcccatgtgacaacacgagtgatgggtacttatggctatgcggctccagagtatgttgctaccggccacctgtatgtgaagagtgatgtgtatggcttcggcgtcgtgctgcttgagatgctctctggcctgagggcgctggacccaagccgccccagtgggaagctgaacttggtagactgggcaaaaccgttactggctgaccggaggaagctgagccagctgatggacagtcgtcttgaggggcagtatcattccaggggagccctccaagctgctcagctcactctcaagtgtctgtctggtgatcccaagagccgaccatccatgaaggaagtcgttgaggctctcgagaagatcaagttgattaagagcaagtcgagggagcccaggaacagctcctcactgttttatacaagtgatgaaattcaatgtcgttccttcaaaaacaatgaaattcagtgttcagctatgaagaaggaagagtttgccaatccttgtcaaggaagggaaaaatgttttttttttgggtacatatttattggaagaaccttaattgacacagtatataagaacattgatatttttggtgtggtcaagattgctaactgctcaaaatcattagacagaaagtga

SEQ ID NO: 3015 - DNA, 1305 bp, Oryza sativa
atggagcgcggccgcgccgcccgccgcgccgacgtcgacgcgttcctcgcctcgctcggcgtcgacccgggcgagctcgccggcctcgagctcccsgccaccgtcgacgtcatgcgcgagcgcgtcgagttcctgcactccctygacctctccaacgaggacctcgccgcgtacccgctcgcgctgggctgcagcgtccgcaagaacatggtccccgtcctcgactacctcggcaagctcggcgtccgccaggacgcgctcccggacctgctccgccgctacccgcaggtgctccacgccagcgtcgtcgtcgacctcgcccccgttgtcaagtacctccagggcatggacgtcaggccgcacgacgtgccgcgggtgctcgagcgctaccccgagctcctcggcttcaagctcgagggaaccatgagcacctctatcgcctacctcgtcggcattggcgtggcaaggcggcaggttggcagcgtcatcacccgtttcccagaggtgctgggcatgcgggtgggtaagatcattaagcctttcgtcgaacaccttgagggcattgggttgcagaggctagctattgcaagaatcatcgagaagaagccatatgttcttggttttgggttggaggacaaggtgaagcctaatattgaggcgcttctggaatttggggtgaggaaggaggcattagcattcattgtggcacaatacccagacattcttggaattgagctgagagacaagcttgctacacaacagagcttgtttgagtctagcattttggtcagcagtgaagattttggtagagtgatagagaggatgccacaagccattagccttggccgaactgcagttctaaagcatgttaatttccttacatcttgtggcttcttgctctctcaggtcagcaagatggtcgtagcatgcccacagctgctcgcattgaacatggatataatgaagatgagctttgagtacttccagaatgagatggagagggatttggaggagctggttgaattccctgcattctttacatatggccttgagtcgactgtaaggccacggcatgagatggtggcgaagaagggattcacatgctctcttgcatggcttctaaactgttctgatgccaaattcgatgagcgcatgaaatatgatacgattggcatcgaggaaatggaagttgataactcttttgacacgaacactttgtcggagcgagtagaggatgaggtggaagatgaagatctggatgaggatagtgattatgacagcaccgatgatgagtttattgagtaa

SEQ ID NO: 3016 - DNA, 440 bp, Oryza sativa
atggtggccgcgacagccgagttcaggcgagtgttctccgcgttcgaccgcgacgccgacggcaagatctcggcggcggagctgcggctctgcatgaaggccgcgctcggcgaggacatgtccgccgaggaggccgaggcgctcgtctcgtcggcggacaccgacgacgacgggctgctcgacgaggaggagttcacgaagctggcggtgcagcttgagatgggagacgaggaggagaggtgcaggggactaatggaggcgttccggatgtacgagatggaaggggaggggcgcatcactccggcgagcttgaaacggatgctgagcaagctcggatcgcatcagggcatcgaggagtgccaaacaatgatctgcaggtttgacctcgatggagatggagtcatcagctttgaggagttcaagatcatgatggatgcata

SEQ ID NO: 3017 - DNA, 2970 bp, Oryza sativa
atgaggcgcgggaagggcgggaggaacgggctgctgccgagctcgctgaggatcatctcgtcgtgcctcaagacggtgtcgtccaacgccggctccgtcgcgtccacggtgcgctcggccggcgcctccgtcgccgcctccatcgccccccaggccgaggacgagaaggaccaggtattgtgggctggatttgataaattagagcttcatccatcatctttcaagcatgttttgcttgttggttattcaaatgggttccaagtgcttgatgttgaggatgctgcaaatgtttgcgaattggtctcaaaacgtgatggtccagttacatttttacaaatgcaacccacaccagtttactctgatggtactgaaggattcagaacatcacatcccatgcttctggttgttgccggtgatgagacaaatgggtcgggtatggttcaaggtggtcgcttaagtgcactgatcagagataatagcagtgaaactccaaatggaaattgcatttctactccaacagttgttcgcttctactctttgaagtctcactcatatgtacatgttctgagatttcggtctgccgtatatatagttcgctgcagcccccggattgtagctgtagctcttgcagcacaagtatactgctttgaagctgtgacccttgagaataagttcagtgtcttgaaaaatcctttgcaaggggccccggggataaatattgggtatggcccaatggctgttggcccaaggtggttagcttatgcttccaatagccctttattatcaagcacaggccgtctaagtccacagaaccttacaccatctccaggagttagcccatctacctcccctagtagtggaagtttagttgctcggtatgcaatggaatcaagtaagcagatagctgctggtattattaatcttggtgatatgggatacaagacactgtcaaagtactgccaagaatttctgccagatggttctggctcccccttgtcatcaagtcctggcagaagatctggcaaacttccctctagcgtgcatccgctggaagctgacaatgctggaatggttgtcatcaaggattttatctcgaaagaaatcatatctcagtttagggctcacacaagtcccatatctgctctttgttttgaccctagtggaactctgttggtcacagcctccgttcatggccataacataaatgttttcaggatcatgccaaccgtaatagctaacagctcaggctctatacgctatgattggacagcatctcatgtccacctttacaaactgtatcgtggcatgacagcagctgtcatccaggatatctcttttagccattttagccagtggatatctattgtttcatcccgaggtacttgccatatttttacattgtctccttttggcggtgatgcgagtctgctgccacagaattctcacagtgatgggctaccccttgccccatgtcaatcaaggccatggtggtcaaagccatcattccttatggatcatcagcttcatccagctccttcaactgtaactaattctgtagtcagtaggataaaaaacagttcttctggttggctaaatactgttagtaatgtggctgcttctgcaagtgggaaactatctgtaccatctggcgctgttactgctgttttccacaattccaactatgaaggttcattgccagttccatcaaaggctaatgccatggagcatctattggtgtattcaccatctggccatgttattcaacatgaactactgccttcaggttctgaatcctctgatagcagtccaatagttgggcctggttccttgcagatccaagatgatgagttgcatgttactgctgaaccgactcagtggtgggatgtatgccgtaggacaaactggccagaaagggacgaaaacattgcaaacatagtcttccataatcaacgaaatagtatgatggcaatggatgcttctgactgtgatagtgagcattcagattccgttccatcagatggtatttctgggaaagagatgatgagatctcgagaaagatcaagttggtacctctcaaatgcagagattttcttctatgtgatagatcaaccacctgcaaaatcaggggaatctcttagctctagtgggggagagattgagattgagaagctgcctctgcatgaggttgaacttcggaggagggaattgctccctgtattcaagcagttccactattctgaacagaacttcagtgacaggaatcttgcaataggacggtttcagaatgcattgacatacatcgacaaggataatggtgctcatggatccaaggcggggttccctatatctggattttacagtgatatgaggaaaatgcagaacatgaatggtttagaggggcagttattgttggaacctatcactaatgatttacaaccaatggaaaaatgcaattctgttcaatctcctaaagtggcaaattttactgcccttcacaatgtagataatgagagcatgaaccatgtttcaacagcaactggagcaaccacatcagtcacaacagtggacactttaccttcaaccatcagaccattgagcagctactccctcttggatggatctcttgatgatggattaccatcacctgcaagtaatgtatcattcaggcctcagataaccaacaattcttcagtaagcaatggtacaatgactgacatctcaaatgggtgtctcacgagcatcaattctggacagaatgaagcatctgattctcacaactcagtggagtttacccagtatttccaagagggctattgtaaaatatcagaactcgatgactgccgtgagttaactgaagctgttactgatgctgacagcagcagcagccactgcgagagagagaagcccgaggaagatggggataacgatgacatgcttggggctgtttttgccttcagcgaagaaggttga

SEQ ID NO: 3018 - DNA, 3933 bp, Oryza sativa
atggccaaaaacaaacatcctaccaggtgtcgtgtgccccaggctctagctcaaggtaccttggaggcccggacatggaaatggaatctcaaaaatcatggatatgtctttttaaagatcagagcacttcttgtcgtgaacgagttgattgcaggtgcaggagttgtatccaactggccttcagttcttctctcgtggtggttcttcagcttcttatccgaatcacttctcacttcgttgcatttgcttcacctcttcaactctgcaactgttgtcgatttcacttctcttcccttgtgcacattcatctgcctcgtggcagtaactatgagaccttccaaagcaaaccagcaagaccagaaccaaccgctgcttgtgagagaagacagtgatgacagtagcacagacaggttctccaactccgggtggtggagctgcctcacattccagtggttaaacccaatctttgagaagggacacaaggtgcgtcttgagctcgaccatatcccatctgttccacagtctgacacggcaaaccaatcttatgcattgcttcaagagacacttcacaagcagaaacctgagccaatgcctatgcggagagccattatttgtgctgtctggacacctttgatcgccaatggagtctttgcagggcttaacactattgcttcctatatggggccattcttgatcacctacttagtggagctactctctgacaagaatcctgacaagggccatggccatggctacatgctagcatgcccttttctttgcctcaaagacagtggagtcactttcacagcggcaatgaaatccctgctgatgaagaactcaagcacagccagcgggaaaattgtgaacttcctcgatgtcgatgttgagaaggagaacctcaacatgaagatcatggaagcgaaggactcacggataaaggctatggctgaagcaatgaagagtatgaggatattgaagctgcatgcatgggagacagcttactttgacaagctactgaatctaagggatgtggagaggggatggctcaggaaatatctctacacatgttcagcaattgccttcctgttttgggcctcaccgaccttggtgtcggttgtcacatttggtgtatgtattcttgtggagatgccattatcagctggaacagtcttatccgccgttgccacgttcagaatcctccaagatccaatctacaacctcccagagctcgtttcaatggtcacacaaaccaaggtgtccctagatagaattgaagagttcatcaaagaagaacaccaggggaagccaagtcgttctgacaataacactaggactaaggacctgtctatgactggtgcaatggaaattgaaccaggggtatatggttgggaaattgacaatagcttgaagaagacaaaattcatgcttaagattgacagaaagctgagcatcagcaagggtcaaaaggttgcagtgtgcgggccagttggttctggtaaatcaagcctcctttacagcatcatgggggagatcccaaggattaatggtgcagaaacaacagtttttgggtcaagggcatatgttgcgcagagtgcatggattcagactgggacaattcaagacaatgtgctctttgggaaggatatggacagaagcttctatgaggaggtgctgcatggttgtgctttggatagagatttggagttatgggccaatggtgatatgactatggtaggggagaggggcatgaacctgagtggaggccagaagcagaggattcagcttgccagagcattgtatagtgattctgatgtttacctcttagatgatcccttcagtgccgtggatgcacacaccggagcacatctcttcaaggaatgtttactgaggctaatgtcctctaagacagtcatatatgttactcatcagctagagttcttgagagatgcagatcttgttctggtcatgaaagatggaaggattgttcaatccggaaaatatgatgatttggtagcagacaggaatggagaactctcaatgcaaatggctgcacataaccaatcccttagtcaggtcacacctgcaaaagcacatgtcttgactaaaaataagagtcacaagagaaggcagactgagctcacagaaatagaattagatcacaatgtaataggcagggaatgcgaggaggagcgcgaatctggaagagttaaatgggatatttatcgcaagtttgtcaactctgcatatggcggagctctcgttcctgttattcttgcatgccaagtccttttccagggattgcagatatgtagcaactattggattgcatgggcagctgagaggcaggaacaagtaagcagggagaagatgataggtatctttgtgctgttatcagctggaagttctgtgtttatattgggaagagctattgtcctttcaacgattgccattgaaactgctcatcagttcttcttaggcatgaccaggagtatttttcgagcaccaatcaacttctttgactccactccatcaagtagaatcctcaatagggcttcaacagatcaaagcacagttgacacagacattccctacaggcttgcagggcttatcttcgcattaattcagctcctcagtattattttcatcatgtctcaaattgcctggcctatattcattctattcataattataattgccatctctacttggtatcagagctattacatctgttcagctagagaactagcaaggatggttggcataagaaaagctccagtcctccaccatttttcagagactgtatcaggagcagcaactattagatgctttaatcagggagagaagttcttcaggaagagtcttgcgctaattgatgactactcccgcatcactttccacaattcagcaacaattgaatggttatgtgttcgcatcaacttcctcttcaaccttgtcttctttgtgacgctagtcatccttgtctcaatgcctcgaaatactattgatccaagcctcgcagggctggcagctacctatggccttaaccttaatgtgttacaagcatgggtcatatggaatctgtgcaacgttgagaacaaaatgatttcagtagaaagaattttgcagttctcaaacataacaagtgaggcccctttagtcattgaggactgtagaccaagagaatcatggccctggtgtggaaccattcagatcgattctctccaagtgaggtacaacccggacatgccaatggtgctcaaaggcataagctgcacaattcccggagaaaggaaaattggggtggtaggacggacagggagtgggaaatcgactctaattcacgccttgtttcggattgttgaaccatctgaaggacggatactcatagatgatgttgatatatcgcttttgggagtgcatgatctgcggtcaagattaagtgttataccacaagaaccgactcttttccaagggacagtcagaacaaacctggatcctctacagcagcatctggacactgaaatatgggaggttttgcataagtgccgccttgaggagattgtgagagaagacagtagattgttggatgcaccagttgttgaagatgggggaaactggagcgtaggacaaaggcaacttgtatgcttggccagggtattgctaatgaagaagaaaatacttgttctggatgaagccacagcatcggttgataccgcaacagataatatcatccaaaagactataaggcaagagacaaacaattgcacagttattacaattgcacataggattcctactgtgattgacagtgaccttgttcttgtcctaggtgaaggtaagatactagagtttgattctccagaaaatctcctcagagatgaatcatcagctttctcaaagctggtgatggaattcgtgggaagatcatcatag

SEQ ID NO: 3019 - DNA, 1040 bp, Oryza sativa
atggggcagcagtcgctgatctacgcgttcgtggcccgcggcacggtcatcctggccgagtacacggagttcaccggcaacttcaccaccatcgcctcccagtgcctcatgaagctcccggcgagcaacaacaagttcacctacaactgcgacggccacacgttcaactacctcgtggaggacggcttcacatactgtgtcgtagctgttgaatcagtagggcggcagattcccattgcattcttggatagagttaaggatgatttcacaaaaagatatgctggtggaaaagctgctactgctgctgcgaacagcctcaaccgagattttggatcgaaacttaaagaacacatgcagtactgtgtggatcatcctgaagagattagcaagcttgcgaaagtgaaggcacaagtttcagaagtcaaaggagttatgatggaaaatattgagaaggttcttgatcgtggagagaaaattgaactgctcgttgacaagaccgagaatctgcgttcacaggcccaagatttcaggcaggcaggaacacagggcacgcggaggcaaacactgggagaaatcctgatggatcccgatgggtccgttgctgccagggccaatccgcacgcactgccgagtccaaccttggtcttggccaatcctgatgagtgcagtgcattgattctaccttcatcttatcgcaagctcttcagctctgccgcaaatttaaggccacccgcgtacgctgcgtctcagctgcctgctctcatctgcggactctcggctcagctgcccgctctgtgctgccaagtcataaatggcgcctcttgcggtgccagccgccgtggcgtacgcccaagctttatccggagccactgcgctacagccacatgtaccaccagctcgaccgacgggtggaccaatggcgtccgtgagaccgtgatccatgtcaaggcacaccacttcgctacttcgctcgggcttgctccacctccaacatctccaagcagcggcggcgtgagagcgaggggagtggagtggccctg

SEQ ID NO: 3020 - DNA, 723 bp, Oryza sativa
atggcctcctccggctcgcccgaagctcggcagactcatggtgagatcgccggagcggcggcgccggagaggaggctgaagctctactccttctggcgcagctcgtgctcgtaccgcgtccgcatagccctcagcctcaaggggctggactacgagtacaagccgatcaatctccttgcaaacgagcagtcacacccagaatttgagaagctgaacccgatgaagtatgtcccggcactggtcgacggtgacgacacagtcgtcgtggattcctttgcgatcttgctgtatcttgaggacacttaccctcaacatcctttgttgccacaagacccaaaaatgaaggcactgaatatccagattgcaagtatagttggttcaagcattcaaccacttcagaacaattctgtccttgattttattgaggagaaattagactcacaggagaaagttaactggatccaatatcacctcaacaggggcttcacagctctcgagaaaatgttgaaaggttgcacaactacatatgccactggagatgaaatccaactgggagacctctttctggaaccccagatatacggtggcattaagcgctttgggatcgacatgacaaattaccctaccttggccaggcttcatgaagcgtacatggaacatccagctttccaagccgcgctgccagagcggcaaccggacgcaccttcctctcctgagatctga

SEQ ID NO: 3021 - DNA, 2682 bp, Oryza sativa
atggggcattctccaacttcttggaggatcatccatctgttagtcttcctgatcattgttcctgaccasgctctcataatctcagcagatacagatccacaagatacctctgccctaaatggcatagcagcttcctgggataacgccaagtccaagctatcagaatgggttggtaatgatccatgcggcgaaaaatggccaggagtgtactgcacccagaatcgtgtcacctcaataaggctgtcaagttttggattgtccggatcactttcaggtgacatacagtcattgtcagaattacagtacctggacttgtcttacaacaacttgagcggtccacttccaccgaacattggatccttgagtaaccttgaaagcctgagcgttgttggctgccaattttctggtgacataccmaaagaactcagccaactcccaaagctgcggttcctgtccttgaacaacaacaggtttactggaagtatacctccatcaattggcaacctttcaaatatgtactggcttgacttgggtgaaaatcgtctgactggatcacttccagtatctgatggaaccaatactggattggacaatttgacaaacgctctgcatttgttgcttgataacaacaatttcactggcggcattcctcccacattgacccttttaactaaacttgaagtcctgcatctagaaaacaataaattgacaggccctctgccagacttgacaggaatggattcactatatgttgtgaaccttgagaacctacacatcactggggagcttccgcagcctcttttcaaactcccggctatccagacactgggtcttaagggcaataatttcaacggcacactaaccatcggatcagactacagcagcacgctctcactgattgatttgcaggacaaccagatcaccactctcgccgtgagcggggctcagtacaacaagaaactcatacttgttgggaacccaatctgtgttcaggggaacaatgaggcactgtactgcaaaagctcacagcaagcgaaccctgcagcaaagccttactctactcaatccatttgtcctggattaccacccacatgcctgtcggaccagtatctcagccccaactgcacctgcgcggtgccatacatgggtactctgcacttccggtcaccaccgttcttcgacctaagcaacgatacattctttgtactcctcgaggaaaacatgaaagaagcgttcctgggcaagcagcttcctgttgagtccattgctctggataacccggcattcggtcctagcaacaacttggatataaacttgagagtgttcccaagcggaaagattcggttcggcaaagaagatatctcctacattgggttcatgctcaacaaccagacctacaagcctcatgctcctggtataaattatgggccatactatttcattgggcaatcctacccattcgctgagaaattggcactackgatttctagacttcttcakgattacacggcactatyagcacccagacagacgaaaaagaaccagtccctcatcattgttctgtttttcaggaggaacaaaaggccaaagctgcagccacaacccaggagcccatcttacgcttcatgggacatcaagagcaccagcatcagcaccccgcatctccaaggcgcgcgggtgttcacattcgatgagctgaagaaaatcacaaacagcttctccgatgctaatgacattggaactggtggctatgggaaggtctacagaggagtactcccaaatgggcatctaattgcagtcaaaagatccgagcaagggtccttgcaaggcaacctagaattccggactgagatagagctcctatccagggttcatcacaagaaccttgtcagccttgtgggattttgctttgaccagggtgagcaaatgctggtctatgagtatgtgcccaatggcacactcaaggacagcctcacagggaagtctggggtgcgcctagattggaagagacggctgcgagtagtacttggtgcagcgaaaggcatcgcgtacctgcatgagcttgcagaccctccgatagtacacagggatataaagtcaagtaacattcttcttgatggaaacctccacacaaaggtttccgactttggtctctccaagcctctgaaccaggatggaaggggtcaggtcacaactcaagtgaaaggaaccatgggatatttggaccctgaatactacatgacccagcagttgaccgagaagagcgatgtctacagcttcggtgtgctactacttgaagtgataacggcgagaaagccattagagaggggaaggtacatcgtgcgtgaggtgaaaggtgcaatggataggaccaaggacctatacggcctccatgagctcctagacccaatgctagcacccacgtcgctggccggcttcgaactgtatgtcgacttggctttgaagtgcgtggaggaggcaggaatggaccgcccatcaatgagtgaggtggtggcggagattgagaagatcatgaagatggcaggcgtaaacccaaaggtcgactcggcatcaaactcgatgagctacaacagcaggacaccgcgtcatccatacagtggagagtctcaatttgattacagtggtggcatcccatcttcgtccagggttgaaccaaaatga

SEQ ID NO: 3022 - DNA, 1206 bp, Oryza sativa
atgacgccgtggccgagctgcacggagaagaagtcgatgcgagaggttagggatgactggatgaggaggaatgaggataaggttgggaaaggatgggttgcgacttttgactgtgggaccgtccggaatttctccacgtatcggacgttcgatagttggaaaatcacactcactggattcatgtttctagttgtatcagcacttcttggctatgtaagaatattaatttcgcagatctattcgccccacctcgacacagctccccctaggtgggtccatcttgcccatggattacttctcttcttataccagacttttgatgctgttgatggtaaacaagcaaggcgcactagctcatcaagtcctctaggagaactttttgatcatggatgtgatgctcttgcctgtgcttttgaagcattagcccttggaagcaccttgatgtgtggaaggtttactttctgtttctgggtgattgctgctgtcccgttctatcttgcaacatgggaacacttctttacaaatacacttattcttcctttaataaatggacctacggagggcctgatgctgatatatctatcccactcttttacctttcttactggcgctgaatggtgggcacaagattttcggaagtcgataccccttttaagttgggtaccccttccatttattccagatatccccttatacattattgtgatgattcttatgatcctgtttgccgtaatccctaccattggatccaatgtcagcaatgtccaaaaagtagttgaagcaagaaaaggaagcatggtattggcattggcaatgctccttcctttcattgcattgttaactggagttgctgtctggtcttacctctctccttcagatattatgaggaatcagccacatctgcttgtgatcggaactggttttgcttttggatatttggtgggaaggatgatacttgctcatttatgtgatgaacccaaaggtctcaaaactggaatgtgcatggtgaaccatttacgcggatccattaaacgatatatcattattactattgccaggattcctttagttgatgagctgctggttcttttcctgtattgcgcatacacagtgggcctttacctgcatcttgccgtttctgttgtgcatgaaatcaaggatgctcttggaatctattgcttcaggataactagaaaagaggcttga

SEQ ID NO: 3023 - DNA, 1220 bp, Oryza sativa
atgagctgcttgggttggttcaagaagcggaggtcgtccaagagcaaggaatcgtcggggargcggggctcgacgacgacgacggtgtcggcggtgagcacgagcaggtcggacgactccggggcggtgaggccggcgagcaagtcgacggggtcgacgtcgtcgcaccggagcatctcgtcgctgtacgaggagcgcggccacggccagctccgggacttcgactacgacgagctccaggccgccaccaacggcttcagccgcgcccagaagctcggcgagggcggcttcggcagcgtctacaagggcttcgtccgctcctcccccgccgacggcaaggccgccgatcgcctcgccgtcgccgtcaagtgcctgaaccagcggggtctccagggacataagcagtggttggcggaagtacagttccttggggttcttgagcacccaaaccttgtaaagcttcttggatattgtgccgttgatggtgaaagggggccacaaagattattggtgtatgagtatatgcctaataagagcctggaagatcacttattcgtccgagcttatcctcctctctcatggaatagaaggcttcaaataatcttgggtgctgcagaaggattagcttacctgcatgaagggcaagttcaggtaatctaccgggacttcaaagcatctaacattttgttggacaaagacttcagagcaaagctgtcggacttcgggctagcaagggagggaccaacaggagcaaacactcacgtctcaacagcggtggttgggacgcacgggtacgcggcgccggactacatagagacggggcacctgacggtgaagagcgacgtgtggagcttcggggtggtgctgtacgagatcctgacggggcggcggacgctggaccgccaccggccgcagggggagcagaagctgctggagtgggtcgcccagttcgcccccgacagccgcaacttccgcatgatcatggatcccaggctccgcggcgagtactccgtcaaggccgcccgcgacatcgccaagctcgccgagtcctgcctcctcaagaacgccaaggagcgccccaccatgtccgaggtcgtcgacgtcctccgccgcgccgtccagtcgcagcccgaccctcctcctccccccgccgccgccgccgccgcctccggcaaggggaagagggtcgacgtcgcgccgcagccggcgaggaggaggtg

SEQ ID NO: 3024 - DNA, 882 bp, Oryza sativa
atggaaatcccagtgataaagatggatgagctgcatggagagaagaggtcagagacacttcagctactccatgatgcctgtgctcaatggggtttcttttggcttgagaaccatgggatcaacgaggatctcatgtacaaaatcaagggattggtgaacaaacactatgagcaaagcatggagaagaacttctacaattctgagacggcaaagaacctaggtcctgataatgttgtctcaaatgttgactgggagtgcagttttatgtatcgtcaccagccagaatcgaacattcatgatattcctgagctggtccgtaccactcttcctgaatatgctgaagaagtaatcaagttggcagagcggctagcagaagttatgagtgagaaccttgggcttgacaaggattacttgaagaaagcgttttctaatccttccgtaggcataaaggcggccaagtaccctaggtgcagtcatcccgaatttgtgatggggctccgcggacacactgacgctgggggaatcatacttctactccaagatgacttggtccctggtttggagttcttgaaagatggtagatggatgccaataccaccaacacaaggcaatcaaattttcgtaaaccttggagatcaggttgaagtgataagcaatggaatatataagagcatttgccatcaggtagtacccaataagaacgggagccgcctatctatcgcaacattctacaacccaggtcctgatgctatagtcttcccagctcaaaagcttacgtatcctagtcaataccgtttcaaagactacctcgaattttactccactacgaagttcactgacaaagtatcaaggttccaaactacaaagatgatatttaagtga

SEQ ID NO: 3025 - DNA, 804 bp, Oryza sativa
atgctgcttaatccggcgtcgagagaggtggccgcgctggacagcatccggcaccacctcctggaggaggaggaggagacgccggcgacggcgccggcgccgacgcggcggccggtgtactgccggagctcaagcttcggcagcctcgtggccgaccagtggagcgagtcgctgccgttccggcccaacgacgccgaggacatggtcgtcttcctcgcgtcgtcgtcgtccgaggcggggacgcccggggaggtgacgtcgacggaggcgacggtgacgccggggatcagggagggcgagggcgaggccgtggcggtggcgtcgagggggaagcactaccgcggggtgaggcagcggccgtggggcaagttcgcggcggagatcagggacccggccaagaacggcgcgcgcgtgtggctcggcacgttcgactccgccgaggaggccgccgtggcgtacgaccgcgccgcctaccgcatgcgcggytcccgcgcgctcctcaayttcccgytccgcatcggctccgagatcgccgccgcggccgccgccgccgccgcgggcaacaagcggccatatcccgacccggcgagctccggctcttcttccccttcatcctcttcctcctcgtcgtcgtcttcctcctccgggtcaccgaagcggaggaagagaggcgaggccgcggccgcgtccatggccatggcactggttccaccaccgccaccaccggcgcaggcaccggtgcagctcgccctcccggcccagccatggttcgccgccggtccgatccagcagctggtgagctaa

SEQ ID NO: 3026 - DNA, 2004 bp, Oryza sativa
atggaggtagctgataagattgtggagccaaagggccctttggtggccactgctcagctgccaaataatgtagagttgctcaaatcagttgtgctgaatccatcaagggaagggggaagctcacaagagcagtatgagaaggatctgttggcagaaggtgaggagagttttcggagcgaggagtcatctgacgagggtggccggagttcattctccggggagaagcctgagccacccgagtgcttgatgcgaggcctatcggtcaaaggagcatctatggaggacctctcagtccatgccatggatgcaaagccggatgtgattgtttgcacagttaatgtcaatggtttggttgaagagaggaaggtgcactgtgctgtggtagcaccagatgctgttgaagccgtatcctcaactcaggcctcggaggagaaggattgcgtctgggatgcctccttccctcccagtggcaatgtcagcccacacagtagcagtgacagcactggtgcggtcgctgccacaagcatcaggggaagatccacaagcacatgtagaagtggagttctaactagtgaatccatccttaccgtggagaagacatgtgagagcgcaaaggatagcacccgaggcaactcaatggaaagcacaaagaccagcatgagtcgagcgagtgatagtagtggcgttagcgatgacagcaactggagtaacatcacaggaagtgctaacaagcctcacaagggcaatgatcctagatggagggctattctagctgtccggggtcggggcaatgtccttgggatgagccattttagattgctcaagcgtcttggctgtggtgacattggcagcgtctacctctcagagttgagtgggacaaggtgctactttgcgatgaaagtaatggacaaggcgtccttagcaagccgaaagaagttgaacagagctcaaactgaaagggaaattctgcagcttttggatcacccattccttccaactctgtacacacactttgagactgacaggttctcatgtctggtcatggaattctgtccgggtggtgatctgcacactctgcggcaacggcagccacgaaagcatttctctgaatatgcagcaaggttttacgccgctgaggtgctcctagctctggagtacctgcacatgctgggcgtcgtctaccgggacctgaagccggagaacgtcctggtgcgcgatgacggccacatcatgctctccgacttcgacctctctctgcggtgcgcggtgtcgccgacgctcatcagagcgtcggcgtccgactccgatcccaggagagccggcggttcgttctgcgtgcagcctgcttgcatggagccttcttcggtgtgcatccagccggcgtgcttcatgcccaagctgttcggccagaggagcaagaagcagggccggaggccgaggtccgagttggggcagggcggtggcgccgccttgccggagctcgtcgccgagccgacgtcggcgcggtcaatgtccttcgtggggacgcacgagtacctggcgccggagatcatcaagggggaaggccacggcagcgccgtggactggtggacgttcggcatcttcctccacgagctcctctacggcaagacgccgttcaaggggtcgggcaaccgcgccacgctgttcaacgtggtcgggcagcagctgcggttcccggagtcgccgtcgacgagctacgccgggagggacctcatcaggggcctcctggtgaaagagccgcagcagcggctcggcgtgaagcgtggcgccgccgagatcaagcagcaccccttcttcgagggcgtcaactgggcgctcatccggtgcagcacgcctcccgaggtgcccaggcatgtcgaggccgagctgccggccaagtacggcgtggccgagccggtggcgagcggcggcggaggcggcaagagggtggtcggcgccgaggtcaggtccggcgggaaatacctcgacttcgaattcttttag

SEQ ID NO: 3027 - DNA, 3825 bp, Oryza sativa
atggcgccgccgctctatctcctcctcctcctcccgctcctcgcctgcgccgacgaggtccctgaccgctacgccgtcctccgcgccccgcagggcccgggtgccagcgcggcggccaaggagtacctcgacccgaccttcccgctccccgcgcccccgccggcggcgccgtcctgcaccgtgccggtcctctcctactccttcggcgacacctacggcgccgcgccggccaaggcctcgtacgcgccccccgccgggtgccccgcgccctggtccctcgtcgtgctcaccttctccgcctcctgcgccggcgaccagtacgaccgcgtcgccgccgtctggctcgacggcgccgagctcctccggaccaccaccgcggagccgacccccgagggcgtccgctggaccgtccgcaaggatgtcacccgctactccgcgctcctccgctccccgcccggcggcgtcctctccgtcatgctcgagaacgtcgtcaacgacaagtacaccggggtgtacagcgtcaacgtctcgctggagttccatggaactccgccgtacctctccgacgcggcatcatcctcccctgctggcgtcgcaagcaacgatcccaaggaacctatgctgccggagtcatacttccagccggcggatctcatcgtcccgatctcggatgtcgccggcaacggcaagggcgggttctggttccgcatccagaacgcgtcggactcgcactccaggctcgtaaccattccgtcgagcacctaccgtgcggtgctcgaggtgttcgtgtcccctcactccaacgacgagtactggtactccaacccgccggacatctacatcagggagaacaacctcaccacgcggaggggcaacgcggcgtaccgcgaggtcgtcgtcagcgtggaccaccgcttcgtcggctcgttcgtgccgttcccggtcatctacacgggcggcatcaacccgctcttctggcagccggtggccgcgctcggcgcgttcgacctgcccacctacgacgtcgagctcaccccattcctcggcctcctggtcgacagcaacgcccacgagatcggcctcagcgtgttcgacggcatcgccgagtggctcgtcgacgccaacctgcacctctggctggaccccagcacgtcggacgtgcacgccgcgctcggcgcgtaccagacgccgcgcctgaaaatctcacgccactactcgacgcggctgctcgagggcaggttcaagatcaaggccaagaggaagtcctccttcagcggctgggtcaagtcctcgttcggcaacttcaccacggaggtggaggcggagctgaaggcgaccagcctggtggagttcaccggcgacggccggaacaagaccgtgtcgctggaggcgaagcaggagacgaagacgctgatccgggcgggcgacacgcggaaggtgatcggcagggtggagagggaggccaagtacccgctgtcgctcttcgcggagaccgaggacggcgagaacggcacgtccgtcgtcacggtgagcctcacccacggcctcagcgtggagacggaggtcgagacgaaggccctcgagagcaaggagaagctcgatgacgcgcaggccgcgcaagggtggatggtgctcctggaccacgacgtgctcaacgggtcggtgacgacgacccaggcgtaccggttcagcgacgacgagcgggagtacgagcgggcgatcgacgtcgtggacggcgccgtgctcagcgacaacgtcaccgagagcttcagcgccctggccgccgcagcggcggacgctcgccgccgccggttccacgccggcattgctgcgttgattcgtttccgaccgcatcgacgtgaccaagactattgcttttcttcagagggggaggggaaggtgagcacgggggatgatctcctggacgccctcctcgaggtgttcccgcagttgaatttcttaacactggtagaagtttgcatggaatataagaatgatatagatggtgctgcggattatattatccataatgtccttccaagtatcccggacaacaatgatgcacatgcaaacgaagggcctgcttcggtggataatgatgcagattcagtgcagtcttacttagcgaacaaatacacagctgagcaggaggaggaggaagaggaagaggaagaggaagaagaagaggaagaagaggaggaggaagatgaagatgatgatgaggaggaggaagatgaagatgatgaggaggaagatgaagatgacgaggaggaggatagacttatggaagaaaattctgattgtttggttgctattgatctgaattcaaaacctggaacttcagcttttgatgatgatttggtaacccatgacgatggattacctgctatgaacatacagtcaagctaccctgttagacttgagttgcttgacaatgcaattgctgatgaaattgacaagaaggttactttgatgtcaaacgtaacagcgataaaccaaatgctagaggacataaagttaaaagaagaaaaaacaaaacaagctgtgttggaagcaactcaagctggcaatgatatttttgtgaaggttgcaggggaggttttcgctgagcaatctattctagcatcagaagcacatgggcttcaagctcggttgtctaacatttctgaagaaaggaacaactgtgccttaattattgacgagatgcgctatactcttcaaaacagatttgctgaagctgaagtggagactgtagcagctgagaagaagaaggttgaaagggaaacattggctgagaaaatgttgaatgaacaagaactcatacttgatgctacaaaggaaagatccaagatgctggaacagcaagtgcgggagaatgcaaagctgagggagttactaatggaccgaggccaaattgtggatgcattgcagggggaaatgctgggaatcttcgataaaatttcacaacttcaactcagggttgataagcaacttcctgaacccctgctatcaagcatgtcctcctcagtcaactcagctgataacattgcacagctccagtgcagagttgatgacccacagcattctgttgatgattcattgcaactagcttcacctagattgtccagctcattcaaatcaacagatagcactgcgcaagcccattgtagagttgatgagccacaaatttctgttgatgaatcgctgcttcctgttgacgagtgtgagcagctgaaactgattttaccaaggttatctagctcagtcatgtctgcacaatcccaatatagagttgatgaaccgctacttcctgttgatgaggtgttgcaactagcttcatcaagcttatccagttcgctcaaatcaggagataacatcgctcaacttttgggagtacttgatgtgcatttacctgttgatgagttactgcaactaccttcattgatcttatctagctcagtgaaatcatcagacagcattgcgcagttccaacaaaaggctgatgctgatgagatgctgcaatcatctagcttagccagctcagagaaaccagcaactttcaagaattggtcatctgcttcagacaccattacacagttccagcaaagggctaatgctgatgagtcgctgccgcttccttcatctagcttggccagctcagagaaaccagcaacattcaagagtacttggtcatctgctgcagaatcaaattcagttttcagtggtgatgaagagattgatgatgcttccttccatgacagtattgatttggatgatagctgggatttagttgacgatgaagccatctatatgtgtgctaactag

SEQ ID NO: 3028 - DNA, 1584 bp, Oryza sativa
atgctacccaccgacttcgacatcaaggtgttgattgagcggcacgaagccctgacggacgacgtgcaggagatgctgcagcatcaacgccggcgacaccagaagacggcgagcggcggccgggagcggatagccaccgtcgaccacctcaggcgcctctgcatggaccactacttccaagacgaggtcgacgacgccatggacgcctgcctgctcgaggagctcgcccatggcggcgacctgcttgacgccaccctcgccttccgcctcatgagagaagctggccaccatgtctcagcagatgaggttcttggaagattcacagatgataatggcgaattcaggctcgattacagaaaggacatcagagggttactcagcctgcaagacatatcacacatgaacattggacaagaagcctcactctgcaaggcaaaggagttctcaaccaggaaccttgaatctgccatcaactacctcgagccaaatcttgcaagatatgtgaggcagtcgctggatcatccctaccatgtcagcctgaatcagtacaaggccaggcaccatctcagctacctccagaccttgcctatccggtgcactgccatggaggagctcgcacttgcagacttccagctcaacaagctactccatcagatggagatgcaggagatcaaaagatggtggatggacctgggattggctcaagaaataccagttgccagggaccaggttcagaaatggtttgtgtggatgatgacagccatccagggtgcctccttgtcaagatgcagaattgaactcacaaagatcgtctcctttgtctatattgtggatgatatttttgatctggttggcacacgtgaggagctctcctgcttcactcaggcaatcagaatgtgggaccttgcagctgctgattccttacctagctgcatgagatcatgcttcagggctctacacacagttacaaatgacatcgcagatatggtcgagagagaacatggagtaaaccctatcaatcatctgaagaaagcttgggcaatgctgtttgatggattcatgacagagacaaaatggttgtctgctggccaggttcctgactcagaggaatacctaagaaatggagttgtcacctcaggagtgccacttgtatttgtacacctgctgttcatgctagggcatgatgtgagccaaaatgcagcagagtttgttgatcacatccctcctgtcatctcctgcccagcaaaaatcttgagactctgggatgacctgggcagtgccaaggatgaggcacaagaaggattggacggatcgtacaaggagctatacctcaaggagaacccggggctcgccgctggcgaggcggaggagcacgtgcggcggctgatcgcgggcgagtgggaggagctcaaccgggagtgcttctccgctagccccagtagatcgtcgccggcgacgaccttccccgccggcttcacgcaggcggcgctcaacgccgccaggatggtcggcgtcatgtatggctacgacggcgagcggcggctccccgtcctcgacgactacgtcaggatgctgctcttctga

SEQ ID NO: 3029 - DNA, 1236 bp, Oryza sativa
atgctccagttcggccgccgcctcgcctaccacggcctccgccccaccctcgtcgccacccgctacgtgctctccacgagccctcctcccggcgaccccttccgcgtcgccgccttctccgacggcttcgacgccggcggcatggcctcctgccccgaccccgtcgagtactgccgccgcctcgaggccgtcgggtcggagacgctggcgcgggtcatcgacgccgaggcgcgcstggggaaggccgcgaccgtgctcgtctacgacccccacatggcgtgggtgccgcgcgtggcgcgcgccgccggcgtccccacggccgcgttcctgtcgcagccgtgcgccgtggacgcgatctacggcgaggtgtgggccggccgcgttccgctgccgatggacgacgggggcgacctccggcggcgcggggtgctcagcgtcgacctcgcgacggcggacttgccgccattcgtggcggcgccggagctgtacccgaaatacctcgacgtctcgatccggcaattcgaggacctgctcgacgccgacgacgtgttcgtcaactcgttcaacgacctcgagccgatggaggccgagcacatggagtcgacatggcgagccaagaccgtcggcccgacgttgccgtccttcttcctcgacgacggccggctgccggcgaacaagaaccacggcatcgacatcttcaccggtgatgcgccgtgcatggaatggctggataagcaggcaccctgctcggttgttcttgcctcctatggcacggtctactctctcgacggcgccgagctcgaggagctcggcaatggcctctgcaattccggcaagccattcctctgggtggtgaggtcgagcgaggggcacaagttatctgaagagcttcgtggaaagtgcaaggagaaggggttaattgtgtcctggtgtccccagcttgaggtcctgaaacataaggcaacagcgatgcctcagtcagcggaccaaccgactatagcgaagtacgtggaaaccgcatgggagattggtgtgagggcacgactagatgagaaaggctttgtcacggaggaggaggtggagatatccatcaagaaagtgatggatggggagagggcagcggagtacaagaggaatgcagctaagtggatgcaaaaagccaaggaagcagcacaagtaggcgggagctcagacaagaacattgctgaatttgtagcaaaatatttatcaaattag

SEQ ID NO: 3030 - DNA, 1014 bp, Oryza sativa
atgtcgtccaattttgaggccaacaacaacaatggcgagaagcagctggtctgtgtgaccggagcaggtggcttcattgggtcgtgggtggtgaaggagctcctcatccgtggctaccacgtcaggggaacagccagagatcctgctgacagcaagaatgctcacctgcttgagctggagggagccgaccagaggctctccctctgccgtgccgacgtcctcgacgccgccagcctccgcgccgccttcagcgggtgccacggcgtcttccatgtcgcctccccggtgtccaacgaccctgacctggttccggttgcagtggaggggacgaggaacgtgatcaacgcggcggcggacatgggcgtgcggcgcgtggtgttcacgtcgtcctacggcgccgtgcacatgaaccccagcaggagccccgacgccgtcctcgacgagacctgctggagcgactacgaattctgccgccaaaccgacaacctgtactgctgcgccaagatgatggcagagatgacggcgacggaggaggcggcgaagagggggctggagctggcggtggtggtgccgtcgatgacgatgggtcccatgctgcagcagacgctcaacttcagcagcaaccacgtcgcccgctacctcatgggcaccaagaagtcgtaccccaacgccgtcgccgcctacgtcgacgtccgcgacgtcgcccgcgcgcacgtcctcgtctacgagcgccccgacgcacgcggccgctacctctgcatcggcaccgtgctccaccgcgccgagctcctccggatgctcagggacctcttcccccagtaccctgccactgcaaagtgtgaagatgacgggaagccgatggcgaagccgtacaagttctcgaaccagaggctcaaggatttggggttggaattcactccactgaggaagagtttgcatgaggcggtcttatgcatgcagcagaagagtcacctgcctctgatttatcccgttccaaaacgtgcttacctataa

SEQ ID NO: 3031 - DNA, 1044 bp, Oryza sativa
atggcgtggccattcttgcagaggaggggcatggacacgctgaagagcctcatcaccaactcggcggcggacgtgtacctgtcgcagatgccggagaggttcgccgtcgccgacctcgggtgctcgtcggggccgaacgcgctgtgcctggcggaggacatcatcgggagcatcggccgcatctgctgccggtcgtcgcggccgccgccggagttctcggtgctcctcaacgacctcccgaccaacgacttcaacaccatcttcttcagcctgccggagttcaccgaccgtctcaaggccgccgccaagtccgacgagtggggccgccccatggtgttcctctccggcgtcccgggctccttctacggcaggctcttcccggccaagagcgttcacttcgtctgctcctgctccagcctgcactggctctcccaggttccttctgggcttcttgacgagatgaacaggccgatcaacaagggaaagatgtacatatcaagcacgagccccctggccgtgccagtggcctacctgaggcagtttcagagagacttcagcctgttcctcaagtcgcgcgcggcggaggtcttctccggcggccggatggtcctcgccatgctcggcaggcaggccgacggctatatcgacaggcgtaccaccttcctctgggagctcctctcggagtcgttcgcctccctggtcgcacaggggctggtcgaggaggacaaggtggacgcgtacaacgtgccgttctacgcgccgtcgataggggagatcgaggaggaggtgaggcgggagggatcgttcaggatggactacgtgcagacgtacgagatcaacctgagcagcagcggcgacgcgaggagggacggcaggacggtgtcgatggcgatcagggccatccaggagtccatgctcagccaccacttcggcccggagatcgtcgacgcgctcttcgccaagtacaccgagctcgtcaccgcgtccatggagagggaggaggtgaagagcgtccagattggggtcgtcctcaccaggttgtga

SEQ ID NO: 3032 - DNA, 2778 bp, Oryza sativa
atggcttccacggccgccattgctgcgctcgcgttggtgttcttcgtgttgctgtgtgtgagagatggtggcggcgtcgacgcggcggacacgctgtcgcaggggcagtcgctgggcgcgaacgacatgctggtgtcggcgaacggcacgttcaaggtggggttcttcacgccggcgggtggcgacccggggaaggtgtacctcggggtgatgtacgcgacgtcgaacgtgcagacggtgatgtgggtggcgaaccgcgatgcccccgtgagaacggcggcgggggccgcctccgccaccgtgacgggctccggcgagctgctggtgaaggagggcgaccgcgtcgcgtggcggacgaacgcgtcggccgcggggcgctccaaacacacgctgacgatccgcgacgacgggaacctcgtgatctccggcagcgacgccgccggcacggacgtagagtgggagagcttccaccacccgacggacaccttcgtcccgggcatggagatcgcgctccggcagaccaacggcgaccgcacgctgtacacgtcgtggaggagcgacgccgacccggccaccggcgacttcacgctggggctggacgcgtcggcgcagctctacatctggcggagccagggcggcaagaactcaacctactggaggtcggggcagtgggcgagcggcaacttcgtcggcatcccgtggcgggcgctctacgtctacggcttcaagttgaacggcgacccgccgccgatcgccggcgacatgtccatcgcgttcacccccttcaactcgtcgctctaccgcttcgtgctccggccgaacggcgtcgagacgtgctacatgctcctcggctccggcgactgggagctcgtctggtcgcagccgaccatcccctgccaccgctacaacttgtgcggcgacaacgccgagtgcaccgccgacgacaacgagcccatctgcacctgcttcacaggttttgagccaaaatctccgcaagagtacaacaacggcaactggacgcagggctgcgtgaggagcgttccactgacgtgcagcagcgagaggaacaacacgaccgccggtggcgccggcgccggtggcggcgacgggttcaccgtcatcccggggcgtgaaagctgccggaacttcgcccgtgtggggatcgctggtgggcgacgcgaactcgtgcgagaaggcgtgcctgggcaactgctcgtgcggggcgtacagctacagcaccggcagctgcctcacctgggggcaggagctggtggacatcttccagttccaaaccggcaccgagggagcgaaatacgacctctacgtcaaggtcccatcttctctattagaaaaattagaaaattgttcagttcactggaatctttggcatgtggtcgaactgaaaatggcattagaaaacgcagcatcaatccggtgcagatgcgtgtgaggttgttggatcctgaattcctgattagtgcaggccgtttgtttcggatgccgacagcttccggaaaagtacggtataaaagctcggggcgatggaaaaccgttgtcgtcgtcgtagttgtggtcgtggtggttgtattgctggcatcaggccttctcatgtggaagtgcaggagacgaattaaagagaaacttggcattggtaggaaaaaggcacaactcccgttgctgcgtcctgcgagggatgcaaagcaggatttctcagggccagcgcaatctgaacacgagaaatcagaggagggcaagaactgcgagctgccgctgttcgcgttcgagaccttagcgacggccaccgacaacttcagcatctcgaacaagctcggagagggaggcttcggccatgtctacaagggaaggctccctggaggagaagagatcgcggtgaagaggctgtcccggagctccgggcaggggctggaggagttcaagaacgaggtgatcctgatcgcgaagctgcagcaccgcaatcttgtcaggttgctgggatgctgcatccagggcgaggagaagatcctggtgtacgaatacatgcccaacaagagcctcgacgccttcctcttcgatccggagagaagagggctcctggactggaggacgaggttccagatcatcgaaggcgtggcgcgagggctcctgtacctccaccgcgactcgaggctccgcgtggtgcaccgcgacctcaaggccagcaacatcctcctcgaccgcgacatgaaccccaagatctccgacttcggcatggccaggatcttcggcggcgaccagaaccaggtcaacaccaaccgcgtcgtcggcacactgggctacatgtcaccggagtacgcgatggaggggctcttctcggtgaggtcggacgtgtacagcttcggcatcctcatcctggagatcatcacgggccagaagaacagcagcttccaccacatggagggctccctcaacatcgtcggctacgcgtggcagctgtggaacggggacagagggcaggagctgatcgacccggcgatccgggggacgtgccccgcgaaggaggcgctgcggtgcgtgcacatggcgctgctgtgcgtgcaggaccacgcgcacgaccgcccggacatcccctacgtggtgctcacgctcggcagcgactcctccgtgctgcccacgccgcgcccgccgacgttcacgctgcagtgcacgtcgtcgtcgtcggggcgggacatgtactacagggacaaggaggagtcctactccgccaacgacctcaccgtcaccatgctccaaggcaggtag

SEQ ID NO: 3033 - DNA, 4452 bp, Oryza sativa
atgaacttgtgtgggagcccaatttgctccaagaaggatgtagtttcatgtgctttcaaggaaatattggactcatctacttgcatgaatcatctggtggtgtttggcattactgcattgctcactgttgcacttgcactccatttgctcatcaaaattccaaagagtagagcatctgcgcgacagcttgccgcgttcaattcaccgctacaactggctgctgtagtgttcaatggctgcttgggtttgcttaatcttggcctaggactgtggatgctgaggattagcttcagtcaggattcctccatttcccagtcacattggtggcttgtgatcttggctcaaggatttaatttgatccttactagcttcacttttagcgtcagaactcggtttcttggagcaacatttgttcgattttggtcagttggtctgaccatatgtgcagcattcatctgttgctgttcagttgtttacatggttgaagagaaggagatcacctttaaagcttccttagatgttcttttgctaccgggagcccttatccttcttctttatgccattcggcacagccatgatgaagagggttatgaaacaaatgcaaatgctttatacaagcccctgaatacagagaaggatcatgacacggctgattcagagatccatgtaactccttttgctaaagctgggtttttcagtgtgatgtcattttggtggcttaaccctttgatgaagatgggttatgagaagccccttgaagataaagatataccgcgtttaggctccacagatcgagcacagaaccagtacttgatgttcttggatgagctgaatagcaagaagcagtcggagccacatgccacaccatcagtcttttggactattgtttcctgccataagagtgggattctgatctcaggtttctttgcattgctcaaggttctcaccttatcctcaggcccattacttctcaaggcattcatcaatgtaacactggggaaagggaccttcaaatatgaaggaattgttctggctgtgacaatattcttttgcaaatgctgtgaatctttgtcgcagagacagtggtatttccgcactcggaggttaggccttcaggtgaggtcatttctgtcagcagctatttttaagaaacaacagaagctatcgaacttagcaaaaatgaagcactcttctggagaaataatgaattacgtgactgtcgatgcctaccgcattggggagttcccatattggttccaccaaacatggacaacaagtgtccagctctgcattgctctggcaatcctgtacaatgcagttggtcttgcaatgatatcgtcattggttgtcatcattatcactgtaatctgcaatgctccactggcaaaactgcaacacaagtttcagactaaacttatggaagcacaagatgtgagactgaaggcgatgactgagtctttagttcatatgaaggtcttgaaattatatgcttgggaaactcatttcaagaaggtcattgaggggttgagggaggttgagtacaagtggttgtcagcattccagcttaggagggcatacaacggtttcctgttctggtcgtcacctgttttggtttctgcagcaacatttctgacatgctatcttttaaaagttcctctggatgctagaaatgtattcacctttgtggcaactctacgtctcgtgcaagaaccaatccgacagataccagatgttattggagttgtgattcaagctaaagttgctttcacccgggttgtaaaatttcttgatgctcctgagctgaacgggcaacgtaggaataaatatagagcgggtgcggagtatcccatagcactaaactcctgcagcttctcgtgggacgagaatccatcaaaacaaactctgaggaatataaatttagcggtcaaagttggggagaaggttgcaatctgcggtgaggtaggatcaggaaaatcaacacttttagctgcagtactaggagaagtacccaaaaccgaaggcacgattcaagtttgtgggagaatagcatatgtttctcagaatgcatggatccaaacaggaactgtgcaagacaatattctctttggatcttcgatggataagcaaagatacaaagaaacacttgtgaggtgctctttggaaaaggaccttgcaatgttgacacatggagattgtactcaaattggggagagaggagtaaatcttagtggtggtcagaagcagcgtgttcagcttgctcgtgcactataccaaaatgcagacatctatcttcttgatgatcctttcagtgctgttgatgcacatacagcatcaagtcttttcaatgaatacgtcatgggggctttgtcagacaagactgttcttttggtgacccaccaagtggattttctgcctgtgtttgattccattctgttaatgtcagatggtgagattattcagtcagcaccttatcaagatctgttggcatgctgcgaagaatttcaggaccttgtaaatgcccacaaagatactataggagtgtcagatattaataacatgcccctccacagagcaaaggaaatatcaacaaaggagacagatgatattcatggaagcagatatggggagtctgtgaagccatcacaagcagatcagctgataaagatagaggaaagagaaataggtgatacaggtcttaagccttatacactgtacctgcgccagaacaaaggatttttatacgcatctctcgccattatttcccagataattttcatatgtgggcaaatatcacaaaattcatggatggctgctaacgtcgaaaaccctagtgttagtacattgaggttaatagtcgtgtacattgctatcggagtttgctcaatgattttcttgatatctagatctttatgcatcgtagtccttgggatgcagacttcaagatccttattttcgcaactacttaactcactgttccgtgcacctatgtgcttctatgattctactcctctaggaagggtattgagccgggtctcttcagatttgagtattgctgaccttgatgttccattcttcttcatgtttagcatgaacgccagcttaaatgcatatagcaatctgggggtattggctgttgtcacatggcaagttttgtttgtctcggtgccaatgataattttagcgattaggttgcagaggtactatttagcttcggctaaggaattgatgcggatcaatggcactaccaaatctgctctagccaatcacctaggtgaatcagtttcaggggctataacaataagggcctttgaggaagaagatcgtttctttgctaaaaatttggagcttgtggacaggaatgctggcccatacttctacaattttgctgcaactgaatggctgattcaacgcctggaaatgatgagtgctgcagttctttccttttctgcttttgtcatggcgattcttcctccaggaacttttagccctggttttgtaggaatggcattgtcctatggtctatccctgaacacatcttttgttttgtctattcaaaaccagtgcaaccttgcaaatcaaatcatatctgtggaaagggttaaccagtacatggacatcgaaagtgaagcagcagaggttatcgaagaaaatcggccagcaccagattggccccaagttggcaaggtggagcttagagatttgaagattaagtacaggcaagatgctcctcttgtactgcatggaattacttgcacatttgaaggtggagacaagattggtatagttggtcggacaggaagtggcaagacaactttgattggtgctttgtttcgtcttgttgaaccagctggagggaaaataatcatagattctgcggacatcaccacaataggcttacatgacttgcgttcatgtttgggcattattccgcaagatccaacacttttccagggtactgtaagatacaatctagaccctcttgggcaattctcggatcaacaaatatgggaggttcttgacaaatgccaacttcttgagactgtccaagagaaggaacatggattggattcacttggtaggggtgtactaattgtgatattgtcatatagttgtggaagatgggtcgaactggagcatgggtcaaaggcagctgttctgtttaggacgtgcacttttgagacggtgtcgcatcttagttctgatgaggcaacagcctccatagacaatgcaactgatgctatccttcagaaaacatcagaactgaattcaagattgcactgttattactgttgcgcaccgtatacacagttatggactgcactatggtcctgcatgagcgatgggaaaatggtggagtatgacaaacctatgaagctcatggaaactgaaggatctctcttccgagatcttgtcaaggagtactggtcatacgcatcgaatggaaatatttag

SEQ ID NO: 3034 - DNA, 849 bp, Oryza sativa
atggcgatcggagcggctccagcttccaatcagcctcatgacacgagcaacatactcgagaacgtgtgggccagcatcatgacgtcgtcgtcgtcgccggcggtgtcgtcgtcggtggcggtgtcgtcgtcggcggtgaccggtcaggaggagaattcggcgatcttgcagaggttgccgagcttggggaggtggatatccatgggcgcagaggagtgggacgagctgctgctcagcggggcggcgctcgcgtcggaatcctccggcgagctacagctcgtcgccgcctcccccggtgatcacaaccaggtcgtcggtggcsgcggcggcgccaactacaggacgacggcgacggccgcggcgcggaggagctaccgcggggtkargcggcggccgtggggcaagttcgccgcggagatacgcgacacgcggaggaggggcgcgcgggtgtggctcgggacgttcgcgacggcggacgaggccgcgctggcgtacgacatggcggcgctccgcatgcgcggccaccgcgcccacctcaacttcccgctcgccaccgtgcagaagcacctcgagcgcgacctcgccggcggccgctcctcctccgatcagacctccacccgcgcgcgccgcaggaggaggccgagagcgaacaccaccaccgatgccgcagcaagaagcgtcgtcttctccggcgtgcagaccgcgacgaactgtgatcacatggtgtcgttcgcttcagaaaaagatcaagtttcgatgcaagaatgctcgaaaagtgacgcaggagtgatcgatttcgaggagattggtggcgagtattgggattatttgttcccgcctcttgtataa

SEQ ID NO: 3035 - DNA, 654 bp, Oryza sativa
atggcgtaccgggcggacgacgactacgactacctcttcaaggtggtgctcatcggggactccggggtcgggaagtcgaacctgctgtcccgcttcacgcgcaacgagttcagcctcgagtccaagtccaccatcggcgtcgagttcgccacccgcagcatccacgtcgacgacaaggtcgtcaaggcccagatctgggacaccgccgggcaagaaagatatcgagctattacaagcgcatactatcgcggagcagtaggggcactcgttgtctatgatgtcacgcgacatgtcacctttgagaatgtggagaggtggatgagggagctcaaggatcacacggacgccaacatcgtgatcatgcttgtggggaacaaggcagatttgcgccaccttagggctgtctcgactgaggatgcgaaagcatttgctgagaaagagaacactttcttcatggagacgtcggccctggagtcaatgaatgtggagaatgccttcactgaagtgctcacccagatatatcatgtagtgagcaagaaggctcttgacatcggcgatgacccagctgcaccaccaaaggggcagaccatcaatgttggtggcaaagatgatgtctctgcagtgaammmgtctgcttgttgttcatcagcgtag

SEQ ID NO: 3036 - DNA, 582 bp, Oryza sativa
atggcggctctgcttgtggtcgtgttggttgccatgtcggccatggtggcgacggccaactttaaccaggagttcgacatcacctggggcgatggccgtggcaagatcctcgaggatggccagctgctgacgctcacgctggacaggacgtccggctcagggttccagtccaagcacgagtacctctacggcaagatcgacatgcagctcaagctcgtccccggcaactccgccggcaccgtcaccgcctactacttgtcgtcgcaggggccgacgcatgatgagatcgacttcgagttcctggggaatgtgaccggggagccgtacacgctgcacaccaacgtgttcacgcaggggcagggccagcgcgagatgcagttccgcctctggtacgaccccaccaaggacttccacacctactccatcctctggaaccccaagcacatcatattcatggtggacgacatgccgatcagggacttcaggaacctggaggggaaggggatcgcgttcccgaagaaccagccgatgaggctctactccagcctgtggaacgccgacgactgggcgacgcagggttga

SEQ ID NO: 3037 - DNA, 2382 bp, Oryza sativa
atggagaccagaacaaatgagtattcccgtaagggggcaatgtgggagctggaaaggaatcttgatcaacccatggatgcagaggctggaagactcaggaatatgtacagagaaaagacctatccaacaattttactgctacggctagctttccaaagccttggtgtggtatttggagacttaggcacatcacctctatatgttttctacaatatctttcctcatggaatagaagatacagaacaagttattggagcactctctcttataatttactcccttacactcattccacttgttaaatatgttttcattgtcttgagagcaaatgacaatggccaaggaggaacatttgccctttattcactgctttgccgtcatgcaaagataaatattattccaaatcaacatagaaccgatcaagatctaacaacatacagtcgccgcacatatgaagaaaagtctcttgctgccaaaatccaaagatggttagaggggcaccaattcagaaagaatttaattcttattcttgtactatttggaacttgtatggctgttggagatggaatactcactcctgccatatcagttctttctgcgactggtggaatacaagttgaagaaggcagaatgagaaatgatgtggttgtaattatctccgtgctgatattgattggactgttcagcatgcagcactatggtactgataaagtcagctggctctttgcaccaatagtatttgtttggttcatactcattgggattcttggtgctgtaaacatttgcaaatatgaccattcagttcttaaggctttcaatcctgtctatgtatatcgttactttaaacgagggaagactagttggacttctttaggtggaattatgctcagcataacaggcacagaagcattgtttgctgacctttcgtattttcctgtacaagctattcagattgctttcactgtggttgtgttcccatgccttcttctgcaatatactggtcaggctgcgtttatagctgcaaacacaaaccaagtcagccatgccttctatatctcccttccagctcctatactttggccagcatttgccgttgcaacagcagctgcaatagttgctagtcaggccactatatctgcaacatattcgattatcaagcaagcacttgccctagggtgctttccccgagtgaagatcatccatacttccaagaagtatctcggccagatatacagccctgatattaactggatcctcatggttttctgcatagctgtcactgcagggttcaaaaaccaatcccagattgcaaatgcatatggtactgctgtgatcatggttatgcttgtgacaacatttctgatgatccccatcatgctgctggtgtggcgaagccattggaccctggtcgtcgccttcaccgtgctgtcattgcttgtggagatcccctacttctcggccgtcgtgcgcaagatcgatcagggaggatgggttccgctggttttcgcggcaggcttcatgatcatcatgtatgtctggcactacggcaccctgaagcggtacgagtttgagatgcacagcaaggtgtccatggcctggatcctggggcttggtccgagccttggccttgtcagggtccccggcattggcctggtctacaccgagctcgccagcggtgttcctcacatcttctcgcacttcatcaccaacctcccggcgatccactcgacgctggtgttcgtctgcgtcaagtacctcccggtgtacaccgtgccaccggatgagaggttcctggtgaagcggatcggccccaagaacttccacatgttccggtgcgtggcgcggtacgggtacaaggacatccacaagaaggatgacgacttcgagaagatgttgttcgatagcctgattctgttcgtgaggctggagagcatgatggaggagtacagcgactccgacgagtacagcaccctgatgatgagcctcccaaataacccagggatcagcaatggcggcgtgaccaccaccggcaccaacaatgtcatggaggtgatgagctgcacgtcgacccatgactccattgtgccggtgaactccaggtccgacgacacgggcagcagccaggtgatgccggcgtcggggcagatggcgttccagagcgtcggcgacgagatcgcgttcctgaacgcgtgcagggacgccggggtggtgcacatcctcgggaacacggtgatcagagctcgcagggattcagggttcgtcaagaagattgtcatcaactacatgtatgctttcctgaggaagatctgcagggagaacagtgccatcttcaatgtgcctcatgagagcatgctcaatgttgggcaggttttctacgtgtaa

SEQ ID NO: 3038 - DNA, 2853 bp, Oryza sativa
atggaagctggagcaagattagccttcgtaatgccgctcgtcgtcgtcctcttgctgatgatcttctcgttgggcgttcggggagtggatgtggtcgtcgatggaggaggaggaggtgcggcggctgctcggcggaggagggtggaggtkggggtgatcctggacaggaggacgtggctggggaacatcagctgggcgtgcatggagctcgccgtggaggatttctacgccgacgaggagcgcgccagctacaccaccgcgctcaggctccacctccgggacacccgcctcgacgccgtcgacgccgcctccgcaggtgtcgatctactgaaaaatgtccatgtgcaagcaatcgttgggccacagacatcagcacaggccaaatttctcgcggagcttggggaaaaatcatcggttcctgttgtttcattctctgcaaatagcccatgtcgaacggccagccaaactccatacttcatcaggacggcatggaacgactcctcacaagcagaagctatcgcgtcacttgttcaaagattcaattggagggacgtcatccctgtcatcgaagatgatgactccaatacaagattcattcctgaccttgttgatgccctaaggaatgccgagatccgtgttacccacaggtgcaagatacacccgtcagctggagctgatgacataaagaaagtcgtcttaagcttaaaggaaaaatggacaagcgtatttgtcgtgcgcatgtcgtatcagctagctcttagttttttcaagcatgccaaggatgaagggatgatgggccagggctttgtctggattgcagcttatggcttaacagacatctttgatgtagttggttctcctgcatttgatgtgatgcaaggagttattgggatgaaaccttatgttaatgatactaaacaacttcaaaacttcaggcagagatggcgcaagatgtataagtctgaaaatccaggcaccacattgagtgagcccacattatctggtctctacgcatatgacactgtgtgggcattagcgttagcagcagagaaggctggatatgttaactcagactttcttctgtctgaaaaaaacaacgggtcgactgattttgacaggatcaatacttcaaatgctgctaagaagctccagagcacactcttgaatattgatttccaaggcatgagtgggaaatttcagtttcaagacatgcatttgctatcgatgacttatgagataataaatatagttggggaggagcaaagagtagttggtttttggacaccagaatttaacatttccaggggtctaaatacgaaagctgatgttaatgaaatcatatggccaggaggagaaacaactgtaccaagggggtggctctttccaatgaataaaacactcaaaataggcgtgcctgcaaaacctgggttttctggttttataaagaaagaaaaatataatttcacaggactctgcattgaggtattcgaggaagttcttaatggattaccctacaaaataccccatgactatgtggagtttggaaatggaaagggggaaagtaatggaacttacgatgaacttatctacaaagtttatcagaacgacttcgatgcagcagttggtgatataacaatcttggccaaccgatctttatatgtggacttcactcttccttatactgagtcaggagtgcgcatgctagttccagtccaggaccagcgacagaagactgcatggacgtttctgcagccattaacagctgacttatggttaggaactgcggccttctttgtcttaacaggttttgtagtttggtttattgagcacagaacaaatgaagatttcagaggaccaccagtcaatcaaattggatctgtcttctacttcgccttctccacacttgtttttgctcatcggcaaaagattgtgaacaatttatcaagagttttgttagttatttggcttttcgtggtgctgatattgcagcggagttatactgcaagcttgagctcaattctcacagtggaacaacttcagccaacagtcaccaatttagacgaagtcatcaggaaaggggccaacgttggctacctcaatgattctttcatgcctgagcttttgaaaaggttgaaaattgacgaatcaaagttgattgcccttgactctcctgatgaatacaacgaggctctatcaactggtagagttgctgtagttgtcgatgagataccataccttaaggtgtttctttcaaagtattgccacaactatactatggttggcccaacttacaagttcgatggatttggttttgcattccctctaggctccccgctcactgctgagatttcaaggggaatattgaacttcacatcaagcaacagaatggcccaactggagagagaattgtacaacaatagaacatgccctgacaaagatgactcccaaacttcaagcagccttacactacgcagctttcttgggctgttcatcatcactggagcatcttcactgctggcactgttcctacatgttgtcataaccctctataatcatcggcatgatttgagcagcgccagcagtagtcagagttcatggtgtggatggtttgccatcctcctaaagatattccacgagggtgatagacctaatgctccacaattggatgagccagcagtgtcaaatgctaacactacagctgatactccatggagcacacctgatcatcacattatcgaaaatgttgattcaggcagtgatgtggagagcgtaagagaagaagatagagaagattttgttcagggccctgacccaccatcttttgcatacatgcattcagagagggggcaataa

SEQ ID NO: 3039 - DNA, 1398 bp, Oryza sativa
atggcgtttcatcacgtcatgggcattgtagcagccatgcttctcctgatggcttcttcgccggccttcgccracacggcgktgctcggccggaagggcggcgccatgactgacgatgatgccgtggaaggagaagcaacgacggggccggggaggtacgccgtgatattggacgccggaagcacgggcacacgagtgcacgtcttcaggttcgacaagaagatagacctcctcaagatcggcgacgacatcgaggtctttgccaaggtggatcccgggctgagctcgtacgctgggcggccgcaagaggcagcaaaatccataatgcctctgcttgacagggccaaccacgctgttcctacctggcttatgaataaaactccccttgaacttggggcaactgctggactcagacttattggagatgacaaggcaaaccagattcttgaagcggttagagatgttgtccacaccaagaccaagttccaatacaatccaaactggattaatgttcttagtggatctcaagaaggatcttacatgtgggttgcacttaactatttgctggatagattaggaggtgactactccaaaactgtaggagtgattgatctcggaggtggatccgtgcaaatggcctatgccatctcaacaggcacagctgctaatgctccagaagtgctcgatgggcaggatccttatattataaaggagtatctcaaagaaagagattacaatgtttatgtgcacagttacttgcactatggtgctcgggcttctcgcgtggagatactaaaaaggaagaatgggacatttagcaactgcatgctgcgtggatttagcggtaagtacatctataacggggagcagtatgatgcaacggcagcgccacaaggggcagactaccacaagtgtagagatgacgtggtgaaggcactcaacctggacgcgccttgcgaaaccaacaactgcagcttcaacggagtgtggaacggcggcggtggcgctgggcaggacgagctctacgttgcgaccagtttctactacatggcctcggatcatgagcagggtcgactacagcagattgggttcatcgatagcgaggctcctagtgctaagtccacaccagcagcatacaaggttgctgcagaaaaagtttgcagtctgagtgttgaagaagcgaaagcagcataccccagagcttgtgaccatgcttatctatgcatggacctcgtttaccaatacaccttgcttgtcgatggctttggtttggaggcaacgaaggagatgacgctggtagagaaggtgaagcatggagagtactacatcgaagcggcgtggccattgggcaccgccattgaggctgtctcacccaaaaagaagcaccaagagacatga

SEQ ID NO: 3040 - DNA, 1176 bp, Oryza sativa
atgcctgcccttccaccaggcttccgcttccaccccaccgacgaggagctcatcgttcactacctcatgaaccaggccgcctccatcaagtgccccgtgccaatcatcgccgaggtcaacatctacaagtgcaacccatgggaccttcckggtaaggctttgttcggcgagaacgaatggtacttcttcagcccgagggaccgcaagtaccccaacggcgctcgccccaaccgcgccgccggctcggggtactggaaggccaccggcaccgacaagtccatcctctccactccgaccagcgacaacatcggcgtcaagaaggccctcgtcttctacaagggcaagcctcccaagggcgtcaagaccgactggatcatgcacgagtaccgtctcaccggcacatcagctaacagcaccaccaccacaaagcagcgtagagcgtcatccatgaccatgaggctggacgactgggtgctgtgcagaatccacaagaagagcaacgacttcaattcctctgaccaacacgaccaagaacccgaggaatcaaccgtcgaacagcttgaagacatccatgacaacaactcctctgaacaacctccagctccagctgacatgaacaaccaacagtcagatttccagcccatgacggcgatgagcatgagcaagtcatgctccctcaccgatctcctcaacaccatcgactgcgccgcgctctcgcagtttctcctcgacggctcatccgacgccatcgctgagcctcctgctcctcccagccccctaatatacacaacacctcatcyaaattaccaaacactaaactataacattaacagcaacagcagcatgccacacgccttcgagtcacgcctagatcatcacgatggttacgttaacaattataatgttaatggcctgaggaggaagagaatgatggcgtgtagtgcaacttcctttgatgatggcagcagcagcagcaatgactttgtgcatgccgttgycaagaaaccgcagctgctgccaagtgattcraggggtagtggttttggaggaggttactgcaaccagcagctttcagagactgcgactggytttcagtttcagaacggcaatmtgytgagccatccatttcctctgaaccakcagctactgctgaacaatcatctgcagatgcagtag

SEQ ID NO: 3041 - DNA, 1164 bp, Oryza sativa
atgtcgtcgcagcaatggcttggtgacggcacggcgcggaggtggagggagctccatggtgagagcgactgggacggcctcctggacccgttcgacctcgacctccgccgcaccgtcatccgctacggcgagatggcgcaggcgacgtacgacgccttcaaccacgagaagctctcgccgcacgcgggcctctcgaggttcgccgcgcgccgcttcttcgagcgggcgcagctgccgggccactccgcggcgtaccgcgtcgccaggtgcagggagagcaactggatcgggtacgtcgcggtggccaccgacgaagggaaggctgcgctcgggcgccgcgacatcgtcgtcgcgtggcgcggcacggtgcagtcgctggagtggatcaaggacatggacttcgtcatggtgccacccaagggcctcctccgggacaaagcttccgacgccatggtgcatcgagggtggctgtccatgtacacctccagggactctgagtccagccacaacaaggacagtgctcgagatcaggtgttgagcgaggtggcgaagctggtgagcatgtaccaggacgaggaactgagcatcacggtgacgggacacagcctcggcgccgcactcgcgacgctgaacgcgttcgacatcgtcgagaacgggtacaacagggcaccccgcgccgcggcagcggcggcgggctgcccggtcaccgcgttcgtgttcgccagcccgcgcgtcggcgggcacggcttcaagcgccgcttcgacggcgcgcgtggcctcggcctccgcctcctccgcgtccgcaacgcgcgcgacgtcgtccccaggtacccgccggcgccgccgtaccacggcgtgggcacagagctggcgatcgacacgggcgagtcgccgtacctgaggaggcccgggaacgagctggtgtggcacaacctcgagtgctacctgcacggcgtggccggcgcgcgcggcggcgaggccgggcggttcaagctcgccgtggagcgcgacgtggcgctggcgaacaagtcctacggcgcgctgcgcgacgagcacgccgtgccggccgggtggtggatcccgtcgaacaggggcatggtgagaggcgccgatggccgctggactctgatggaccgcgaggaagatgaggatagtgcagagtaa

SEQ ID NO: 3042 - DNA, 945 bp, Oryza sativa
atggtgacattgattgaacaagggcgtgagtttaagactattgtcaacaatggaatcaagatcggtgcatctctttctgttgctgagtacatttggtatttgaggtggttgtgtccacttaacgaggagctttacaagacccacaacgagagaagggatcggctgaccaagaagatcatagatgagcatgcgaaggccctcaaggagagtggtgccaagcagcactttgtggatgctctgttcactctcagagaacagtatgaccttagtgacgacacagttattgggcttctatgggacatgatcactgctggaatggacaccacagtgatatcagtcgagtgggcaatggcagagctggtcaggaaccccagggtgcagaagaagctgcaggaggagctggaccgcgtcgtcggccgcgaccgcgtcatgtcggagaccgacttccagagcctcccttacctgaacgccgtcgtcaaggagtcgctccggctgcacccgccgacgccgctgatgctcccgcacaaggccagcacgaacgtcaagatcggcgggtacaacatccccaagggcgccaacgtgatggtgaacgtgtgggcgatcgccagggaccccaaggtgtggagcaacccgctggagtacaggccggagcggttcatcgaggagaacatcgacatcaagggcagcgacttcagggtgctccccttcggcgccggccgccgcgtgtgccccggcgcccagctcggcatcaacctcgtcgcctccatgatcgggcacctcctccaccagttcgagtggtctctccccgagggcaccaggccggaggacgtcaacatgatggagtccaacggcgtcgtcacgttcatgagcacgtcgctgcaggtcatcgccaagcccaggctcgacaacccggacctgtacaagaggttccctgtcgagatgtga

SEQ ID NO: 3043 - DNA, 1827 bp, Oryza sativa
atgacatgggataataggattaaggaggagtcttccctcctcattgcccttttaatacgtcttagacacccagacattgacttagatgcctcgggagaagtagcattaggatttaagaccgttccccattttagctgtaccaagagagacaaaggtacacaagattaccagaaagaggccaggagcatgtcatccaagaagaagagagctgccatagatctctccctggaggcagagagaagacggccagaagaacgcggcggcggcagcgatcgcgaagccagcgatggcgccgctgctgcagctgaggaagatggtgatgtcaagcaacgagagggccctaaagaggaaaccggcggcgaggaggagaaggtagttgaagtggttgtggaccaaggagaagacggctccaatgaggagatcaaatataggactcaacaagcagagatgatcgaggaggacaagcaaccagctgcagcagcaaacgtcgacgacgatggcggcgacagcgacggagtcggagctagcgcggaagagaagcacatggtaacagaggccaccggcggcgaaggcgacgacggaggcgatagccgtacccccatggcgcaagatgagctcagcgagatgcaggaggagatggagaggatgaaggaggagaaccggatgctccggcgagtcgtcgacaagacggtgcgcgactactacgagctgcagatgaagctagccgcctaccagcagcaaccggcagcagcagatgagcctaaggagaccgaggtgttcctctccctcggcgcaacggccgccgcctccgccggctgcggcggcggcttcccggaggcgaagagcaaggagcaggccgcgtggcggcggcgctctgtcggaagcgacgacagcgactgcggcaaggaggatctagggctgtcccttagcctgggagcgtcgtcgtccaggccggcgscgagggggtacgcgctgctggagagcagcaaggtgcagggtggcgcggcgccggccgccggcgagctcgccgcggccggcggcatcacgagccagagcgtcaacccggccaaccgcaaaactagggtttcagttcgagtccggtgccaaggccccaccatgaacgatgggtgccaatggcggaaatacgggcagaaggtcgccaagggcaacccgtgcccgcgagcttactaccggtgcaccgtcgcgccgggctgcccggtgcggaagcaggtgcagagatgcctcgaggacatgtcgatcctggtgacgacgtacgagggcacgcacaaccacccgctccccgtcggcgccaccgccatggcgtccaccacctccgccgcggccaccttcatgcttctctccagcaccacctcctcctcctccgtctccgacgcctccgccgcgccgtcgtcgtcctacctcagcccgtacctgctcaactccgcctcgccgttgctaatgccgggcgccaccggcggcggcggcggcatgcagcatctcaacctgttcgggaattcgccgtcgtcgtcgtctctgctagctccgcaagcgccaggctccagcaagtacccgtggtctccgaaccaccctccgctcgccggcgccggaggtaataagagaccgttctggagcgccggcggcgacggggacaagccggcgccggcggcattggccgagaacgtcggcgcggtgatgtcggacccgaacaagttctcggcggcgatcgccgcggcgatcaacaacttcatggggaaagacggcgagagtagcagcggcaagagtagtagtaagtggggcgtggttgaatcacttccaccccatgagtag

SEQ ID NO: 3044 - DNA, 1818 bp, Oryza sativa
atgggtaactgctgccggtcgccggcggccgccccaagggaggatttgaagacatcgcatttccccgcttttaccggaggcgggaagaagaagccgcaccaggcgcggaacgggggaggcggaggtggtggtggaggagggggaggctgggagaagaagcggctgtcggtgctcggggaggaagggagcgaggtgaacggcgggatcgaggagaagtacgcgctggacagggagctggggcgcggcgagttcggggtgacgtacctgtgcatggaccggtgctcgcgggagctcctcgcgtgcaagtcgatctcgaagcggaagctgcggacgcccgtggacgtggaggacgtgcggcgggaggtggccatcatgcggcacctgcccaggagcgccagcatcgtgtcgctgcgggaggcgtgcgaggacgacggcgccgtgcacctcgtcatggagctgtgcgagggaggggagctgttcgaccgcatcgtcgccaggggccactacacggagcgcgcggcggcggcggtcacgcgcaccatcgtcgaggtcgtgcagctctgccaccgccacggcgtgatccaccgggacctcaagcccgagaacttcctcttcgccaacaagaaggagaattccccactcaaggccatcgacttcggcctctccatcttcttcaagcctggtgaaaaattttctgaaattgtgggaagtccatattacatggctcctgaagtgctgaagagaaactatggacctgaaatagacatatggagtgctggtgtcatcttgtataattttgttatgtggagttcctcctttttgggctggtaccaactttgccttctctttgtgaaaaccttaaatcatttagctttgctcttctgcaaattcttaccaagcaaaattgcagagactgaacaaggagtggcacaagctatacttcgtggaaatatagattttaagcgagaaccatggcccaatgtttctgataatgctaaagatctagttcgtcagatgcttcagcctgacccaaaactcaggctaacagcaaagcaagttcttgtaagaaactggctgttgatgaatgtcgagaatagtatgagatgtttaattgttgctataaattcaagatggaaacaacttagaagatatactcagacagtgatatacaggcttggtactcaagatagctgtttcacttctgttgtcgcagagcatacctggcttcaaaatgctaagaaagctccaaatgttccacttggagatattgttattgctgatcacttatcagccgaagaggttgaggacataaaggacatgttcaaggtgatggatacagataatgatggtatagtctcttatgaagagttaaagagtggaatcgcaaaatttggttcccatcttgcagaatctgaagtgcaaatgcttattgaagctgtggatacaaatggtaggggagcactagattatggtgaatttttggccgtttcacttcacttacaaaggatggcaaatggcgagcacctccggcgggccttcctatttttcgacaaggatggcaatggctatattgagcccgaggagcttcaggaggctctggtggaggatggggcaactgatatcatggaagtggtgaaggacatattgcaagaggttgacactgacaaggatggcaaaattagctatgaagaattcgtagcaatgatgaagactggcacagattggagaaaggcgtcacggcattattcaagaggacgtttcaacagccttagcataaggcttataaaggatggatctgtaaaattgggccacgagtga

SEQ ID NO: 3045 - DNA, 1599 bp, Oryza sativa
atggagaggaagctccggaacaccgagaacgtcaccgtctccgacgtcggcgagttcaacggggccatctacgaggtcctcaaagccacggcggactacaccgccgccgcggcaaggaggttcggcaccggcgagatcagcttcgacccgacctacccggtcatctacagcatggcgtggtgcacgccggacatggcgccggggcgctgccgggcgtgcctggcggacaccatcgcccagatgcacgcctacttcaacccgaacgcgcagggcgccaggctcgtcggcgtgcggtgcgccgcgcggtacgagatttacccgttctacaccggccgcggcatggtgcaggtgccggtgagccggccgccggcggtgccgggaactcccgggaaaaagagtaaaactggtaagattcttgcaattgtactaccgatagtggcagctctacttgctagcgctatgatctgcttttgttgctggaggaggagaacaaaagctactaagctgtcactatcatattcttctcgttctgaggacattcaaaacatcgaatctcttattatggatctaccgacactacggattgccacagataactttgctgaaaacaacaaactaggtgaaggaggatttggtgaagtttacaagggatcctttcccggtggccaaaccatagctgtgaaaaggctctctcagagttctggacaaggcataggagagcttaaaaatgaactggttttaattgccaagctccagcacaagaatctcgtgaggctcgttggagtttgtttggaacaagaagagaagctacttgtctatgaatacatgcctaacaaaagtctagacacatttctttttgaccctgagaaacgcaaacaaatcgattgggcaaagaggttcatgataataaaaggaatcactggaggattgcaatatctgcatgaagattctcaattgaagataattcaccgtgatctaaaagcaagcaacgttctactggacgcaaatatgaaccctaagatttcagactttggcttggcaaggctttttggagatgatcagtcacaagaaacaactaaccgcgttgttggaacttatggatacatggcaccagaatacgctttacgtgggcaatattcaataaagtctgacgtatacagcttcggtgtgttgcttttggagatcatcacaggaagaaaaaacagtgactcctacaactctgaacaagctgttgatcttctgagcctcgtatgggaacattgggcaatgaaaactatcacggagatggttgacccatatttgaggagtgattcttcctctctagatgagattttgaggtgcattcatgttggacttgtatgtgtccaagaggaccctatggataggccaactctgtcaatgatcaatatcatgcttgacggcaatacagtttcagctaaagctccatcgagacctgcatttttcacagaaatgttgggcaatattaatattggttcaagcatgtattcccaaccataccctgtaaccgactccacggccaagcactcgacggccatgtcactaaatgatgtgacagtaacagagcctgaaccaagataa

SEQ ID NO: 3046 - DNA, 1980 bp, Oryza sativa
atggcggcggtgaacagcctctacgtcgccgcggcatccaccgcggccagcgccgcggcgctgcagtggtgggcggggtccctcctcgacggggatgccgacgcggcggccgggggaggaggaggaggaggaggggactggctcggcacggtgctgggctcgcacgtgaccgtcgcgctcctggcgaatctggcggcgcacgtgttcctcgtcctcatcctctccctcaaggatttctgttacgtctctgaatggctgttatatggctttgatagagcaagagctaagctgacagtgtgtgacttggttcgttgcgatttccttctagactcatttttgtgcatgtggtttaatattcatacactattttttgttcaattaacctcttctgagactagaaaggtgttggaacacatcattaactatgtgctttacaagatgtttcaatcattggctagagaacgccttgaacagctcaatgcttcaccatcagcgactccatcaaaatactttcgtgtatattctgcactattgctggttctatcggctgatgtactatggataaagctttgtgttgggttctgcaagtcgtgtaattctcaactattttggcttatgttttttgagccacttagtattggctttgagacactgcagttgtttgacatatggcaacgacatcaaatggacagtggtgtggactatcttgatttccaaaaaacttataagcaagcagcaggatctttttctgagtggaraggcagactagtcagaaattttggttttgtcattgacttgataagcttattgatgtcacttggtcattactcaatgatcttctggctccgtggtatggcgtttcatctggttgacgctgttctcctattgaacttgcgcgctcttatagcttcattttggaagcggataaaaacttatgccaagttacgaaaggcacttagttcactcgacggagcacttccagatgctacatatgatgaaatctgtgcatacgacgatgagtgtgccatctgtaggggaccaatggctcgagctaaaaagttatcctgcaaccatctatttcatctagcttgcttgcgatcatggttggaccaagggattaatggatggttactcatgtccaacttgtcgaagacctctctttctgtcatctcaaggtcacacaagatctacagcagagagagagataatatggaagagaaggcagctaatgtggaaatcagcagtgcaaagactaaatgggagcttagaggagcaaaaacagcaggtgcctctgaggaggctgctctgcagtttgtgccaatgaagaaacaaccaactgcatctgttgcttactcagactcctgttctcgctcccccaacttcctgaccatcaaaaacgcattatctcctggccgcttgctaccagctcttccatattgcaactatgcaagggagaattctaccttgattcgtggcagtgaggcagaagaggtttggttggttgggctggaaagggccgaaagagacgcatacactcatgcgtgcagaggtgctggtcttgattctagctgggcaccaccatggtcgagccctgggatggacaatcccagttcttccagcgccgtgacatcagtggggcttagtggagttcagatgatgatgaggcagttgacttcagtgactgataattatgggcatccagatgccacctggagtctatggcctgagccagttgcaggatcttcggttgttccatcctcttcctcgaggcctgatggtgcttcagctgctggcttgcggttccgaggcactgcaagacccgcgaatggtagcatgtcggaggttctctccatggtagatagagtacgagaagttttaccccatatccctgacgagctaattattgaggtacacttctatttcctctcaactctagttttagctattaccttacgcactggatctgatgagaacaaataa

SEQ ID NO: 3047 - DNA, 1482 bp, Oryza sativa
atggcaatggagaagagccctcctccggcgccgcacttcctcttcgtggtgagcgggatacagggccacatcaacccggcgcgccgcctcgccgcgcgcctgatggcgtcggcgccggccgcgcgcgtcaccttctccaccgccgtctccgcgcaccgcctcatgttcccgtccctgccgtccccggccggcgaggacgtcgacgacaccggcgtcgcgtacgtcccgcactccgacggctacgacgacgggtacaagcccggggtgcacgcgagggacgactacatggcgcgcacccgcgccgcgggcaccgagtcgctctcsgccatcgtcgcggctctcgcggcragggggcgcccggtgacgtgcatcgtgtacacgttcctcgtggtttgggcccccgccgtggcgcgcgcgctggggatcccctcggcgatctactggatccagccggcggcggcgttcgccgtgtactaccactacttccatggccatggcgaggccctggcytcctgcgcgaacgaccctgcccgcggcgccgtcgtgcgcctccccgggatgccgttcctcaggtccgacgagctcccctccgccgtgtccatcgtctcgccggagcacaagcactacctgctgctcgccatgctgcgcgacctgttcgaggatctcgacgagctcaagcccagggtgctggtgaacacgttcgacgcgctggagcccgacgcgctccgcgccgtgcccgatctggaggtcgtcgccgtcgggccggtggtgcccgacggcgaagcgtctctgtcgagctcgagcacggacatgttccggcgagacgacgcgagcgcgtgcgtggattggctggacacgaagccggcgcgctccgtggtgtacgtctcgttcgggaccctcctgtcgatgagcaagcggcaggaggaggagatgaggcgcggccttgaggccaccggccggccgtacctgtgggtggcgcgccagggcgccgtcgatggcggcgcgaccttggacagcgcacccacccccgccgccgatgccggcggcggcggcggcgaaggggacgcgcaagggatggtggtggagtggtgcgaccagatgaaggtgctctcgcacccggctgtgggctgcttcgtgacgcactgcgggtggaactcggcgctggagagcatcacccgcggcgtgccgatggtggccgtgccgcagtggacggaccagccgacggtggcgtggctggtcgaggcgcgcatgggcgccggcgtgcgcgcgcggctggacggcgagggcgtggtcgagcgcggcgagctgcagcggtgcgtggagctcgccatggcgggcggcggagacggcggtgtccgggcacgggcggagcgatggagggagcgcgccgcggaggcggtcgcggccggcgggtcgtcggagaggaatctccgggcgttcgcgtccggggccgtgacgcaggcggtgtgctcgagcaggtga

SEQ ID NO: 3048 - DNA, 1092 bp, Oryza sativa
atggtcaccgcgcgcaagggccgcggaggcagaggccctccccgcccccgcgtcgtcgacggcggcggagggagcatggtgtcgcgcgtggccgtgctcgcattctgcgtcgccgggatctggtcggcgtacatcacccagggcgtcctccaggaaaccctgtcgacgaagcggttcgggccggaggcgcggcggttcgaccacctcgcgttcctcaacttcgcgcagaacgtcgtctgcttcgtctggtccttcataatgatcaagctgtggtcgagtggtgggagctcctccgctggccgcgcgccgctgcggaagtactggggcgtcagcatcaccaacactgtcggcccggccatggggatcgaggcgctcaagttcatcagctacccagctcaggtcctggcaaaatcttctaagatgattccagtaatgctgatgggaactatactgtatggtgtcaagtacacatttccggagtacatttgcacctttcttgttgctgggggtgtatcatcctttgcgttgttgaagacaagctccaagactatcaagaagcttgctaaccctaatgcgcctctgggctacacattgtgcttcctcaacttagcttttgatggttacaccaattcgacccaagatttgataaagtctaggtatccaaagactaatccatgggatataatgcttggcatgaatctctgggggaccatatacaatgctgtgattatgtttgttgctccattactattcagtaattggccttacgccaacggttttgaggcagtgagattttgccaggagaacccagaggtggcatgggacattctcctgttctgcctgtgtggtgccgtgggtcagaatttcatcttcctaaccatcagccgatttggctctcttactaacactaccatcaccaccacccgcaagttcatgagcattgtcatctcctccgtcatcagtggtaacccactctccttgaagcaatggggaaagtgttgtgatggtcttttctggtctctctttacaaatctttctcaaatggaagagaaagaaggtcagagaccacaaggaatgagtttaatattttag

SEQ ID NO: 3049 - DNA, 1608 bp, Oryza sativa
atggcgagcgagagcgagagcaacggccaccaccacgccggcgacgaggcgcgcgcggagaacagcggcgcggggtgcctccacggcggcgacgacggcggcgggacgcccaggacgacgccggagatcaggtacaccaagctgttcatcaacgggcgcttcgtcgacgcggcctccgaaaaaaaaccattgtatcgttgggtcgtaagacgttcgagaccagggacccccgcaaccggcgacgtgatcgcccgcgtcgccgaaggcgacaaggaggacgtcgacctggcggtgaaggcggcgagggaagcattcgaccacggcgaatggcctcgcatgtcgggatcagagagagggagggtcatggcgaagtacgcggaggtggtggagcggcacgcggatgagctggcggcactggagagccttgacgccggcaagccgctcgccgccgccagggcgktggacgtcggcgagtgcgtcggcatcctgcgctacttcgccggcgccgccgacaagatccacggcgaaacgctcaagatgtcgaggcagctccagggttacaccctccgcgagcccctcggcgtcgccggcctcatcgtcccctggaacttcccggccatcatgttcttctccaaagtytcaccggggcttgccgccggctgcaccgtcgtcgtcaagcccgccgagcagacgcccctcagcgccctgttcctcgcccacctatcaaagcaagcaggagtaccggatggggtgatcaacgtggtgacaggattcggcccaacagcgggagctgcaatttcatctcacatggatgttgacgtggtggctttcacgggatctactgaggttggacggcttataatggaggcctccgcgaagagcaacctgaagccggtggcactcgagctcggcggcaagtcgccgttcatcgtcttcgacgacgccgacctggacaaggccgtcgagctcgccatcggcgggaacttcttcaacaagggagaagcctgcgtcgccgggagccgcgtgttcgtgcaggagggcatctacgaccggttcgagcagaagctagcggacaccatgaagagctgggtcgtcggcgaccccttcgatcctcgcgtcaatcaaggaccacaggtggacaaggctcagtatgagagggtgctcgggtacatcgagcaaggcaaggcagaaggggcaactgttctcacgggagggaagccctgcggtaagaaagggtactacatcgagcccaccattttcaccaatgtgaaggacgacatggtcatcgcgagggaggagatcttcggccccgtcatgtgcctgatgaagttcaagacggtggaggaggcgatcgagagggcgaacgggacgaggtacgggctggcggcggggctggtgacgagggacatcgacgtggcgaaccggatggcgaggtcgatccgggcaggggtggtgtgggtgaactgctacttcgccatggacaggagctgcccgttcggtggccgcaagatgagcgggttcggcaaggacgacagcatgcacgcgctcgacaagttcctcgccgtcaagtccgtcgtcacccccgtccatggctccccctggttctga

SEQ ID NO: 3050 - DNA, 1467 bp, Oryza sativa
atggagaagccggcggcgagcgtggaggagccgctgcttgttggcgctggcgagaagaagggcgagagcgcggccgcggcggagctgaagcggctgctccggctggcggggccgctggtggcaagcggcgtgctgcggaacgtggtgcagatggtgtccgtcatgttcgtcggccacctcggcgagctccccctcgccggcgcctccctcgccacctccctcgccaacgtcaccggcttcagcctgctcttcggcatggcgagcgcgctggacacgctgtgcgggcaggcgtacggcgcgcgccagcaccacctcctcggcgtctacaagcagcgcgccatgctggtgctcgccgtggccgccgtgcccatcgcgctcgtctgggccagcgccggcgagatcctcctcctgttcggccaggacccggccatcgccgccgaggccggcgcgtacgcgcggtggctgatcccgtcgctcgtcccgttcgtgccgctggtgtgccacatccggttcctgcaggcgcagagcgccgtgctgccggtgatggcgagctgcggcgtcacggcggcgagccacgtggccgtgtgctgggcgctggtgcgcaaggccggcatgggcagcaggggcgccgcgctggcgaacgccgtctcctatggcgtcaacctcaccataatgtctctctatgtcaggctgtcgcgctcctgcgagaagacatggactggcttctccatggaggccttcagggagctccgccagtatgcggagctcgccatccccgcggcaatgatggtctgtttggagtggtggtcatttgaatttcttgtgatgctctctggtcttctgcccaatcctaaacttgaaacctcagtgttgtcgatatgtctcaacactggtgctctgctggtcatggttccaattggtctcagcacagctataagtctggctgatttcgattctccttcaatgcctagcacgcgtgtttggaacgaactaggtgccggcaatccccaggcagcgaagctggcaactcgagtggtcatakgtatggccatgaccgaaggctcggtggttgcgtttacgatgattctgttgcgcaattcctggggtcacatgtacagtgatgaggctgaagttgtcacctacattgctcgtatgatacctgttctagccatatcattcttcattgatgggatgcacagcgctctttcaggagtgctcactggatgtggcaagcagaagatcggcgcacgggtaaatcttggcgcattttacttggcaggcattcctatggccgtctttcttgcatttgtgctacatctgaatggaatgggcctttggcttggcatcgtttgcgggagcctcagcaagcttatcttgctcttttggatcacaatgagtataaactgggagaaggaatcaaccagggcgaaagaattggtgttcagttcatctcttcctgtagcatga

SEQ ID NO: 3051 - DNA, 2613 bp, Oryza sativa
atgttgggcgggatcatcggcggcctgacgggcaacaagaacgcccgcctcaagggctccctcgtcctcatgcgcaagaacgccctcgacatcaacgacttcggcgccaccgtcatcgacggcatctccgagttcctcggccgcggcgtcacctgccagctcgtcagctcctccctcgtcgaccccaacaatgggaacagggggaggdtggggacggaggcgagcctggagcagtggctgacgagcctgccgtcgctgacgacgggagagtccaagttcggggtgacgttcgagtgggaggtggagaagatgggcatacccggcgccatcatcgtcaagaacaaccacgccgccgagttcttcctcaagaccatcaccctcgacaacgtccccggccacggcgccgtcgtcttcgtcgccaactcctggatctaccccgcctccaagtatcgctacaaccgcgtcttcttctccaacgacacttcactgccgagcaagatgccggcggcgctgaagccgtaccgcgacgacgagctccgcaacctgcgcggcgacgaccagcagggcccgtaccaggagcacgaccgcgtctaccgctacgacgtctacaacgacctcggcgagcccgactccggcaaccctcgccctgtcctcggcggctcccccgaccgcccctaccctcgccgcggccgcaccggccgcaaacccaccaaaactgaccccaccgcggagagcaggctgtcattgctggagaacatctacgtgccacgcgacgagcggttcgggcacctgaagatggccgacttcctgggctactccatcaaggcgctcgtcgacggcatcgtgccggcgatccgcacctacgtcgacctcacacccggcgagttcgactccttcaaggacatcctcaagctctacgagggcggcctcaagctgcccagcatcccggcgctggaggagctccgcaagcgcttccctctccagctcgtcaaggacctcatccccgccggcggcgactacctcctcaagctccccatgccgcacgtcatccgggaggacaagaaggcgtggatgaccgacgacgagttcgcccgcgagatcctcgccggcgtcaaccccatggtcatcgcccgcctcaccgagttcccgccgcggagccgcctcgacccggccaggtacggcgaccagacgagcaccatcacggcggcgcacgtcgagcgcgggctcgaggggctcaccgtgcagcaggcgatcgacggcaaccttctctacgtggtggaccaccacgatcatttcatgccctacttgttggatatcaatagcctcgacgacaacttcatctacgccacgcggacgctgctgttcctgcgcggcgacggcacgctggcgccgctcgccatcgagctgagcttgccgcacctgcaggacgacgggctgatcaccgccaggagcaccgtgtacacgccggcggcgcgcggcggcaccggcgccggcgccgtggagtggtgggtgtggcagctcgccaaggcgtacgtcaacgtgaacgactactgctggcaccagctgatcagccactggctcaacacgcacgccgtgatggagcccttcgtcatcgccaccaaccggcagctcagcgtggcgcacccggtgcacaagctgctgctgccgcactaccgcgacaccatgaccatcaacgcgctggcgcggcagacgctcatcaacggcggcggcatcttcgagatgaccgtgttcccgcggaagcacgcgctcgccatgtcgtcggcgttctacaaggactggagcttcgccgaccaggcgctccccgacgaccttgtcaagcgcggcgtcgcggtgccggacccggcgagcccgtacaaggtgcggctgctcatcgaggactacccgtacgccaacgacgggctggccgtctggcacgccatcgagcagtgggccaccgagtacctcgccatctactaccccaacgacggcgtgctccagggcgacgccgagctgcaggcgtggtggaaggaggtccgcgaggtcgggcatggcgacatcaaggacgcgacgtggtggccggagatgaagacggtggcggagctggtcaaggcgtgcgccaccatcatctggatcgggtccgcgctgcacgccgccgtcaacttcgggcagtacccgtacgccgggtacctcccgaaccgtccgtcggtgagccggcggccgatgccggagccgggaacgaaggagtacgacgagctggcgcgcgatccggagaaggtgttcgtccggacaatcaccaagcagatgcaggccatcgtggggatctcgctgctggagatcctgtccaagcactcctccgacgaggtgtacctcggacagcgcgacacgccggagtggacgtcggacgccaaggcgctggaggcgttcaagcggttcggcgcgcggctgacggagatcgagagccgcgtcgtcgccatgaacaaggacccccaccgcaagaaccgtgtcgggccgaccaatttcccctacacgctgctctacccaaacacctccgacctcaagggcgacgctgccggcctctccgccaggggcatccccaacagcatctccatctga

SEQ ID NO: 3052 - DNA, 1190 bp, Oryza sativa
atggagagcagcttggtcgacacagccgccgccactctctgcctggcggcggccgtcggcgggcggcgccgcgccggcagcttcttgaactgctcgtgctcctccaaagagtacagggtgagcgcatcctactccattgggcggatgctgagcggggtgaggtcggcggcgcgcaagaagctgttcaggagcgagccggccgacctgctggggatcagctggtcgccggactcgccgccgtcgaacggcaccgacggcggccaccaccaccattggtggacggctctcgagaacaacttcgtcctcgagtcctccgaggacgagtacggcggggtcgtcgtggacgccgacaggctgccgtccgacaaggccgccttcgcgcgctcgctcgcggcgtcactctcctactggaagtccgtgggaaagaaaggggtttggctaaagttaccagtggatcgctcagagtttgttcctatagcagtgaagaaaaagaaaggtgggggttttagtcagatatgcaatggtgattttgacattggaatttggaaagtaagtcaggagattgctgatggaaggtttcaagtaccaccatgccgagaagcatatgtgatgctgacatactggattcctcatgaagagccatgtatgctccctgcaaatgcatctcaccaggttggagttggggggtttgtgatcaacgatcaaatggaggtcctagtggtgcaagaaaagtactgtggttcatctttggatggtgcttggaaactccccacagggttcattcttgcgtcggaggaaatatttacaggagctactagagaagtcaaggaagaaactggggttgacactgaatttgtggacgttgttgcttttaggcatgcacacaacgtggcatttcagaagtccgacctgttcttcatctgcatgctaaggcctacatcaaacaatatcaaaatcgacgaaacagagattcaggcagcgaagtggatgccgctggaggagttcgtcaagcagccgttcatccagggggaccacatgttccagaagatcatggacatctgcatccagaggctcaggaagtgctactgcggcctgaccgcgcacaacgtcatctccaggttcgacggcaggaggtcgacgctgtactacaacgtttctgaacctgaggatgtgaactgcaatgcttcttg

SEQ ID NO: 3053 - DNA, 1467 bp, Oryza sativa
atggggcgtggccaattgctgtactacgctacactgtctgtattgctaacttcctcctttactgaaagtgttgcttcctacactgccattgcatataaattttgcactgcaagattaattcagtctgagagaacgagagagaacatcatgggtggcaagctgttgcctgctgcggcgttcgccgggtcggcgccgccgctgtcgcaggtggcaacgtcggcggcgcacggcgaggactcgccgtacttcgccgggtggaaggcctacgacgaggacccctaccacgccgtcgataaccccgacggcgtcatacagatgggcctcgccgagaaccaggtctccttcgacctcctcgaggcctacctccgtgaccacccggaggccgccggctggagcaccggcggcgccggcgccggtagcttcagggacaacgcgctgttccaggattaccatggcctcaagagcttcaggaaggcgatggcgagcttcatggggaagatacgcggcggcaaggcgaggtttgaccccgaccacatcgtgctcaccgccggcgccaccgccgccaacgagctcctcaccttcatcctcgccaaccccggcgacgccctgctcatccctaccccttactaccccgggtttgacagggacttgaggtggaggacgggggtgaacatcgtgccggtgcggtgcgacagcgcgaacgggttccaggtcacggtcgccgcgctccaggcggcgtacgacgaggccgccgcggcgcaagatgctcgacgacatcctcgacttcgtgtcgcgcaacgacatccacctcatctccgacgagatctactccggtccgtcttygccgcgccggacctcgtcagcgtggcggagctcgtcgaggcgcgcggcggcgacggcatcgccggccgcgtccacatcgtctacagcctttccaaggacctgggcctcccggggttccgcgtcggcgtggtctactcctacaacgacgccgtcgtgacggcggcgcggcggatgtcgagcttcacgctggtgtcgtcgcagacgcagaagacgctggcggcgatgctgtccgacgaggcgttcgccggggagtacatccgcaccaaccgccgccggctccgggagcggcacgagcacgtggtggccgggctggcgcgcgccggcgtgccgtgcctgcgcggcaatgctgggctgttcgtgtggatggacatgcggcggctgctgctcggcggcggcggcgtcggcggcgagctgaggctgtgggagaagctgctgcgccaggcgaagctgaacatctcgccggggtcgtcgtgccattgctcggaggccggctggttcagggtgtgcttcgccaacatgagcttggacacgctggatcttgcactccacaggataagccgcttcatggacacgtggaatggaacaaagcaacaagctagctgccagcagcaagaacagcaataa

SEQ ID NO: 3054 - DNA, 489 bp, Oryza sativa
atgcctgctcctgtagcgacatgcttcgtccctgccacatcgggcgtcaggtgcagggcattctccacgccgatcaccaattatagcgcacggggcgtcgtcgctgatcccccgaagctgctgagtcgtccggggaacctgcagctaacgtcgggcggcgcgcggttctccggcaggttcagggcgtccgcggcggccgtgcacaaggtgaagctcatcgggccggacggcgcggagagcgagctcgaggtgcccgaggacacctacgtcctcgacgccgccgaggaggccggcctggagctgccttactcgtgccgggccggctcgtgctccacgtgcgccggcaagctggcctccggcgaggtcgaccagtcggacgggtcgttcctggccgacgagcagatcgagcaggggtacgtgctcacgtgcatctcgtaccccaagtcggactgcgtcatctacacccacaaggaagaggaggtgcactag

SEQ ID NO: 3055 - DNA, 1143 bp, Oryza sativa
atggtgcacgcaccggcgaaagtggcagctgcggcggcgatcccgctgctgacgccgtacaagatggggcagctggagctctcccaccgtgtggtgctcgcgccgctcacgcggtgccgctcctacggcaacgtgccgcagccgcacgcggcggtgtactactcgcagcgggcgaccaggggckgcctcctcatcgcggaggccaccgacatctcccccaccgcgcagggctacccggagacccccggcatctacacgcagcagcagatcgaggcgtggaagcccatcgtcgacgccgtccaccgcaagggcgccctcttcttcctgcagatatggcacgtcggcagggtctccaccacagatttccagccgaatggacaggcgccgatctcaagcaccgacaagcagatcacaccggacgattcaggcatggtgtactccaagccccggcggctccggacggatgagatccctcagatcatcgacgacttcaggcgagccgcgcggaacgccatcgaggcggggttcgacggcgtggagattcatggcgcgcacggctacctcctggagcagttcatgaaggacagcgccaacgaccgcaccgacgagtacggtggcagcctcgagaaccggtgccgcttcgccgtcgaggtgatcgacgccgtcgtcgccgaggtgggagctcaccgtgtcggaatcagattatcgccgttcgtcgacttcatggactgcttcgactccgacccggtggctctcggctcatacatggtgcagcaactcaacaagcacccagggtttctctactgccacatggtggagccaagaatggccataatcgaaggacgaaggaagatcgcccatggcctcctaccattcaggaagcagttcaatggcactttcatcgctgctggcgggtatgaccgggaggaagggaacaaggtggtggctgatggctatgccgatctcgtcgcctatgggaggctcttcttggctaaccctgacttgccgaggaggtttgagcttgacgcaccattgaacaggtatgacaggtctaccttttatacacaggatcccgttgttggctatacagattacccttttcttgaggagattgatgaggagtcaagaactacttatgcttaa

SEQ ID NO: 3056 - DNA, 957 bp, Oryza sativa
atggggtcgctgatgtcctgcatctccgggcaggcaccgtcggcgtcgccgccgccggtggcaaagcggcggtcatccgtgtcgtcgcgccgcggcggcggcggcggaggcgccaaggcggtggccatcgacgaggaggcgctggcggcggcggcggcgctggtgctggggcagaggagctcgttcggcggaggcgggggtggaggccgaagcgcgttcgagcgtcggcgtcggtgcgggaaattttcttgtcgcgtgcattcattttttgtagagtttggacaaagggatttgaacactaaagatcttgaaaccaacatcattgttcttgttcatggaggaggttttggtgcttggtgttggtacaagactatagcacttcttgaggatagtgggttcagagtcaatgctattgacttaacaggttccgggattcattcgtatgatacaaacaagattagcagtctcacgcagtatgctgagccgcttacatcttaccttaaaagcctaggtgacaacgaaaaggtgattttggttggacatgattttggcggtgcttgtatatcctacgcaatggagatgtttccatcaaaagttgcgaaggctgtttccctttgtgcagcaatgctgaaaaatgggcatagtactcttgatatgtttcaacaacaggatgtatctttggcttcagtgtccatgagacctatcccctttgctcctgtgctggagaagctggtcctaacagaagagaagtacggatcggtgcggcgattctacgtcgaaaccacagaagacaatgccattccacttcatcttcagcaaggtatgtgcgacatgaacccgcccgagaaggttcttcggttgaaaggctcggatcatgccccattcttctccaagccacaagctctgcacaagacccttgtagagatagcaaccatgccaccagtcaaggcatcatga

SEQ ID NO: 3057 - DNA, 366 bp, Oryza sativa
atggggttgccggcgctggtgtgggacgagcgsgtggccgggtacgcgcggtggtacgcggagtcgcggcgcggcgactgcgcgctggtgcactcgtcggggccgtacggggagaacctgttctgggggagcggcacgggttggtcgccggcgcaggccgtgggcgcgtggctcgccgagcagccgcggtacaactactggagcaacagctgctacggcggcatgtgcgggcactacacccagatcatgtggcgcgccacgcgccgcgtcggctgcgccatggtcgcctgctacaacggcaggggcaccttcatcacctgcaactacgacccgcccggcaactacgtcggcatgcgcccctactga

SEQ ID NO: 3058 - DNA, 4836 bp, Oryza sativa
atggcctcgccggcgggggcaatcggcggcgcgtcgccgtcggggcgggtgctgggccctgcgctggaccggatcatcaagaacgcggcgtggcggaagcactcgggcctcgtggcggccgccaaggcggcgctcgacctgctctcctcgtcggcgggctcctccttggcgctcgagtcggcgtcccccaaggtcgccgacccggcgctcgaatgcgtcgccaagttgctctaccaccgcctcctcgtcggtgatctcggcggtggcggcggcgacgacgactccccgtcctccaagctgctcgccgccgtgctctcctgcggcgcgctcgccgacgacgccatggagctctccaccctccgcgtcctcgtggccgccgcgcggtgcccctccgtcgccatccgcggggaagggctcggccagatgctcaagacctgctacaacatatacctcagtagcagcagcggcgccaaccagctctgcgctaagctggcgctggcgcaggtgctggtgatcgtgttcgcgcgcgtggaggtggactccatggatgtgcgcgtgcgcacggtgtcgatcaccgacatgatggacatgtctgaccgcaacctgaatgactccagcattgtccatgcggcgcagagcttcataaacgagacgatggagggaagcgatgtccctgagccggggtccccggttgagccggccgagacggatgggaaggaggatgttgtcatgagcaagatcagggaggatgggttgacactgttcaagaacctgtgcaagctgtccatgaagttctcgacgccggataatcccgaagatcaggtcctgctgcgcgggaaggtgttgtctcttgagttgctcaagatggttatcgacaatgctggggcattctggagaacgaatgaaaagtaccttggagcaatcaagcagtatctttgtttgtccttgttgaagaacagtgccttgtcagcaatgagtatttaccaactgttatgctccatatttttgggtttgctgtcaagatttagatctgggctgaaagaggaaattggaatattttttcccatgcttgttctgagggttcttgagaatgtccatcaacctagctttctgcagaaaatgactgtactaaaccttttggagaagatctgtaaagactcccaggttattattgatgtctttgtgaactatgattgtgatgttgatgcaccaaatatctttgaaagattattagcagcaggtatgcatctatttagtggcctgattgtcaatgggcttttaaagactgctctaggggttcctcctggatctgcaacaacattaacccctgcacaagaccagacatttcggattgagtcagtcaagtgtcttgcaaccataataaaatcaatgggttcatggatggaccaacagctgaaaattggtgaattttcacccaaaccttctgaaatatctttaaattcgatagacattcctaacatccttgttggagaagatgggggtgctgttgattatgaactgcaaacagactctggtaacccagacctatctgacgcttcctcacttgagcagcgtcgtacttataaaatagaacttcagaaaggaatttccttgtttaacaggaagccttccaagggtattgattttctcattaaaagcaagaaaataggtcattccccagaagatgttgcttctttcttgagagatactgctggtttaaacgcaacaatgatcggggactatttgggtgaaagagatgaattccctatcaaagtaatgcatgcatatgcagatgcactgaacttcgaaggtatggactttggtgaagccattaggtattacttgcgaggtttcaggttgcctggagaagcgcaaaaaattgatcgaatcatggaaaagtttgctgaacgatactgcaaatgcaatccaaattcttttaccagtgcagatactgcatatgttcttgcttattctgtaattatgctcaataccgatgctcataatacgatggtcaaagataagatgtcgaagtctgatttcattcgcaataaccgaggaattgatgatgggaaggatttgcctgaacattatctgagtacattgtatgatcaaattgtcaaaaatgagataaaaatgagtgctgattcgtcagttccacaaagcaagcagcctagtagtgtaattaagctcttaggcttggataacattatcaaccttgtcaactggaaacaggctgaagacaaggcacttggagcaaacgacttactcattaagaacatacaggagaaattcaaagcaaagagtgggaaatcagaatctatatttcatgttattactgattctaccattttaagattcatgatggagacacagcgagatgcctttgtgacatctgttgccaaattcacttacctccattgtgctgcggacatgaaacaaaagaatgtggatgctgtgaaggctataatatccatcgcaattgaagatggtgactatttgcaggattcctgggagcatgtactaacatgtctttcacggtttgagcatctacatctccttggagagggggcacctactgatgcttcatttttgacagtgcctctggttgagtcagaagataaaacacagaagtcaagtagcactacagcttcgaagcgaactaatgctcttcagaatccagctgtaatggctgccgtcagagggggttcttacgacagcacaacagctaaaaataatgcctcaccattggttactcctgaacagataaatagcttcatatcaaacataaatttgttagaccagattggcatttttgaattaaatcatatatttgctcatagccagagattaaatagtgatgccattgttgcttttgtgaaagctctttgtaaagtttcgatgacagagttgcactcacctacagaacctcgcatcttctgcctaacaaagattgtggagattgcgcattacaatatgaaccgcatacgtctggtgtggtctcatatttggaaagttttatcagacttctttgtgtctgtgggatcgtcagaaaatctctcagttgcaatatttgttatggactctttgaggcaactagcgatgaagtttctggaaagagaggaactggcaaattacaattttcagaatgaattcctgcgaccttttgcagttgttatgcagaagagcaatgcttcggaagtacgggaacttgtcgttcgttgcatctcccaaatggttttgagtcgtgttaacaatataaaatccggatggaaaagtgtttttacggtttttactgctgctgctgctgatgatcgaaaaagtattgtgctgttggcatttgaaaccatggaaaagattgttcgggactattttccatacataactgagactgaaaccacaacatttactgattgtgttaaatgtcttattacattcacgagcagtaaatttagcagtgatgccagtctcaatgctattgcatttcttcggttctgtgctgttaaacttgccgaggaaggatttgtttgtcatgaaaaggatacagatcaccagtcaaataacttagatgtttctgatgggaatgccactctgcacaaggacgatcatgtttatttctgggttcctctgcttgccggtctagctaggttgacaactgacacaagaccaacaatcagaaaaggtgcagtagaggtactctttgacattttgaaggatcatgggcacctcttctcgcagtccttttggagaaatatctttgaatctgttgtttatcctctatttagcactggtagctctacaccaaatgggcacattaatctaactgaggatgactcttggaattctgaaactaaaacagtagcagtcaagtgtttagtggatttgtacattaccttttttgatgagatgcggacagaactttctagagttacttctgttgtcacaaactttatcagaagtccttataaacagtctgctagcacaggtttatctgtttttcagcgtttaacagaaggacttgaaagcagactctccaaggaggaatggaaagagatcttgttatgttttaaagactcagcaatgcaaacatttgtcgtgtttgacaagatagttaggatgatgcaagatatagaaattccagatagaaatgaatcttatcctgaagttgaacgatattcagataatgacatatacaatgatgatgaagaggaagctaatatggaaacaacatcatacgctattattaaattgaagaatcatatggcgcagcagctcttagttgttcagggcatagttaaattgtatgagacacacaggtggtctttttatgctgagcatatgggaataattttagagacactatcagccattgcgtcacatgcaagtgaagtgtctgagccagcagtcattcatttcgagaatgagtcttaccagagctatctcaaacttctgcaagctttggttcatgaccacccatcaatctcagaagatatgaaaattgagtcacatattatgcttgtttctgagaaaatactacggaagtatctcaaatgtgcagggcgtgaacgatctaacgattcatctggtagagatccagcattacgctggaaactgcctttgggcactgctaagaaggaggaactgtctgctagaacttcattggtccttcatgtgatgcagttattgggtggcctagagagggactgctttaggagaaacctgcccctgtttttccccttattaactaacctcattcgctgtgagcatagctctggagaagttcagcttgcactgtatgatatattccagtcatcgataggccctataatatcaacatag

SEQ ID NO: 3059 - DNA, 1680 bp, Oryza sativa
atgtctgcggcgcacctcctccgccactcccgcaagctgcggactctacgtgatgctctagattatgatcggtctgctcttgtacgctacttctccgstgcttctgcatcctttcccacaaagggaggtgctgctgctggtgttgagaaaagaattggtggcgccagattccctcagtgcaagcagcctgggaaagagcttgagaccttcaaggtgtcactaggaggactaaatggaagatatgcttgtagaagagcacctaacaattgtatcccaaccactattaccggtctcaacggttcattgtcatgtggacaggtgtcttcagcaagatctttctcaagcagtgcagacctgccaccacatcaggaaattgggatgccatcactctctcctacaatgactgaggggaacattgcaaggtggctgaagaaggaaggagataaggtctcacctggtgaagttctctgtgaggtggagacggataaagccactgtagagatggagtgcatggaagagggctatctcgctaagatcattcatggagatggtgccaaagagatcaaagttggtgagatcattgctgtaactgtggaagaagagggtgaccttgagaagtttaaggattataaaccttcaacttcagctgcacctgcagccccttctgaaccgaaggctcagcctgagcctgcagagccaaaggtgaaggagacagagccttccaggactcctgagccgaaagccccaaagactgaagaagcttctcaaccagggggtcgaatattctccagccctcttgcaagaaaattggcagaagataacaatgttccactgtcaagcgtaatgggaactggtcctgatgggcgaattttgaaggcggacattgaagattacttggcttctgtagcaaagggtggcaaaagggaagctcttgcggctccagggttaagttacactgatgttcctaatactcagataagaaaggttactgcaaaccgcctgctaagctctaaacaaactattcctcattattacttgacagttgacgcccgtgttgataatcttatcaagttgcgaggggaactgaatccgttgcaagagtcatctggcggtaagaagatatctattaacgatcttgttataaaggctgcagctctggctcttcgaaaggtccctcagtgtaatagctcgtggatgagtgattttatccgccaataccacaacgtgaacatcaatgttgctgtacagactgagcatgggttgtttgttccagtaattaggacaagaaggggacttggtacaattgctgaggaggtgaagcaggtggctcaaagagcaagggataacagctttaaaacctggaagattatgaggtatatggatcgcatgggaggcacattcaccatatcaaacctaggaggtcctttcggaatcaaacaattctgtgccatcataaatcctcctcagtcagcaatcttggccattggtactgataaaacttctgctaagaagctgagaagaggggtgatacctggcagcgtagacggccagtatgagtttggttccttcatgtcggcaacaatgagctgtgatcacagggttattgatggtgctatcggcgcagaatttctgaaagcattcaagggctatatcgagaatccaaactcaatgttactgtga

SEQ ID NO: 3060 - DNA, 1005 bp, Oryza sativa
atggcggcggcggcttcggtggtggtgttgtgcgcgctggtcgtcctcgcggcggcggggggcgcgagcgcttggccggtgatgagcccgtcgtactacgaggcgtcgtgcccaagcgtgtacgacatcgtgcggcgcgtcgtccaggatgcgcgctgcaccgacccgcgcgcccccgccagcctcctccgcctccacttccacgactgcttcgtcaatgggtgtgacgggtcgctgctgctcgacgacttcggcgcgatgcagagcgagaagaacgcgcccccgaacaaagggtcggcgcgtgggttcgacgtggtggacggcatcaaggctgccctggagaacgcctgccccggcgtcgtctcctgcgccgacatcctcgccctcgccgccgagatctccgtcgagctgtcaggagggccgagctggaacgtgatgctggggaggagggacggcacggcggcgaacttcgagggcgccagagacctccccggaccgacggacgatctggacctcctgagacggaaattctccgaattcaacctcgacgacaccgacttcgtcgctctccagggcgcgcacaccatcgggagggcgcagtgcaggttcttccacgaccggctctacaacatcagcggcacggagcagccggaccagacgctggacatggcctacctcaacgagctccggcagagctgcccggcgagcgaccccgaaagcgcggcgctgcgcaacctcgacccgcccacgccggacgcgttcgacaatagctactacggcaacctcctgcgcaaccgcggcctgctccagtccgaccaggggatgctctccgcgccgggcggcgccgcctcgaccaccgcgcccatcgtcgtgtggttcgccggtagccaggacgacttcttcaggagcttcgcgacggcgatggtcaagatgggcaacatcagcccgctcaccgggagcatgggggagatcaggaggaactgcagggtggtcaaccgcggctga

SEQ ID NO: 3061 - DNA, 2799 bp, Oryza sativa
atggtgatagcttctggagccattgacaggaggcacctgtcgccattcaccccaacttcagacgactcctcatcttcattcttctctcaggaccttgtccctacagagaggcaagttggattttggaattcagagtcaatggtggatcacaaagggagcaagtcagtttttgcttctccacttgaaaagatccaacccaatggagcaaatcatgcaggagatccggaaactccaggaggtcaagccttcaagggcctggacatccttagcctcagcaatttgatgcggcaagaaaatgcttcaggttcaccgtcactttcttggggtgagatcctcacaaaccccatatcgaggcttggcttgtctacaagagaaacagcttttgttgaaccaactactgctgatcaacatgtgcctggttatgggaagggactttcatccagctccctctctgaagtattcagtggcaaatcgagagaaatagtaagtggtgttctttgtcaatctactgggacacatacctccatctacgacagtgatgaacctctagagtccatggaagcgatagaagctcaaactattggagatctccttcctgatgatgatgatgatttaatatcaggtattgccgatggatttgaatttactggcatgtcgaccaaccaggatgatgccgatgaagatatattctgcactggaggaggaatggaacttgaaaacaatgattccgtaaaaggtgacaaagttcaggatggatccttcaagagccaaatttcttcaggacactccatcaataaacaaccttcccgaactcttgtagtcagaaatattactgctaacatcgaggattctgatctgacggttctgtttcagcaatacggggacattcgcatgctctatacctccttcaagcaccatgggtttgtaactgtttcttattatgacataagagcagcccaaaatgcaatgagagcgctgcatagcaagcctctggggctgatgaaacttgatgtgcaattttcttttcctaaggaaaatgttccaggcaaggatattgataagggaatgttggtggtatctaacattgattcttccatctccaatgatgatcttctccaaatgctcagtgtttatggtgatgtaaaggagatttccagctctcctataagctgcaccaagaagtttgtagagttctatgatgttagagcagcagaagaagcactacatgaccttaataaggttggaatttcaggcccaaagttcaaggttgaacttagccaacatggagaggcaggatcttgcttgaggcagcaacattctagagaatggaagcaagacagtttgcctcaccaacctaaaaactcttcacctgggaccattggaaagttgggcaccaaatgtcaggacaacagcactgttcataatttattttctccagttaaccaacaattggagagcccaacccagtgcatctctacgactggtcctcaaattttatcttcacctatcagaattaaatctacacttcagcacaataatcaagcctctgttggcgatcttagtggacctcttggtcaaggaaactttggacgtggaatacaaaccctccacccacgctcattgccagagcatcacaaccgcatttgtaataactctaagtccatgacacatttggctttactgaaattggaagttgcccccttcatggatatcactacacctggaaccacacaaatgtttttccacaaagtccctcagctccaatactgtggtcgaacttgcagcacccaatgcacgtgcatagttatcctgcatcacttgggttcagctcctgacaatggaggcagttttggaaatgtgcactcttttcatccaggatctctcggaagcataggtttgcatggtagccctcagttatatccatcagaattatctgcctttgcatccagcagaggaaattttagggaggccttgttctccccagttggcggtggatttcaatcccttcagcaaatgtgcaatgcaatcaatggtcggaatcctatgatccatgtttccacttcatacgatgctactaatgatcggatgaggagtcgcagacatgatggaaatcctgcacagtctgaaaacaaacggcaatttgagcttgacattgatcgcatagcaaagggtgaagattcacgcaccaccctgatgatcaagaacataccaaacaagtacaactgtaagctgcttttggctgtcattgatgagaaccaccgtggaacctacgatttcatctatctcccaattgattttaaggtctactttttttttcttagtgtaaaagattgcaactgtgagtacaatttcaggactgacttttgcaatgttcacttttctcagaacaaatgtaatgtggggtatgcttttatcaatatgactgatccgcagcacataatcccattctataagacatttaatggcaagaaatgggagaaattcaatagtgaaaaggtggcgtcgctcgcatacgcccggattcaaggaaggagtgctttgattgctcattttcagaattctagcctgatgaatgaagacaaatggtgtcgacctatgcttttccacaaagatggtccaaatgcaggagatcaggagccttttcctgtggggaacaatgtccggtctagggctgggagaaataggtcgctcatcagcttggacactaaagatgcaagtccatcaagctccccagaccaagaaagcaattctgtcggcaccgcgaactcaacttgccgtacgaccttggagcaaacctaa

SEQ ID NO: 3062 - DNA, 4359 bp, Oryza sativa
atggagcagtcgcggcagttcttccgcacgcctcctgaccgcagccgcgtgcggaaaacgggcttcgtcgaggtccgctcgttctggaacatttaccggagcttcgacaggctgtgggtgatgctggtgctctacatgcaggccgcagccatcgtggcgtgggaagtgaggggctgccgtggaggagtctgggcgctactggatattggtacacagctccggcgtgctttcagggatggccgcatgcttgctgtgcgcatggtgctcaaggccattgtggcagctggctgggttgtggcgtttgcgatcttgtacaaggaagcctggaacaacaggaacagcaattcacagattatgagattcctgtatgcagcagcagtgtttatgatcccagaggtccttgccattgtgctatttattgtgccgtgggtgcggaatgcattggagaagacaaactggaagatatgttatgctcttacatggtggtttcagagccgaagttttgttggccgcggtttgcgtkagggcacctttgataatgtcaatttgcgtgagggcacctttgataatgtcaagtattctgtcttctgggtgcttctgcttgctgtaaagtttgcgttcagctattttctccagatcaggcctctcgtgaaacctacacaggaaatatataagttgaaaaagattgattacgcttggcatgagttctttggcaagagcaaccgatttgctgtgtttgtattgtggcttcctgtggtgttgatctatctcatggatatccaaatttggtatgctatcttctcttcactgacgggtgcatttgtggggctatttgcacatctgggggagatcagggacatgaaacagctgcgtcttcggttccagttctttgcaagtgcaatgtcattcaacattatgccagaggaacagcaggtgaatgaacgcagtttcttgcccaaccggcttcgaaatttctggcagaggctacagctacgttatggcttcagtcgatcattccggaaaatcgagtcaaatcaggtggaggcacggagattcgctcttgtttggaatgagataattactaagttccgggaggaggacattgttggtgatcgcgaagttgagcttcttgagctcccacctgagctgtggaatgtgcgtgtaatccgctggccatgtttcttgctctgtaatgagctatcacttgcacttggtcaggcaaaggaggtaaaaggacctgatcgcaagctttggaggaagatctgcaagaacgattatcgtagatgtgcagtgattgaggtatatgatagtgcaaagtacttactgcttaagataatcaaggatgatactgaggatcatgggattgtgacacaattgttccatgagtttgatgaatccatgagcatggagaagttcactgtggagtacaagatgtctgtactgccaaatgtgcatgcaaagcttgttgctatattgagcttacttctgaagcctgagaaggacattaccaagattgtcaatgctctgcagactctctatgatgttctgattcgtgacttccaggctgagaaaaggagcatggaacaactgaggaatgaaggtttagcacagtcaaggcctacgaggcttctcttcgtggacactattgttctgcctgatgaagagaagaaccccaccttctataaacaagtaaggcgcatgcacacaatcctgacctcaagggattctatgatcaatgtcccaaagaaccttgaagctcgtcgaaggattgctttcttcagtaattcgttgttcatgaacataccacgggccacccaggtggagaagatgatggccttcagcgtcttgacgccatactacaatgaagaggtgttgtacagcaaggaccagctctataaggagaatgaagatggcatctcaatcctgtactatctgcaacaaatctatcctgatgaatgggagttctttgtagaacgtatgaagcgtgaggggatgtctaatatcaaggagctgtacagtgagaagcagaggctgagagatctccggcactgggtttcatacagggggcagacactatcacgtactgtgaggggaatgatgtactactatgaagctctcaagatgctgacatttcttgattctgcatctgaacatgacttacggactggatcccgggagcttgctactatgggctcatcaaggataggatcttcgagacgggaagtgggttctgatgggtcaggatattacagcaggacatcttcgtcacgtgcattgagcagggcaagcagtagtatttacgagctaatgaagaattatgaagcactacgtgttgcctatgttgatgaaaagaactccaatggtggtgaaacagaatatttctctgtccttgtgaaatatgatcagcaactgcagcgggaggttgagatttatcgtgttaagttgcctggaccactgaagcttggtgaaggcaaaccagagaaccaaaatcatgcactcatcttcacaaggggtgatgctgtccaaactattgatatgaaccaagacaactattttgaagaagctctcaagatgagaaatctgctagaggagttcaatcgccattatggaattcgcaagccaaaaatccttggggttcgggaacatgttttcactggttctgtgtcttctctagcttggttcatgtctgcccaggaaacaagttttgttactctggggcagcgtgttctggcagatccactgaaggtccgaatgcattatggccatccagatgtctttgatcgtctttggttcttgggacgaggtggtatcagtaaagcatcaagagttataaacatcagtgaggatatatttgctgggttcaattgtaccctccgtgggggtaatgttacacaccatgaatacatccaggttggtaaaggaagggatgtggggctcaatcaggtttcatgttttgaagccaaggttgctagtggcaacggtgagcaaactttgagcagagacgtttatagactggggcacagattggaattcyttcggatgctctcttccttttatacaaccatcgggttttatttcaacacaatgatggtggtgctaacagtctatgcatttgtatgggggcgcttttatctcgcactgagtggtcttgaggctttcatcagcagcaatactaactccacaaataatgcagcgctaggagctgtccttaatcagcagtttgtcatacaactaggcattttcactgcactgcccatgataattgaaaactcacttgaacatgggttcctcactgcagtttgggatttcataaaaatgcaattgcagtttgcatctgttttctacaccttctcgatgggaacgaagacacattattatgggcggacaattcttcatggaggtgcaaaatatcgagccactggccgtggttttgttgtggagcacaaaaaatttgcagaaaattataggctgtatgctcgtagccacttcatcaaagcaatagagcttggtgtgatattgactctttatgcttcttatggtagcagctctgggaacacattagtgtacatcctgctgacaatttccagttggtttctagttctttcgtggattcttgctccattcatttttaatccttcaggattggattggctgaagaattttaatgattttgaggatttcctaaactggatttggttccggggtggaatctcagtgaagtcagatcaaagctgggagaagtggtgggaagaagaaactgatcatcttcggacaactggtctgtttgggagcatattggaaatcatattggaccttcggtttttcttctttcaatatgcaattgtttatcggctacacattgccggtacaagcaaaagcatccttgtctaccttctttcctgggcatgtgtcctgctggcttttgtggctcttgtgacagttgcttactttcgcgacaaatattcagcaaagaagcacatacgttaccggcttgtccaggctattattgttggtgcaacggtggctgctattgttctgttgttagaattcacaaagttccaattcattgatacctttaccagccttttggcttttcttccgactggctggggaatcatatctattgctctggtattcaagccttatctgaggaggtctgagatggtctggagaagtgtggttactttggcacgcctatatgatataatgtttggagtaattgttatggcaccagtagctgtgttgtcatggctgcctggactccaggagatgcagacgaggatcctgttcaatgaagcatttagtaggggactacatatttcccaaatcattactggaaaaaaatcacatggagtttga

SEQ ID NO: 3063 - DNA, 1220 bp, Oryza sativa
atggagtccctcctcgccgcctcttcctctctccccgcggccgccttctcgccgccgtcgtccctctcttcgacctcctcgtcgccgcacgccctacggtcggccgtcgccggagccgcccgcgcggattcgatcctgtacgcgctggagcacgacgagatgtttaactcggcggaggtgatccagtgggagagcggcaagtccatcaactccatcgccgccgcgcagggcatccgcatccgccgccgctgccgcccacgctacccctccgagggctccggcgccgacaaagccgtcccccgcaacatgctcgagcagatcatctgggacaaagaggtcgaggtgtcccagaggaaggcgaagaagccgctgcagaaggtgatcgagtcgagccagcacgcgccaccggccagggacttcgtcggcgcgctaacggcggcctacagccgcaacgtcgcgccggcgctgatcgccgaggtgaagaaggcgtcgccgagcagaggcgtgctccgggaggacttcaatccggttgagatcgcgcaatcctatgagaagaacggcgcggcttgcctcagtatcctgaccgacgaaaaacactttcagggtagctttgagaatctcgagaccgttcgcaattccggagtaaagtgccctcttctttgcaaggagtttgtgatagatatctggcaaatctattacgctcggtcaaagggtgcggatgcaattctgttgattgctgccgtgttacctgatctcgacatcaagtacatgcttcgcatctgcaagaacctcggaatgacagctctcatagaggttcatgatgagagggagctggatcgtgtgctcaaaatagatggcgttcagcttatcggcatcaataaccgaagtttaggtatggtcattatcatttcttgcaaatgtctccaatcatttgagacgttaagaatcatagttgacattgatgtatactggaatttcgttattatagagacgtttaaggttgatacttcaaacacaaagaccctgttggagaaacgtggtgacctcataagggataaagggattctggttgttggtgaatctggtcttttcacgcctgatgatgttgcatacgtgcagaatgctggtgtttctgcaattttggtaggagagtccctggtgaaacaggaaaatcccgggcaagccattgctggactatatggaaaggatcttttgcactg

SEQ ID NO: 3064 - DNA, 1850 bp, Oryza sativa
atgttggagaagaaggcgacgaggagtactagggtggatggggtgagcggcgaggcggtgatcgaggagttcgagcgggtgacgcgcgacgcggccaatgtgcagcgggagacgctgcggcggatcctcgccgagaacggcggcgtcgagtacctccgggggctgggcctcgccggcgccaccgacccggccaccttccgcgcgcgcgtcccgctcgccacccacgccgacctcgagccctacattgaccgcatcgccgacggcracgcttcccccgtcctcaccgccaagcccgccacctccatctccctcaggtcagtgtccccgcccgccgccgcttgctgctctttgacctcgatcgagaacgtcgctgaccatggcggggatcacctcaccgccggtgcatgcagctccggcacgacgcaggggaagcgcaagtacctgctattcaacgaggagctcgtcaagtccacgatgcagatataccggatctcctacgcgttccggaacagggagtttccggtggagaacgggaaggcgctgcagttcatctacagcagcagggagacgaggacgaagggggggcttacggcgacgacggcgacgacgaacgtgtaccggagcgaggagttcaaggcgacgatgagggacatccagtcgcagtgctgcagccccgacgaggtgatcttcggcccggacttcgcgcagtcgctctactgccacctcctcgccggcctcctcgccgccggcgacgtgcagatcgtgtccgccaccttcgcccacagcgtcgtcctcgcgttccagacgttcgagcgcgcctgggaggacctctgcgccgacatccgccgcggcgaggtgtcgccgtcgcgggtcacctcgccggccgtccgccgcgccatggcggcgctcctcgccgcgcccaacccgggcctcgccgacgaggtcgcccgcaagtgcgccgccctgagcaactggtacggcgtcatcccggcgctgtggcccaacgccaggtacgtgtacggcatcatgacggggtccatggagcactacgccggcggcctgccgcttgtygccgccgagtacggcgcctccgaggggtgggtcggcgccaacgtcgagcccgggacgccgccggagcgcgccaccttcaccgtgctccccgacatcgcctacttcgagttcatccccctcaagcccgtcgccggcgacggcggctacgccgaggcggagcccgtcggcctcacggaggtcgccgccggcgagctctacgaggtcgtcatgaccaccttcgcagggctttaccggtatcggctgggggacgtggtgaaggtggcagggttctacaacgcgacgcccaagctcaagttcgtgtgcaggaggaacctgatgctgtcgatcaacatcgacaagaacagcgagcaggacctgcagctggcggtggacgcggcggcgagggcggtgctcgccggcgagaagctggaggtggtggactacaccagccacgccgacgtgtcgtcggacccgggccactacgtcgtcttcctggagctcaacgccgccgaccccgccgccgtcgacggcgacgtgatgcaggcctgctgcgacgagctggacagggcgttcgccgacgccggctacgtcgggtcgaggaagtccggcgccatcgccccgctcgagctccgcgtgctgcagcgtggaaccttccagaaggttctccgccactacctctccctcggcgcccccgtcagccagttcaagtccccccgctgcgtctcccgctccaactccggcgtcctccagatcctcgccggctgcaccgtcaacgtcttcttcagctccgcctacgactg

SEQ ID NO: 3065 - DNA, 705 bp, Oryza sativa
atggccgcggaggtcgccgccggcggcgactccggctggagcagcggcagcgcgacgttctacggcggcagcgacgcgtcggggacgatgggtggcgcgtgcgggtacggcaacctgtacagcgccgggtacgggacgagcacggcggcgctgagcacggcgctgttcaacaacgggcagagctgcggcgcgtgcttcgaggtccggtgcggcggcggcggcagctgcctcgccggcaccgtggcggtgacggccaccaacctytgcccgcccaactacgcgctcgccggcgacgccggcgggtggtgcaacccgccgcggccgcacttcgacatggcggagccggcgttcaccaggatcgcgcaggcccgcgccggcgtggtgccggtgcagtaccggcgcgtggcgtgcgcgaagcagggcggcatccggttcaccatcaccggccactcctacttcaacctggtgctcgtcaccaacgtcggcggcgccggcgacgtgacggcggtgtcggtgaaggggtcgcggtcggggtggcaggccatgagccacaactggggcgccaactggcagaacggcgccaacctcgacggccagccgctctccttcagggtcaccgccagcgacggccgcaccgtcacctccgacaacgtcgccccctccggctggtccttcggccagaccttctccggcggccagttctag

SEQ ID NO: 3066 - DNA, 1788 bp, Oryza sativa
atggccgcgccggggccggggtgggtggtgccgccgccgccgcagccgcagccgcagcagcagcagcaggcggtggtggtggacggccgggacggcctcgtcgcgtggctgcgcggcgagttcgcggcggccaacgccatcatcgacctcctcctcgcccacgcccgcgacgccgccgatcccgccgggttcgacgccgttgccgccgccgtccagcgcaggcggcaccactgggcccccgtcctccacctccagcattacttccccgtcaccgaggtcgccctcgcgcttcaccacgccgccgcgcgccaggggccgccgcctcctcctccgccgccgcgccccccgagcggtagcgccggtgccgagggagatgatgctgcgattgccagtggaggtgtgaaggaagtggagacatcggctgaagcaactcagaattctcagttggtttctcatatttcacatgctacagaagcccaacctcagaaaggacttcatgtaatcagtaatgtggttccagtcccaacttgctttgtggttaatgaagtaattgatggcaggatggtgaatgttctagaggggcttaagttgtataaagggtatgtagatctaactgagataggaaaggttctttcttttgtgaatgaagctaagactatgcggcgtaaaccaggactggaagggcaaacagttgtagttgccaaaaggccaatgaagggtcatggaagagaaattattcagcttggtcttcccatcacagaaggccctcctgaagatgaacatttaagagaggtaaaggtggatcctattcctggtgtgcttcaaaatctgtttgatagcttggttcatcagaaagttgtcccttccagtccagattactgtgttatcgatatcttcaatgagggagattattctcaccctcatcatcatcctccttggtatggtagacccatttgtacactctgcctgactgactgcgacatggtatttggccatgttattgcagcagatagccgaggcgatcatgcaggtccactgaaactctcactctctacagggtctgttctagtttttgagggaaagagcgctgatatagcaaaacgggcactccctgctacaagtaagcagcgtatcttactaagttttgggaagtctgtgtcaaggaagcacgttcagtcggaaagcagcttgcttatcactcccccattgacacctcctccgatgccttgggctgcaccattgaggccagggaacatagcaattcatccctcaagtcctaaacagcttgtctacaaccctagcaatagagtacctgcagtttcaacccctggacttcaccatattccatccaatggcatccagacagttttcgttgcaccacttcctatcactccaaaagctgttccatttgcatcagctgtcacattgccaaacagtacagccgcatggatcgcagaagctgctcccaggcccgcttcacctcgtttacctcttcagggtacaggggtattccttcctcctggatcaggcaatccacccccagctcagaagttgggcgtaaaacatgctgatgctaaaccattttttccacaagaatcatctgcctcttcatctggtgtaagtgctcgtgcacataaggctaatggtagtgtttcttccaaaccaacaaggaaagatgatatggctgaagctaagccaaagtgcaatgggagttcagatggtggtagctctgttgcccatgccaaggcaactggaggtttagaggagcagaatgttgtcgcaaagtag

SEQ ID NO: 3067 - DNA, 1008 bp, Oryza sativa
atggctgttgcactcgcgctcttggctgccatgtcggcgctctcgtcgtgcacaagtccggccaccgcagagctcacacggcacgagcacccggtggccgccggcgcgccgctgcgcctcctcgtcgtcggcgactggggccggaagggcggctacaaccagacaagagttgcagaacagatggggaaggttgcggaggagacggagatcgacttcgtcgtgtcaaccggcgacaacttcttggagaacggcctcgccggcgtcgacgacatggcgttccatgactccttcatggatgtctacacggctcagagcttgcacaagccatggtaccttgttcttggaaaccatgactacaggggaaatgtgctagcacagattgacccagctctgaggaagatcgacagcaggttcatctgcatgagatccttcattgtcagtgcaggaattgtcgatttcttctttgtcgacacgaccccgtttcagctccagtactggactgatcctggagaagatcactatgactggaggggagtcgcgcctcgggatgcgtacatcgccaatctcctcgaggatgttgatgctgcaatgaagaaatcaactgcaacatggaagatagctgtaggacatcataccatgaggagtgtgagtgcccatggagacacccaggagctccttgagcttctccttcctgtcctcaaggaaaacggtgtcgatttctacatcaatgggcatgatcactgcctggagcacatcagcagcagaaacagtccaattcagtacttcactagtggaggcggatcaaaggcatggagaggcatttttcaacaaaacgaagacaagctccagttcttctatgatggacaagggttcctgtcacttgagctcagtgagaaccgagctcgattcgccttctacgacgttttcggtgaagctttgtaccactggagcttcagcaaagctaatctgcagaaggttcagtcctctgctagtgtaactgaagaatga

SEQ ID NO: 3068 - DNA, 1623 bp, Oryza sativa
atggatttcgagctgcgcaaggcgcgggagaagctggagcgggagcagcgggagcgcgtgcagcgcgccaaggacaaggccgaccgcgagcgccgcgccaaggccgaggccgcgcgccgccgcgacgcgctcgaggcgtcccaccgcgagcgccgcctcgacgccgcccgcgcgcaggaagaggctcagcagaagatggaagaggtgatgcaacttggaaaggggatttctttcttgcacatgtttgaagctcttcgatatgatggttgtcaaaggttagagacagtgttccgggtgcccctcaggataatgatgcccsatgaggcaacatgttgtggtgttcttgagttcactgcaagggaaggctccgcagaactcactccacatgtgtggaacaatctgttccggggtgatagcccagatgttcctctgattgaggttaggtatgtcagtttacccaaagggacatatgcgaagctgaagccagaaggagtggggttctcagaccttcctaaccatagggctgtccttgaaacggcactccgcaatcatgcaacactatctgaaaatgattttgttgtggtgaattatgggcagctgcaatacaagttgaaggttcttgaattaaaacctgcatcaagtgtttctgtcctggagacagatgtggaagttgacattgaaggaccagattcagttttggacaacgtagagaatcaacatgtgcttgtgccacttgagactggaaaggttgaatctggagttgtggaagaaggaaagtttaggtactacaaatttcttgttgatgaaggtatgggtgagaaagtagcttctaggcatgcaaatattgaggttaagatagagacatatacaagtggtggtgacactgatatttatgtatcaaggcatcctttagttttcccaactcagcaccgtcacgaatggtcttctcatgaaatgggatctaaggtcctcatactgaaaccaagggatgccagtctctccagtggtacctacagtattggagtttatggtttcaagggaaccactaaataccaactttctgtagctattaaagatgttcttaatggccaaaggattggtgagcaggctagtgcctcatctagtgttgatgttgattcagtggtgtgcaagaactgcaaacgctatatatccaaccgaacttcactacttcatgaagcatactgtgtgagacacaatgttgtttgcatgcatgatgggtgtggtgttgttcttcgaaaggaggaagcaacagatcacgtgcattgcaacaagtgtgggcaagctttccagcagagagaaatggagaagcacatgaaagttttccatgagccactacaatgcccttgtggggtggtccttgaaaaggaagatatggttcaacaccaatcctcaacctgccctttgcgcttgattgtgtgccgattttgtggtgacactgttcaagctggtggagaaccacttgatgctcgggatcggcttcgcaacatgtgtgagcacgagagtatcygtggatccmggactggaccatgggattcttgtggacggtcagtcatgctgaaggacatggamattcawgkgawtgctgtgsatyagaagrgstaa

SEQ ID NO: 3069 - DNA, 948 bp, Oryza sativa
atgggcggcgactggcaggagcttgcccaggcggcggtaatcggcctcctcttcgccttcctcgtcgccaagctcatctccacggtcatcgccttcaaggaggacaacctccgaatcacccgctccacgccgacctccccctccgccgcggacacccccgccgccccggccccacctccggcctccctcgacggcggccatggggacaccagcgacggcagcggcagcgacagcgacagcgactgggagggcgtggagagcacggagctcgacgaggagttcagcgccgcctccgcgttcgtcgccgcctccgctgcgtctggcacgagcgtccccgagcaagcccagcttcagctctatgggctctacaagatcgccaccgaggggccctgcaccgcgccgcagccgtccgccctcaagctcaaggcccgcgccaagtggaatgcttggcataaattgggtgctatgccgacagaagaagctatgcagaagtacatcacagttgtggatgagctattccctaactggagcatgggttcgagcacgaaaaggaaagatgaagataccacagtatctgcttcaagttcgaagggaccaatgggacctgtatttagcagtttaatgtatgaggaggaagatcagggaaatgactctgaacttggcgatatccatgtttcagcaagggaaggagcaattgatgacatagcgaagcatctggctgctggtgtagaagtcaacatgagagtgcattctagtagaattcacgcgctgataaagttggacaatgaaggacaaacagcgcttcactatgctgtcctctgtgagcgagaagatattgctgagttgcttgtcaagcatcatgctgatgttcaaatcaaggatgaggatgggaacacggtgcgggagttatgcccttcaagctggtcttttatgaacctggcaaactga

SEQ ID NO: 3070 - DNA, 1323 bp, Oryza sativa
atggagtcggcgacggagaaggtgaggaggacgccctcctcctgcctgctgctgcgcatctccgacatctgcaaggtgcgctccgtcggcgtcgcgccgaccgtccgcgaaaagcccaaggccgacggcagcgccaccggagagagcagcgaagacggcggcgcgcacctgaaagtccacccgcatcatgtgtccgaccatgagagcgtctctgaatgctcctctgctcgctgcgaggaagcgtttgttgagaggcttctcgacgcgatttctggcctcaaattgagttacgtgaaccttcagcaagctcttgtgccatatgatcctgaagagattacgatcgctgatgagcgattcacatcggagcttcaagagactgccgggttgaaggatctgtatgtcaacatgaacaaatggagaaatccaatgtaccagtgctatgtgggctctagaattcaggagcaacaaaagttggccgtggagttgcaagctggcatgtgcaagagagactctgagattgtgtgtttgcgagcggagttggatgaactggaaaggaagaacatggaactggaggagaagatcggtcaaagtgcgttacagaaagaaggaagttttgcaattgggatgggagtatcaacggatatgtttatggaattattcgagctttcgacaaagtctatccatgattttgcaaaactcgtcgtccgttggatgaaactttctcggtggaatcttggcaacttaacatccccaatagacaattctgttgtctatgataaaaggtctcacaagaattacgccgttgaggcctactttgcttgtatgatgttgatggggcacaaagaggagtacctttcgctggatgtcttcgattatgtaatgagtttcagtgatccttttgatgctcttatgaaggccccagactcttgttttgggagattctgtcgagaaaagtatctggccattttgcctcctagtatggaggattcattcttcggaaatttggatcatagatcatttgttgagaatggcggccatccaagaacaccattttatcaggcatttgtgacaatgtcaagatatgtatgggcgtccctaaccgtagcacgttctctgaatccaagagcagagatgttctatgtcaagggtggtactgaatttaggagtaaacacatggaatgtgttccatccaagataaccaaagaaggagacaagatgcagggtgtatctgtccatggtcaacgaaagaaacttctgaacacgtcatatagctacagaattagtcgttcaggtctgttaagtcattgctttgttcgtgagtaa

SEQ ID NO: 3071 - DNA, 753 bp, Oryza sativa
atggagcgggcggcaggcggcgtgtcgtaccagcggttcccgcgggtgcggatccgcgagctgaaggacgactacgccaagttcgagctccgcgacaccgacgccagcatggccaacgccctccgccgcgtcatgatcgccgaggtccccaccgtcgccatcgacctcgtcgagatcgaggtcaactcctccgtcctcaacgacgagttcatcgcccaccgcctcggcctcatccccctcacctccgccgccgccatggccatgcgcttctcccgcgactgcgacgcctgcgacggcgacggctcctgcgagtactgctccgtcgagttccacctcgccgcccgcgccaccgactccgaccagaccctcgaggtcacctccaacgacctccgctccaccgaccccaaggtctgccccgtcgaccaggctagggcctaccagcacgccctcggcggaactgaacccttcgacaccgccgctgctgctgaccagaggggcatactaattgtaaagctgcgtcggggccaagagctcaggctccgagcaattgctaggaagggaattggcaaggaccatgccaagtggtcccccgccgctactgtgactttcatgtatgagcctgaaatacgtatcaatgaagaactcatggaaacattgacactcgaggaaaaacgaaatttggtggagagtagccctacaaaagtgttcaacattgatcccaacactcaacagtctgttactactgagtcttag

SEQ ID NO: 3072 - DNA, 777 bp, Oryza sativa
atggcacccacgccgttgttcctcctcctgctgctcaccggcgttacggcggagccggcgcacccgggctacgcggagggcgatggcagcagctgcgacgtggcggcggtagcggtggcagagaggcgagaggagttcgacggcgggcggatcgtggacatcagccactactaccgggaggagatgccggagtgggagtcggcggacggcaccggcggcgggttcctgcggctggtgcggtcgatgcgcaacggctccgacatcgccaacttctccgagctccgcctcacggcgcactccggcacgcacgtcgacgcgccgggccacgtcttcgaccactactaccacgctggcttcgacgtcgacacgctcgacctcgccatcctcaacggaccagcgttgttggtcgatgttcctagggatagcaacataacagctaacgttatggaatccttgcatattcccaaaggagttcggcgagttctctttcgaactttaaatacagacaggaagcttatgtggaagaaagaatttgatacaagctatgttggtttcatgaaagatggtgctcaatggttgattgataacacagacattagactagttggcgttgactacttgtcagtcggagcgtttgatgaatgcattcctgctcatttagtttttcttgagaaaagagaagtcatccttgtggaagccttacatttagagcatgttaccccaggaatatataccttgcattgcttgccactaaggttacgtggttctgaaggttaa

SEQ ID NO: 3073 - DNA, 804 bp, Oryza sativa
atgggcgaaatccacgcgctccgcaacatggacgacgacgaggtcttcgcctacgccaagcgcatcgccgcgccctacaacctcgtcatgcagaccaagcagctgggccgcctccccgtcgtgcagttcgcggccggcggcgtcgccacacccgccgatgccgccctcatgatgcagctcggctgcgacggcgtcttcgtcgcctcgggcatcttcaagagcggcgaccccgcgcgccgcgcccgcgccatcgtgcagtccgtcacccactgcaggtcgtcgcgtccaagcacgttgccgcctcgtcgtccttgctggcacacyttcgccgtggagctctgcccgaataggtacatggtgatggaggcattcatcgatacggcaggcaaggaccagtccgaccctctcattctcacccagctcaatagtaccaaagctatcagagacagcatccagatcaactttggggagtgtggcctagcagcttgtcttgggtcgttgcaaggtatttatgagctctattcatctatagtgaagtatgtaaatccgataacgaagctttgcgtgatccgagtttcccgtgaagatcaccagaaagtgtgggctgctatcaccatggtgaggagcattgggaaaatcccagtttcattcaatctgcgggatgtgagtggaagtatcagggcttgcaagaaggctgcgttggagtgtgaagaagcaaagtttgagtattacaagctggctgctggtgatcgtatcacgcccaagttcgtggagaccatggagagctgttttaacaaagattaa

SEQ ID NO: 3074 - DNA, 1926 bp, Oryza sativa
atgtactcggcgaaccactggggcgggtcgttcgagatcgccgcggacggcgcggcggaggatgaccacagccgcaacatggacctggaccgcggcgcgctgtcggcgcggcagcaccagctggacgagacgcagcagagctggctgctcggcccgccggaggccaagaagaaggacaagtacgtcgacctcggctgcgtcgtcgtcaagcgcaagctcctctggtgggtcctctggaccctcctcgccgccttcatcctcatcggcctccccgtcatcatcgccaagtccatccccaagaagaagccccacgcccttccccccgaccagtacaccgacgccctccacaaggccctcctcttcttcaacgcccagaaatcccttctttctctgacgaacaattttggccatgtctcgttctctgctctgacagccggccggctcccgaagaacaacggcatcaaatggcgcggcaactccggcctgtcggatggctccgatctgacggacgtcaagggcgggctcgtcggcggctactacgacgccggcgacaacatcaagttccatttccccttggccttctccatgacaatgctcagctggtcagtgatcgagtacagcgccaagtacaaggcggtaggggagtatgaccatgtgagggagctcatcaagtggggcaccgactacctgctcctcaccttcaactcctctgcttccaccattgacaaagtctatagccaggtgggcattgcgaagatcaacggcacccagccggacgaccactactgctggaaccggccggaggacatggcgtacccacgccccgtccagacggccggctcggcgccggacctcggcggcgagatggcggcggcgctcgcggcggcctccatcgtgttccgcgacaacgccgcctactccaagaagctcgtgaacggcgcggccgccgtgtacaagttcgcgcgcagcagcggccgccgcaccccgtactcccgcggcaaccagtacatcgagtactactacaactccaccagctactgggacgagtacatgtggagcgcggcgtggatgtactacgccacggggaacaacacctacatcaccttcgccaccgacccgcggctgcccaagaacgccaaggccttctacagcatcctcgacttctccgtcttcagctgggacaacaagctgccgggcgccgagctgctgctgtcgcggctccgcatgttcctcaacccgggttacccctacgaggagtcgctcatcgggtaccacaacaccaccagcatgaacatgtgcacctacttcccgcgcttcggcgccttcaacttcaccaagggtgggctcgcgcagttcaaccacgggaagggccagccgctgcagtacaccgtcgccaactccttcctcgccgcgctctacgccgactacatggagtccgtcaacgtccccggctggtactgcggcccctacttcatgaccgtcgacgatctccgctccttcgccaggtctcaggtgaactacattcttggggataacccgaagaagatgagctacgtggtggggtacggcaagaagtacccgcggcggctgcaccacaggggggcgtcgacgccgcacaacggcatcaagtactcgtgcaccggcgggtacaagtggagggacaccaagggggccgacccgaacgtgctcgtcggcgccatggtcggcgggccggacaagaacgaccagttcaaggacgcgcgcctmacctacgcgcagaacgagccgacgttggtgggcaacgccggcctcgtggccgccctcgtcgccctcaccaacagcggccgcggcgcgggcgtcaccgccgtcgacaagaacaccatgttctccgccgtgccgcccatgttcccggccacgccgccgccgccgtccaagtggaagccgtga

SEQ ID NO: 3075 - DNA, 2763 bp, Oryza sativa
atgaggggaggggcggggatgtgtttcgcgagcatggaggcggcggggagcagggggatggggaagggggcgagtaggaggaggacggcgaggtcgacggcgccggtgggcgcgctggtggagcgggtggtggtggcgccggcgccggtggagcagcagcgcggggcggggcggccggaggcgcacccgcagagcgtggcggccagggccgtggtgaccgtgcggcggaggcgcaaggaggacgccaaggaccgcttcgccgagcagctcgacgccctcgccgacagggtcggccgcagcgtcctcctcgagctcgtcagcacggacggagaccgacccaatagtacgaggcatcgatcgaaattaatcaggctattatcgatcggaattgatcatgtgatgcacgcattgatcgagctgagtgggacgccgaagaagagcaagccgtcggcgctggtggggtggttcgacaagaaggacgtcaaggcggagcgcgtggtgtacacggcggagttcgccgtcgacgccgggttcggcgagccgggcgcggtgaccgtgctcaaccgccaccagcgggagttctacatcgagagcatcgtcgtcgaggggttcccgaccggcccggcgcacttcacctgcaactcgtgggtgcagcccacgcgcgtgagccgcgaccggcgcgtgttcttcagcaaccggccgtacctgccgtcggagacgccgccggggctgagggagctccggctccgggagctcgccgacctccgcggcgacggcaccggcgagcggaggatcaccgaccgggtgtacgactacgacgtgtacaacgacctgggcaacccggacaagggcgtcgcctccgcccgccccgtcctcggcggcgagcagatgccgtacccgcggcggatgcgcaccggccacgcgagcgcggagagcagggtggagtacccggagcccatctacgtgtcgcgggacgaggagttcgaggagggcaagaacgagatgctgtcggagggcgcgatcaaggcgctgctccacaacttcatgccgctgctcgtctcctccgtctcgccggacatccgcgacttcgccggcttccacgacgtcgacaacctcttcaaggagggcctccgcctcaagcaggcgctccacgaccagctcttccagaagatccccttcgtccgcaagatccaggagaacagcgagggcctcctccgctacgacacccccgacatcatcaagaaggacaagttcgcgtggctgcgtgacgacgagttcgcgaggcaggcgcttgccggcatcaaccccgtcaacatcgagcgtctccaggcgttcccgccggtgagcaagctcgacccggccgtgtacggcccgccggagtcggcgatcacggaggagcacatcatcgggcacctcgacggcatgtcggtgcaggaggcggtggaggggagcaggctgtacatgctggattaccacgacatcttcctcccgttcctggacaggatmaacgcccaggacggccggaaggcgtacggcacgcgcgcggtcttcttcctgacggccgccggcacgctgaagccgatcgccatcgagctgtgcctgccgccgatgacagacggctgcaagcgcgccaagcgggtgttcacgccgccggccgacgccaccagcaactggctgtggcagctcgccaaggcacacgtctgctccaacgacgccggtgttcaccagctcatcaaccactggttgaggacgcacgcgtgcatggagccgttcatcatcgcggcgcaccggcagatgagcgcgatgcaccccatcttcaagctgctcaagccgcacatgcggtacacgctcaagatcaacgcgctggcgcggcagatcctcatcaatggcgacggcgtcatcgagtcgggcttcacacccggcaacgtctgcatggagatgagcgccttcgcctaccgggaactatggcggctggaccaggagggcctccccgccgacctcatccgaagaggcatggccgtggaggacccgagccagccgcacgggctacggctgctcatcgaggactacccgtacgccgccgacgggctgctcctctggtcggcgatctcgcggtggtgcgaggcgtacgtggcggcctactacccgagcgacgaggccgtgcaggcggactacgagctgcagtcgtggtacgccgaggccgtgcagagcgggcacgcggacaagcgcggcgcgccgtggtggccgggccttttgacgcccggggacctggcctccctgctcamcaccctggtgtggctctgctcggcgcagcacgcggcgctcaacttcgggcagtacccgctcggtggctacatcccgaaccgcccgccgctgatgcgccgcctggtgcccgccgagggcgacccagagtacgcgcacctcgtcgccgacccgcaccgcttcttcctctcggcgctgcccagcctgacgcagaccacgacgttcatgaccgtcatcgacacgctgtccacgcactccgccgacgaggagtacctcggggagcgccccgacgaggcgtggacggccgacccggcggcgctggcggccgcgcgggagttcgcggccgacgtgcgccgcgccgaggaggagatcgagcggcgcaatgccgacccctcccggcgcaaccgttgcggcgccggcgtgctgccgtacgagctgatggcgccgtcgtccggaccgggcatcacctgccggggcgtgccaaacagcgtaactatatag

SEQ ID NO: 3076 - DNA, 1455 bp, Oryza sativa
atggcgctgtcgacggcgcagacaggggagtcgatgcactcctcgacgttcgcgtcgcggtacgtgcgcacggcgctgccgaggttcaggatgccggagaagtcgatccccaaggacgcggcgtaccagatcatcaacgacgagctgatgctcgacggcaacccgcgcctgaacctggcgtccttcgtcaccacgtggatggagcccgagtgcgacaagctcatgatggccgccatcaacaagaactacgtcgacatggatgagtaccccgtcaccaccgagctccagaaccggtgcgtgaacatgatcgcgcatctgttcaacgcgccgatcggggacgacgagacggcggtcggggtgggcacggtggggtcgtcggaggccatcatgctggcggggctggcgttcaagaggaagtggcagaacaggatgaaggccgaggggaagccccacgacaagcccaacatcgtgacgggggccaacgtgcaggtgtgctgggagaagttcgcgcgctacttcgaggtggagctcaaggaggtgaagctgacccaagggtactacgtgatgaacccggagaaggccgtggagatggtcgacgagaacaccatctgcgtcgccgccatcctcggctccaccctcaacggcgagttcgaggacgtcaagatgctcaacgacctcctcaccgccaagaacgccgagacagggtggaacacgccgatccatgtggacgcggcgagcggcgggttcatcgcgccgttcatctacccggagctggagtgggacttccggctgccgctggtgaagagcatcaacgtcagcggccacaagtacgggctcgtctacgccggcgtcgggtgggtcatctggcgcaacaaggaggacctccccgatgagctcatcttccacatcaactacctcggcgccgaccagccaaccttcacgctcaacttctccaaaggatcgaaccagataattgcgcagtattaccagctcattcgtctcggattcgaggggtacaaggacatcatgcagaactgccgggacaacgcgacggtgctccgggaggggatcgagaagacgggccacttcgacgtggtgtccaaggactccggcgtgccgctggtggccttctccctcaaggactcgtcgcggtacacggtgttcgaggtggccgagagcctccgccgcttcggctggatcgtgccggcgtacaccatgcccgccgacgctgagcacgtcgccgtgatgcgcgtcgtcatccgcgaggacttcagccgcggcctcgccgagcgcctcatcaccgacctcaccaagacggtggccgatatggacgcccacgccgtcaagaaggccgccgccgagccggccaagaagaccgtgcgggagatagagaaggaggtgaccacctactggcggagtttcgtcgccaggaagaagagcagcctcgtctgctga

SEQ ID NO: 3077 - DNA, 996 bp, Oryza sativa
atggcggcggtaccggaggtggccctgcggcacggcgccgggaggcccatgccggcggtcggcgtgggcacggcggattcggcggcgacgtcgccggagacgaaaaggggcgccgcgctggcggcgctggaggtgggcttccgccacttcgacaccgcggcgctgtacggcacggaggcgccgctcggcgaggccatcgcggaggcgacccgccgcggcctcgtcgcctcccgggaggaggtgttcgtgaccaccaagctgtggtgcacccagtgccacccgggcctcgtgctcccgtccctccgcgaaagcctccggaacctgcagatggagtacgtcgacctgtacctggtccactggccgatcagcgtcaagcccgggccaccgatgttaccggtgaagagagaggacgccgtgccgttcgacttcgagggcgtgtggcgcgcgatggaggagtgccaccgcctcggcctcgccaaggccatcggcgtcagcaacttcaccaccaaacacctcgacaagctgcttgccgtggccaccatcccccctgccgtcaaccaggtggagatgaacccggtgtggcagcagaggacggtgagggagtactgcgccgcgaagggcatccgcgtcgcggcctactcgccgttgggtgggcagaactggataggcgaaggcaacgacgtgatggaatccccggtgctcgcggacatcgccagggccagaggcaagagcatcgcacaggggcggatccagatcccgggccaggtgtcattgagatggattcatgagcaaggagtgaccccaatccccaagagctacaacaaggagaggctgaaacagaatcttgagatattcgactgggagctgaccaaggaagaccgtctcaagatcagccagatcccgcagaaaaagatcgtcacggctgcacgaatgttctctccggatggtgagttcgcgtcggttgatctatcagacatggaaattgtggaggagtag

SEQ ID NO: 3078 - DNA, 972 bp, Oryza sativa
atggcgttccactacccggaccacggcctcgccatggacccgtcctccgccgcggcgtcgtcgcccaaccctagcttctcccccggaggcggggscsgggscggggtcgggggaggggagagggagaaggcggccgtcgcggcgcacccgctctacgagcgcctgctcgaggcgcacgtcgcctgcctccgcgtcgccacccccgtggaccagctcccccgcatcgacgcgcagatcgccgcgcgccggcttcccttggcagccgcctcggccgccgccgccgccggttggcccctccgggtggcgaggagctcgacctcttcatggttacgcttctccggctcccagggcccctccttatgcccctttccgcgtgcagaattttctgctgcaggtcggggaaamggcgatgggaggaaaagaaatggacaattaagtttgtttggattatctgcaataagatttttcaattgctttgctattgtatggactttatatggtagtagtagtagggcatctcctggtgaagggactggagcgactatgtctgatgatgaagataaccaagtggacagtgaagccaacatgtttgatggaaatgatgggtcagacggcatgggctttggtcccttaatgctgaccgagggtgaaagatccttggttgagcgtgtacggcatgagctgaagaacgagcttaagcaggggtacaaagaaaagcttgtggatattagggaagagatccttcgcaagcggagagctggtaaacttcctggtgatactgcatctatactaaaagcttggtggcaagctcattctaagtggccatacccaactgaagacgacaaggcccgcctggtgcaggaaacggggttacaactgaagcaaatcaacaattggttcattaaccaacgcaaacgaaactggcatagcaacccagcatcctctggtgaaaagaccaagaagaaaaggtaa

SEQ ID NO: 3079 - DNA, 1296 bp, Oryza sativa
atgggcgggtgcttgtccggcgacgtgcgcggcggcatggaggccgtgggcgggagcggcggccgcggggcggcagggaccggaggaggaggggragragggscgggscaggscgscggggcaaacgaggcggtggaccacttcttcaacgccgccggcctccgcggcctctactcgcctctcgagctatccttttcagcatcaaagttgcggaatatggatgctttttccaaggctacaataagttaccaatttgagattatacagccgcttgtattcaagatatatgacatcgacacaaggtaccataacacgccagtcaagacactgaacttggctcagcaagattttcttggagaagcatgctgcaatttgtcagaggataacccattgctagttgagtgttttgattttgattcaagtggtgaccacgaacttattgggaccttccagacaactatcactcaacttgagaatgtatataattcaaagtctggagcaaattttttcagccataagggacagaaaaagttgaagggacaattgtttgtggataagttccaggaaaaagttcaacatactttcttggactacatttccagtggttttgagctaaattttatggtggctgtagatttcacgggggttggcgaagttctgcagttttatgacaatgataggcgattcccggcatggggttttggagcgaagacaccacagggctacatatcccactgttttaatctgaatgcaactaccaatgattgcgaggtcgtcggagttgaaggcatcatgtcagcatacacctctaccctttacagtgtcacccttgctgggccaactctgtttgggccaattatcaacaaagctgccgagattgccagccactcccttcaatacggaaacaacaaatactttgtcctactcatcatcacggatggagttctcactgacattcaagaaacaaaagattctatcgtgagggcatccgatctgccattgtcaatcctcatcgtgggcgttggaaatgctgatttcaagcaaatggagatcctggatggagataacggcaagcggctggagagctcgaccggcaggatcgcgacgcgggacatcgtccagttcgtccccatgagggatgtccaaggcgggcagatctccgtcgtccagtcgctgctggaggagctccctggccagttcctggcctacatgcgcagccgggacatcaagccgcgagccccgctgcagcacgacaacgcctcttccgctccgcccctttaccctccaaccaagtga

SEQ ID NO: 3080 - DNA, 1173 bp, Oryza sativa
atggccagcaatggcatggcgtcctccccttcctccttcttccctccgaacttcctcctccacatggcgcagcagcaagcggcgccgcctcacgacccgcaagaacaccaccaccaccaccaccatggccaccatggccaccaccatgagcagcagcagcagcagcagcatcaccaccacctgggtcctcctccgccgccgccaccgcacccgcacaacccgttcttgccgtcctccgctcaatgcccgtccctccaagaattccgaggcatggcgccaatgctggggaagcggccgatgtcgtacggcgacggcggcggcggcggcgacgaggtgaacggcggcggcgaggacgagctgtcggacgacgggtcgcaggccggggagaagaagcggcggctgaacgtggagcaggtgcggacgctggagaagaacttcgagctcgggaacaagctggagccggagcggaagatgcagctcgcccgcgcgctcgggctgcagccgcgtcaggtggccatctggttccagaaccgccgcgcgaggtggaagacgaagcagctggagaaggactacgacgcgctcaagcgccagctcgacgccgtcaaggccgagaacgacgcgctcctcaaccacaacaagaagctccaagccgaggaacggagatccatgtgggtttcagtgttggcagaaaggttgttggaatcggtgcctttctcaccaccacgaatagtggcgctgaaggggagggaggcggcgtcggagctgataaacctgaacaaggagacggaggcgtcgtgcagcaaccgcagcgagaatagctccgagatcaacctcgacatctcgcgcacgccgccgcccgacgccgccgcgctcgacaccgccccgaccgcgcaccaccaccaccatggcggcggcggcggcggcggcggcggtggcggcatgatcccgttctacacctccatcgcccgccccgccagcggcggcggcgtcgacatcgaccagctcctccacagctcgtcgggcggcgccggcggacccaagatggagcaccacggcggcggcggcaatgtgcaggcggcgtccgtcgacacggccagcttcggcaacctgctctgcggcgtcgacgagccgccgccgttctggccatggcccgatcaccagcacttccactga

SEQ ID NO: 3081 - DNA, 1497 bp, Oryza sativa
atggcgacgaccgcgaccctccccttctcctgctcctccaccctccaaaccctaacccgcaccatccccctccgcctccgcctccaccgccgccgcttcctccaccacctcccctccctcgctgccctcccgaggctcccgctcccgcgacctcccctcctcccccacgcgcgccgccacgtctcggcgtccgcggcgcccaacggcgcgtcctccgagggggagtacgactacgacctcttcaccatcggcgccgggagcggcggggtccgggcctcgcgcttcgcctccacgctctacggcgcccgcgccgccgtctgcgagatgcccttcgccaccgtcgcctcggacgacctcggtggagtcggcggcacatgtgtgcttcgtgggtgtgttccaaagaaattattagtgtatggatccaagtactctcatgagtttgaagagtctcatggctttgggtgggtgtatgaaactgatccaaagcatgactggaacactctgattgccaacaaaaatacagagctgcagcgccttgttggcatttacaagaatattttaaacaactcaggagttactctaattgaaggccgtggaaagatagttgatccacatactgtaagtgtagatggaaagctctacactgctaggaacatacttatagctgttggtgggcgaccatcgatgccaaatatcccaggaatagagcatgttatagattctgatgctgcactggatctaccttcaaaacctgagaaaattgcaatagtgggaggtggatatattgctctggagtttgctggaattttcaatggcttaaaaagtgaggtacatgtgtttattcggcagaagaaagttttaagagggtttgatgaagaggtcagagatttcatcgctgaacagatgtctctaaggggcatcacatttcatactgaacagagtcctcaagctataaccaaatcaaatgatggtttgctatctctgaagacaaacaaagaaactattggtgggttctcacatgttatgttcgcaacaggtcgtaaaccaaacacaaagaaccttggactagaggaggttggggtgaaattggacaagaacggagcaataatggttgatgagtattctcgaacctcagttgattcaatttgggcagtgggagatgttactgatagggtcaacctgacaccagttgcacttatggaaggtggtgcatttgcaaaaacagtgtttggtgatgaacctaccaaaccagattacagagctgtaccatctgccgttttctcccaaccacccatcggacaagttggtcttactgaagagcagggagttgcaattgctgttaaagctgggctgacaaagcaagattttgatgccactattggcattcacccaacatctgcagaggaatttgtcacaatgagaaatgcaactagaaaagttcggagaagcacaacagatgaggtagaatctaaagataaggttgttactcagaactag

SEQ ID NO: 3082 - DNA, 1560 bp, Oryza sativa
atgctttcccggattctgcatggctatggaggacacggcgggagaggcttcgagcagacgtaccggtgctactcggcggcggccttcaacaagccgcagctcgaaggcggagacaaggtgatcatgccggcgtcggcgctccaccgcctcgcctccctccacatcgactacccgatgctgttcgagctctcccaccacggcgacgccgccgcccaccgggtcacccactgcggcgtgctggagttcgtcgccgacgagggcacggtgatcatgccgcggtggatgatgcgcggcatgcgcctcgacgacggcggcctcgtcgtcgtcaggagcgccagcctccccaagggcagctacgccaagctgcagcctcacaccggcgacttcctcgacacggcgaaccccaaggccgtcctggagaagacgctgcgcagcttcacctgcctcaccaccggcgacaccatcatggtggcctacaacaacaaggagttcctcatcgacatcgtcgagacgaagcccgcctcggccgtctgcatcatcgagacggattgcgaggtcgatttcgcacctccactcgattacaaagaacctgaaaaggttcagcagaaaccatctgttccttcaagcaaggcggcttccgaagatcaagatcaaatcaaagatgagccagaattcagagcattcactggttcagggaatcgtttggatggtaaggcctcaaaaccgctagcagcagggatctcttctaatcctgctgctgcaagttctgcaatttcagactcgaacaagaaggtgaatcaggagacagcagcatcaggagttagcaactctacacgtcagaaaaaggggaagcttgtttttggttcaaacaaaagcagcagcagcagcaaagaaccagagaaggctcctcctgttaaagttgatgaacttgcaaagaaggaagagcccaagttccaagcattttctgggacgagctactcgttgaaacgcaatcgcgataaagtgtcacaccttttggagattaccaagtgccaaaggagaaggctgcaacttgaagaaatgcttgttcctgcgataaatggtactctgaatgtgctgaaatcttgcaagaagaatccatttctgaaaagggttgttcttacatcctcatcatccacggtaagaatcagggatgagagtaaacatccagaaatctcactggatgaaacaatatggagctctgtggcactctgtgaaaagctacagctatggtatgccctggcaaagatatctgcagagaaagcggcatgggagtttgccaaggagaacaacattgaccttgtaactgttcttccatcatttgtgattgggcccagtttatcacatggaactgtctgtcactgcttcagacatccttggcttacttcaagcttgaggaacccatatgagaaacagtcatatgagctaaacacatccaagatccagcagctgggtttcaagttcaaaggggtgcaagagatgtttggtgattgtgtcgagtcgctgaaagatcagggacacttgctggagtgcccgttgtaa

SEQ ID NO: 3083 - DNA, 2643 bp, Oryza sativa
atggcgaaggcggcggagaagctggtggtggaggtggtggcggcgcacaacctcatgcccaaggacgggcaggggtcctcgtcggcaggcggcggacgcgtgccaggcccaaggagctcaaccccgtctggaacgagcgcctcgtcttcgccgttgccgaccccgacgatctcccctaaccgcgccatcgacgtcggcgtytacaacgaccgcgccgcgtccgggggggtcgccggcggcggcggggcggcgccgcacggccgcaacttcctcggcaaggtccgcgtcccggccgccggcgtgccggcccccggggaggaggtggtgccgcagctcttcacgcttgagaagcgcagcctgttctcccacatccgcggcgagatcaccttgaagatttatcgcaccaactccggggaggttgtcgtcaagtccaagccggagaagccggtgaaggcggtggtgtcgggcccggaggtggtggccgcgccgccggtcaccgggcccaagaagcagcagcagcagcagccggtggtggccgtgcagccgccgcctccgcagccggaggcgcccatggacatcctgccgcccccggccccgtgttcgccttcttccaaggagaccatccagtcctcgttcgtcgaggtgttcgtgcgcgcgcgcggcagcgacgaccacgtcggccgcgtctggttcgacctctccgaggtgccgcgccgagctccaccggacagcacgctcgcgccgcagtggcacatcatggaggaccgcaagggcgagcgcggcgccgcggaggtgatgatcgccgtctggttcggcacccaggccgacgaggccttcgccgaggcctggcattctaaggcggccggcgtccatggctacggaccattgggctccatcaagtccaaggtgtacgttgcccccaagctgtggtaccttcgtgtgtccgtcattgaggcgcaggacttgatccctatggacaagggaccaatggcgattggccggtatccggagctctttgtgcgtgcgcaggttgggagtcaaatgctgcgcacacggcctgcgccagtggcggcgaatcgaggaccatcaagcccgttctggaatgaagacctgatgtttgtggttgctgagccatttgaggagttcttggtgttgtctctggaggatcatgtgtcaccaggaagggatgatgtgcttggccgtcttgttgttccagtatcctccattgagaggcgctgggatgagaagcttgttgtctccaggtggtttgggctggatcgtggcactggtggtggcaatgttgcaagtggcaatacaaataggtttgggagccgtgtgcatctccgcttaagtcttgatgggggataccatgttctggatgaggctactgcttacagcagcgatctccggcctactggaaagcagctgtggcagccacatgttggggtgcttgagctcggtgtgcttggtgcgactggattgataccgatgaaggcccgtgatggcagaggtgcaacctcggatgcatactgtgttgcaaagtatggccagaagtggatccgcactcgtactgtcgtcgactctgtatgccctcggtggaatgagcagtacacatgggaggtgtttgacccttgcactgtcatcacggttggtgtgtttgacaattgccatgttgacaagccagcttctgggrataycacattggctgtccgtgataattgcattggcaaagtacgtatccggctttcaacattggagactgatagggtgtatacacatgcctacccacttctcatgctgcatccatcaggggtcaagaagatgggagagcttcacttagctgtgcgcttctgctgtggcaatgctggcaacatgttccatgcctatgtgcgtccgctgcttccaaagatgcactatattgagccactgcttgtgcgccaggttgagagcctccgctttcaggctaccaatgttgtagcagctcgccttggccgtgctgagccaccacttggcagagaggttgttgagtacatgctagaccaccgttcacatctatggagtatgagacgcagcaaagcaaactttttccgccttgtcactgtactctctggaccgatcactattggcagatggtttgaacttgtccgctcttggaatcgcccggtgcattcatgccttgctgtattcacattcctggtgtttgtcacaatgccggagctgattcttccgacggcattcttggcaatggcattcactgggttatggaggtaccgtgtccgctcaaggcacccgccccacatggagatgaggttgtctcatgcagacgcagccactgtggatgagctagatgaggagtttgacacattcccttcgagcaggggagatgttgtgcgcttcaggtatgaccgccttcgcagcgttgctgggagggtgcagacagtggttggcgacatagcaacacagggtgagcgaatgcaggcccttctcagctggcgtgacccgagggcaacagtgcttttctcgatcgcctgtgtccttgctgcggtcattgcatataccattccgatgaaggtgctggttgggctctggggcctgtatggctatgcgtccgccagattccgcagcaggatgccatctcgctga

SEQ ID NO: 3084 - DNA, 1047 bp, Oryza sativa
atggcggacgcggcgtcgtcttcggcgtcggcgtcggcggcggtggcggggacgctgccggtggcggcggcggcgacggggaaggacaaggaggaccggcgccgattggtggggaggtgcggcttcgcggtcgtcggcatcatgagcaccctcctcatctacggccttctccagatattgatcaactcactggtactgagattggaaaaaatcatgagagttccatatggagcagaaaaggagttcttcagatactcgctttttcttgttttctgtaaccgtatcaccacgtctacggtgtctgcgctggtgctaacggcaagtaagaaatccctggaccctgtggctccacttcagaagtactgtgtggtctctgtatcaaacatactgactacaacttgccaatatgaggcactcaagtatgtgagcttccctgtccaaacacttgccaaatgtgcaaagatgatacctgtgatgatttggggcacaattataatgaggaagaagtacggtggaaaagattacttctttgcagttgtcgtgactgttggttgctcgttgttcattctatacccagcatcaatggatgccagtccattcaacagaggcagagaaaacactatttggggcgtttcactcatgcttggttatcttggatttgatggtttcacaagcaccttccaagataaactctttaaagggtatgacatggaaatacacaatcaaatattctacacgacaatgtgctcctgtgttcttagtttgagcggacttattctccagaatcagatgattccagctgtggactttatgtttcgtcatccagattgcttctacgacgtcataatcctatccagtgttgcaacagctagtcagttcttcatatcgtacaccatacgaacatttggggctctcacatttgctacgataatgacgactagacagctggccattgtattcggagccctgtacacaaaaagcttcttgagaagtaaaccgcagaagccagccgctgcaaacccgtcgaattctgctaacaacagctga

SEQ ID NO: 3085 - DNA, 1743 bp, Oryza sativa
atgggagaggttgcagaagacatctacacccaagatggcaccgtggacgtcaagggcaacccggccaccaagaagaacaccggcaactggcgtgcctgcccctacatcctcgctaacgagtgctgcgagaggctggcctactatggcatgagcaccaacctcgtgaactacatgaagacgcggctcgggcaggagagcgccattgccgccaacaatgtcaccaactggtcggggacttgctacatcaccccccttctcggtgccttcttggctgatgcctacatgggcaggttctggaccattgccagcttcatgatcatctacatcctgggtttggcgttgctgacaatggcgtcgtcggtgaaggggctggtgccggcgtgcgacggaggagcgtgtcacccgacggaggcgcagacgggggtggtgttcttggcgctgtacctgatagcgctgggcaccggcgggatcaagccgtgcgtgtcgtcgtttggcgcggaccagttcgacgagaacgacgagggggagaagcggagcaagagcagcttcttcaactggttctacttctccatcaacatcggcgcgctggtggcgtcgtcggtgctggtgtacgtgcagacgcacgtcgggtgggggtgggggttcggcatcccggccgtcgtcatggccgtcgccgtcgccagcttcttcgtcggcacgccgctgtacaggcaccagcggcccgggggcagcccgctgacgaggatcgcgcaggtgctcgtcgcgtcggcgaggaagtggggcgtcgaggtccccgccgacgggtcgcggctgcacgagacgctcgacagggagtccggcatcgagggcagccgcaagctggagcacaccgggcagttcgcgtgcctcgacagggcggcggtggagacgccggaggacaggtcggcggcgaacgcgtcggcgtggcggctgtgcacggtgacgcaggtggaggagctgaagagcgtggtgcggctgctgccgatctgggcgagcgggatcgtgttcgcgacggtgtacgggcagatgagcaccatgttcgtcctccaggggaacacgctcgacgccagcatggggccgcacttctccatcccggcggcgtcgctctccatcttcgacaccctcagcgtcatcgtctgggtgccggtgtacgaccgcctcatcgtgccggcggtgcgcgccgtgacggggcgcccacgcgggttcacccagctgcagcggatgggcatcggcctcgtcatctccgtcttctccatgctcgccgccggcgtgctcgacgtcgtcaggctgcgcgccatcgctcgccacgggctctacggcgacaaggacgtcgtgcccatctccatcttctggcaggtgccgcagtacttcatcatcggcgccgccgaggtgttcacgttcgtcgggcagctggagttcttctacgaccaggctcccgacgccatgcgcagcatgtgctcggcgctgtcgctcaccaccgtcgcgctaggcaactacctcagcacgctgctcgtgaccatcgttacccatgtcaccacccggaacggcgccgtcgggtggatcccggacaacctcaaccgcggccacctcgactacttcttctggctgctcgccgtgctcagcctcatcaacttcggcgtctacctcgtcatcgccagctggtacacctacaagaagacggcggattcaccggacgacaaggccgagcacgccggagcaaactga

SEQ ID NO: 3086 - DNA, 2090 bp, Oryza sativa
atggcgaggagcgggagggagcgtagagatcaggaggaggaggcggcggtggtgtcggtggagcgggtgttcgaggggagggtggtgccggggtggaaggagcaggtgacgctgcgggcgctggcggtgagcgcgctgctgggcgccatgttcagcgtgatcgtgatgaagctgaacctgacgacggggatcatcccctcgctcaacgtctccgcggggctcctcggcttcttcctcctcacgtcgtggaccaagctcctcgacaaggccggcgtcgccagcgtccgccccttcacccgccaggagaacaccgtcgtccagacctgcgtcgtcgcctgctccggcatcgccttcagcgatgctgatctatgcactggtggtacagggggttttggcagctacatattcgcgatgagcgacaggatcagcgaccagtcaggcgaggccagggacgagcacaacatcaagaaccccagcttgggctggatgattggattcctcttcattgtcagcttcctgggcctcttctcagttgtgccactcaggaagataatgatcatcgattacaagctcatatacccgagtggcactgcaaccgcacatctcatcaacagcttccacactccccagggtgcaaagcttgccaagatgcaggtcaaaatgctgggcaaattcttcgtgatgagcttctcctggggcttcttccagtggttctacaccggcggcgacggttgcgggttcatgtcgttcccgacgctgggtctcgaggcctacagaaacaagttcttcttcgatttctctgcgacgtacgtcggcgtcgggatgatctgcccttacctcgtcaacatctccgtgctcctcggaggcgtcatgtcgtggggaatcatgtggcctctcatcgagcacaagaagggtgactggtatcctgctgacctcaaacccagcagcctccgcggcatcgtcggctaccgggtgttcatctccatttcactcatcctcggcgacgggctgtacaactttctgaaggtgatgacaagaaccacaacggcgctggtgatgcaggtgcgcgcgatgatgtctgagccgacgctgccggtctccggcggcggcgggcagacgccggaggagacgttcgacgacaagcggcggacggagctgttcctcaaggaccagatcccgaactggctggcgctgagcgcgtacgtggtgatcgcggtggtgtcgatcgcgacggtgccccgcatcttccaccagctgaggtggtaccacgtcgcggtgtcgtacgtggtggcgccggtgctggcgttctgcaacgcgtacgggtgcgggctgacggactggtcgctggcgacgacgtacggcaagctggccatcttcacggtgggggcgtgggcggacgcgtcggacggcggcatcatcgcggggctggcggcgtgcggcgtgatgatcgggatcgtgtcgacggcgtcggacctgacgcaggacttcaagaccgggtacatgacgctggcgtcgccgcggtccatgttcgtgagccaggtgatcggcaccgccatggggtgcgtgatcgcgccgtcggtgttctggctcttctacaaggcgttccacgacatcgggatgccggggtcggagtacccgtcgccgaacgcgctggtgtaccggaacatggccatcctcggggtgcagggcctcggctcgctgcccaagcactgcctcgacctctgcatcggcttcttcgtcgccgccatcgccgtcaacctcgccagggacctcgcggcgcccaaggtggcgaggttcctcccgctgccgatggccatggcgatccccttctacctcggcccctacttcggcatcgacatgtgcatcggcagcctcatccgcttcgtctgggaccgcctcgacggcgccagggccaaggcgttcgctccccccgtcgcgtcgggcctcatctgcggcgacggcatctggacgctgccgcagtcggtgctcgccctcgccggtgtcaagcctcccatctgcatgaaattcctctcccggaccaccaacatcttttgggacccgtacatacacattcgccagatctcatggta

SEQ ID NO: 3087 - DNA, 1506 bp, Oryza sativa
atggagacgagggagctgtgggtgctagcggcagcgctcgccgtgtcgctcctctactacctcgccgccctgatgcgctacgccggcggcggctgtagcaggagcagcaggccgccgttgccgcctggcccgacgccgctgcctctcatcggcaacctgctcagcctccgcggcgtcctccaccaccggctcgcgagcctcgcccgcgtccacggccccgtcatggcgctcaggctcggcctcaccacggccgtggtcgtctcctccagggacgccgcggcggaggccttcacgaagcacgaccgccgcctcgccgcccgcgtggtcccggacagcaaccgcgcgcacggcttctccgaccgctccatcatatggctcccgagctccgacccgcggtggaaggcgctgcgcggcatccaggccacccacctcttctccccccggggcctcgccgcggtgcgctccgtccgcgagagcaaggtgcgcgacatcgtggcctacttccggtcgcgcgccggggaggaggtggtgttcggcgaggccatctacagcggcgtgctcaacctcgtctccagctccttcttctccgtcaacatggccggcgtgggctccgaggaggcgcacggcctgcgggagctcgtggaggacctcgtcgaggcgatcgcgaagccgaacgtctccgacctcttccctttcctccggcagctcgacctgcagggcttgcggcggcggaccgaggagcgcatggcgagagccttcggcatcctagacggcataatcgatcgccgtctggcgaaccgcactcacggcgaccggcacggcgacttcctcgacgcgctcctcgacctcgtctccgagggcaagatggcccgggaccacgtcacgatcatgctcttcgaggtcttcggcgccggcagcgacaccatgtccgtcagcctggagtgggcgatggccgagctgctccgcaacccgcgcgccatgcgcaaggcgcgcgcggagctggaggacgccgccgccgtcgtcgaggagtccgacgcggcgaggctcccttacctccaggccgtggtgaaggaggccatgcggctgcaccccgtggggccgatcctgctcccccaccgcgccgtggaggacggcgtggagatcggcggctacgcggtgcccaggggcgccatggtgatcttcaacgcgtgggcgatcatgcgcgaccccgcggcgtgggagaggcccgacgagttcgtgccggagcgcttcatggagacgactacggcgatcgatttccgcgggaaggagtacgagtacctgccgttcgggtccgggaggaggctgtgcccggggctgccgctggcggagcgcgtcgtgccgttcgtgctggcctcgctgctgcgcgcgttcgagtggcgcctccccgatggcgtgtccgccgaggacctggacgtcagcgagaggttcaacaccgccaatgtgctcgccgtgcctctcaaggtcgtgcctgtcatcgtcaactag

SEQ ID NO: 3088 - DNA, 708 bp, Oryza sativa
atggcgggagacggcgagctgaagctactggggatgtggaccagcgcgttcgtgctcagggtgcgcttcgtcctcaacctcaagtcactgccgtacgagttcgtggaggagaacctgggcgacaagagcgacctcctcctcgcctccaacccggtcaacaagaccgtccccgtcctcctccacgccggccgccccgtcaacgagtcgcaggtcatcctgcagtacatcgacgaggcctggcccgaccgcccccccgccgtgctgccctccgacccctacgagcgcgccgtggcgcggttctgggcggcatacgtcgacgacaaggtgcggctggcgtggctggggatcctgttccggagcgagacggaggaggagagggcggcggcggtggcgcaggccgacgcggcgctggagacgctggarggcgcgctccgggagtgctccggggggaagcccttcttcggcggcgacggcgtcgggctcgtcgacgtcgtgctcggcggctacctcgggtggttcacggcgatcaagaagctgatcgggcgcaggatgatcgacccggcgaggacgccggcgctggccgcgtgggaggatctcttccgcgccaccgatgcggccaggggcgtcttgccggatgacgccgacaagatgctcgagttcaggcagacggcactcgccttgggcgcctccaaaaaaatcactctgtga

SEQ ID NO: 3089 - DNA, 650 bp, Oryza sativa
atgagcgaccgcgacgtcgacatgcacatcctcaccgctctcatggccgacatggccgattcgtcatcctcctctcctcctcctcatcatcatcatcgatccgacgactccgacatgcgagcatcagcagcagcagctgagcctgagcaccggaggagccctgcaccgccgccgccaccgaggcagcagcagttgatcggggtgcggaagcgtccatggggcaagttcgccgccgagatccgcgactccacccgcaagggtgctcgcgtgtggctgggcaccttcgacagcccagaggccgccgccatggcctacgaccaggccgccttctccgtccggggcgcctccgccgtcctcaacttccccctccaccgcgtccaggagtcgctccaggcactcgccctcggcgccgccggaggatcgccggtactcgccctcaagcgccgccactccatccgcaagcgccgcaagcctaccaagcacatgctgctcatgcaacaacaacaacaagagccgacggtggtggagctggaggacctcggtgccgactacctggaggagctcctccgcctatccgagtcctcctcctcctcctcttcttcctccatctccaacttcaccactacaccaaatcgtcattgccaatccta

SEQ ID NO: 3090 - DNA, 2727 bp, Oryza sativa
atgaagaaagtattcgatcaaacagtccgggacctaaaaagagaggtgaacaagaaggtcctcaaggtgcctggtatagaacaaaagattcttgatgccacaagcaacgagccatggggcccacatggatcactcttggcagaaatcgcccaagcaacacaaaattaccatgagtaccagatggtcatgaatgttgtgtggaagaggatcaatgacactggtaaaaattggcggcatgtttataagacactagctgatttccagtatatcgattcgagtgggagagatcaaggtagcaatgtacggcggaaatcccagagccttgttagtttagttaatgacaaagagaggatacaggaagttaggcagaaagcacttgctaccagggacaaataccggagtgcattcgccaccagtggaacacacaggagcccaggtggctatgacaatgaccgctatgaaggaagctatggcagtaggtatgataacagaaatggctacgggggagaaagagagtatggatatagggatgatgacagatatggtgttgctggaactactcccaatcgggaaggagatcgttattctagggattctaatgagcagcgctacagcagagatagagaagatgagtacaaaggaagtcatagcaaccatgaatatgcagaaggatcaggtcgcaggagctatggacgagatagggattcatatggggatgatgaagcttattcatcccgtggccggcaaagcaatgctgacggacctactcaggatgagaggcccatggagcggaagccttctaaccagcagattgcttcaccaccgccaaactatgaagatgtcacaagagatacacaggataataatcatgatggacgaaatggagggactgtgcctgtgccagttgctgcagcaaaggtgtcttcacctccaagaacaagtgtacccccaggtcaggtgaatggtgtacatgataatactgtggaagacgtacctgcaccaccacctactcatcctgaagttaatgggtttgacgagtttgatcctcgtggatcagtaccagatacctcacctccagtgaacccctcacaagccgtgaatagcttggaaatggatttattcggaccagatcctattaattcgttggctttggtatctgtgcctcagccaactgccagcccaaatgttgagccatcagcaaatccaggatttgagagtaacagttttatgggcatgccaccggcttctactggattcaatgaggcctttgatgcaactaatccttttggggatcctacgcctttcaaggctgttcatgaagaaactcctgcagtttctcagacaaatgctgcacctgctggttctttccatgctactgaacctgctgcagatgcaaatcctttccagcctgcttcagcagcaagctttggttttggagacactcttggcgacctctcttttggatcgaatgctgcacccgggcagcaagatatttttgtgcccacctcatcacattcagaggtaccacctgcaaacccatctgtgcaccctgaacaggcagtcccatcttatgtctcctcccaggcacctcagcctgcagctgctggtccacaaactcatgctgctcccgcttcatttgcttctcaagcacctcccacttcatttgcttctcaagcacctcaagcaggggcaccctatcctcaggctgcctccacatttcctcattcacaagcatctcatcctgcagccactaatccatctacaatccctcagaatgttgccacaccatttgctcctttacaaatgcctcaacctgtaccatcaggccaatcaaactattttatgcaaccagttccagggactggcattaatggcatgtctggggctccttcacagaatggagcaccatcctacatcccttcacaggcttctcaatttgcagctccaacaaatctacagccctctcagccaaccttccccccacaaactgccatggcagcttcacaggcaacatcaatttctcgaggggcatctcagcctcttgcagtgccgaattcaatgccttctggtgtgaactttccattacaatcaagttcatcagctccccctgaaacaatcctttcagccttgcaagttagtcagtctgagccagtgaagaaatttgagtccaaatctacagtttgggctgatacattgagccgaggtttagtcaatctggacatctctggaccaaaggctaatccgcacgctgatattggagttgacttcgattcaatcaatcgcaaggagaaaaggcaagaaaagaaagtctctcaagctcctgtggtatctacgatcactatgggcaaagccatgggaactggctccggcatcggtcgggcaggtgcgagtgccatggcacctccagccaacccaatgggtgcaagcaggggcattggcatgggtatgggcgctgctggttccggttacggtggtggaatgggaatgaaccggccaatgggcatgggaatgggaatgaaccaacaaatgggccatgggaatggggatgaccaacaggccatgggaatggggatgaaccaacaaccaatgggaatgaacatgggcatggggatgaaccagggtatgggaatgaacatgcggcctcctatgggaatgggtccaggtagtggatataatccaatgggtaccggatacggagggcagcaaccatatggtgggtacaggtga

SEQ ID NO: 3091 - DNA, 2124 bp, Oryza sativa
atggagagcagatggaggaaggccaagatgtcgctggggctcaacctctgcgtctacgtgcccaggacgctggacgacggcgactcgccgtccaccgggtcgtccacggcggcgctggtgtcgccggtggcgtcctcgtcgtcggcggcgaccagcgccaacaccacgcccacggcggagcagagggtcaagggcgccggcgcgctcatgccgaccaccccgacgccgacctccgccggacttcgcctctccaaatccggcagcaaatccttcaagaaaacatgtgcgatatgtttgaccacaatgaagcctggtcagggccatgctctattcacagcagagtgctcacatacctttcacttccattgtatagctgcaaatgttaagcatggaagcaacaattgcccagtttgccgcaccaagtggaaggaactcccatttcgaggtcccttgcctggtgaatttcctcaaggaagtgcaaggattaatccagttaatgggcaccaaaatggcgggcagatgaccatactgcgaccacttccccgtgctcgttcttctggtcggctgcatcatatgacatcgttgttgcctgacactgaccgtagtatttttaacgatgatgaacccttggactcactgtctgaagcaaatgaaggctcgcagcaggggtgtttaagaacagtggaaataaagacatatcctgagttcactgaagttccagaaagtacttcagaaagaaattttacagtcctagttcatctaaaggcaccccttgctcagactttgcaaacaagcagcaaacttgaagatggcaatagcttgggcacaactcgagcccctgttgatctcatcacagtgcttgatgtcagtgggagcatggctgaaccttggctcctcagatcggctttcgtaattgccttctcatcatctgcacgtagactcttccccctccgtcggatgactgagactggtcgtcagcaaagcttgcaagctgtttattcactgacatcaaatggtgggaccaatattgctgagggcctgaggaaaggctccaaagtgattgaagatcgacaggccaagaatccagtgtgcagcatcatcctactatcagatgggcaagatacatatacagtctcaccaaccgctggtgtacacaaagcagcaccagagtactgctcactcctgccatatactagtaatggttgtcaacaggtaccagttcatgtctttggatttggtgctgaccatgattcagtctcgctgcattcaatctcacaaacctccgggggcaccttttcattcatagagacagaggctgccatccaagatgcatttgcccagtgtattggtggactcttgagtgttgttgcacaggatttgcatgtaaaggtggagagcctccaccctgatgtacactttggctcgatcagatcaggaagctattctagcagacttgcagatgacaagaggaatggctccatagatgttggtgacatgtatgccgaagaggagagggatttccttatgtcagtaaatgttcccccaggttacggtgaaacagcacttctcaaagttggctgtgtctacaaagatccactgatgaaggagactatcaatatggctgatgtgcaagtcaagatctctagaccagcattcgtctcagtacaaagcgtgtcaatcgaggtggaccgacaaaagaaccgtcttcatgcagctgaagtcatggctgaagcaaggttgtctgccgagcgtggtgacctgacacatgctgtttccttactcgaagactgccggaggatgatcatggggtcaacatcaggacaatccggtgatcggttgtgccaagcattggatgctgagctgaaggagatgcaagaaaggatggccaatcgccaaaggtacgaagcatcaggccgcgcctatgtcctctccggcttgagctcacactcatggcagagagcaactgcgcgaggtgactccacagacagcgagagcctaatccaggcctaccagacttcatccatggtcgacatgctgctgcgctcgcagacaatgagccgctcctcaacccctccacagatgaggcatgtgaagtcgtttccagcgcgcccgcagcctaggtaa

SEQ ID NO: 3092 - DNA, 1692 bp, Oryza sativa
atggcgtgcctcgcgccgcacttcaagtgggcgccctgcccccacgcgcaccaccaccactctacttcttctttaccgtcgtcgtcgtcttcgtccacctcggccccttcctcgtcgtcgaggtgctccttctcccgcgggggccccttccgcgtccactgcgcggtcaccgccaccacctccgccgcggcgcccgtcgtcgtagaagctcccggcggggggatgcggctcgcgtacgccgccgccccggactcctccgcgccggctctccagaaaaaaattcaatcggccctggcatcagaagtatttctaaatgaagaggctgttgtaacagctgctgcagcagaggcagttgcccttgctagagcagctgctgaagctgcacaggaagttgttcgtatggtacaaaataataaaaatgaacgtaacaccagaccaaaaaaagctgtggtcaactacttggcaaatgaaatacttcgcacggaaatgaaaccaaacattcttgataaatatagtgatggcattttgtcagaggagatagagtcttatggcatcttgagtgatgaagctgaactagacggtgatacacaggacatccctagtatagctgtgaagtctgctcgtcaaactgagagaagagctcggagaacgagggcagcaataaaggctgctaccatagtccgtacttccccaaaacctgcaacgtcctcaaagaagaagcggtcaaagggcgcctcttctggcacaaatccattaggttccttgtggaagatgacgggtcgcagacttcttacagcaaaggaagaggttgagttctcggaaggtattcaggacctcttaaagctagaagcaatccaagctgagcttgcagagtacaatggtggccagccaaccttcgctcagtgggctacagcagctggagttgatgagagaactttgcggaagcgtttagatcatggtatttattgcaagaatagaatggttacatccaatgtgcgacttgtaatatctattgccagagagtttgaaggtccaggaatggaactttatgatcttatccaggaagggatgcagggccttataaggggtgctgaaaaatttgatgcatcaaagggttttaggttctcgacatattctcactggtggatcaaacaagcaatgcgtaaatctgtctcagagcaatcacagatatttcgcttgccggctcacatggttgaagcaagctatcgtgtgaaggagtgcattaaacgtcttcgtcgaaagcttaaaagacgacccactaacgaagaaatagctgcagacactggtatgccgatcaaacgagtcgaggcagcagtgaaccttccaaaatattctgtatcccttgatagcaaaattggtagcacagacatgacttaccaggaagtcacagctgatccaaccgccgagacagccgaggagatgctgaacagattgtctatgaaacgggacgtacacaaggcactggacactcttaccacccgtgagaggcaagtggtgacacttaggtttgggctcgaagatggtaggataagaaccctgcaggagattggcaacaccatgggtgtgagcagggagaggatccggcaaatagagtcagccgcatttcggaaactgaggagcaagaagagggtgaatgcactgaaggattatctggtcactggaagagtgtag

SEQ ID NO: 3093 - DNA, 1947 bp, Oryza sativa
atgccgcgagccgtgtccgacggtgccgacaacctcgacgccgacatggacaacggcgccgcgcagcagcagcacgacggctacaatgtcggcgcgccgccgaagaagaacctcctggcggagttcgccggcacggtgaaggagacgttcttctccgacgagccgatgcggcggtacaaggaccagccgaggtccaggaagctatggctcgccttgcagcacgtcttcccggtgttcgaatggggcagacaatacaccctcgccaagttcaagggcgacctcattgccggcctcacccttgccagcctcgtcatacctcaggacatcggctacgcgaagcttgctaacctgccaccagagattgggctgcacagtagcttcgtcccgccattgatatacgctctgatgggcacctcaagggagctagcaatgggtccagtggccgtcatctcactgctgcttggtactctcctccaggaggagattgactcaaagaagaacccgctagattacagacggctcgccttcacagcgaccttctttgcaggagtcacacaggcggcgctgggtttctgcaggctagggttcatcatagcgttcctgtctcatgctgccatcatcggattcatggccggcgccgccatcaccattgctcttcagcagcttaaaggcttccttggaattgcaaacttcaccaagaagactgacatcatctcggtcatgaaatcagtctggggaaatgttcaccatggggcaagtatttttgtacctctccaacttcttgatctcttctctgaaaaagggggcaagaagaacaagaagctcttctgggtcccagcaattgcaccactcatttcggtgatcatttcaactttgttcgtctacatcactcgtgctgacaaacaaggcgtcgcaatcgtaaaaaacgtcaagaaaggcatcaatccaccttcagctagcctgatatttttcactggcccatacttgctcaaaggattcaaaattggagtagtagctggaatgataagccttacggaagcgattgcagttggaagaacatttgctggattgaacgattaccagatagatgggaacaaagaaatgttggctctaggaaccatgaatgtggtcggttcaatgacgtcttgctatatagccacaggtggttttgcacgatcagcagtcaattgcatggctggaggtaaaacaccaatgtccaatattgttatgtcaactgtagtattgcttgcactcctgtggatcactccattgttcaagtacacgcccaatgccaccatttcttccatcatcatatcagcagtgcttggcctatttgactttgaatcagcctaccttatctggaaggttgataagttggacttcatggcgtgcttgggggcattccttggagtaatattttcatctgtggagtatggcttgctcattgcggttgtaatatcactaatcaaagttctgctccatgtaacacggccaaggacagctttacttggcaaccttccaagaacgattatctatagaaatgttgaacaatatccagaagctaccaaggtgccagggatgctaattgtaagagtggactcagcaatatacttcacaaactccaattatgttaaagaaagaatgctgagatggctgagagatgaggaagaacatcaaaaggaacagaagttaccaaaaattgagtttctgattgttgacctatctcctgtaaatgatattgacacaagtggaatccatgccttcaaagagttgttgaggacacttgaaaagcgccagattcagctgattttcgccaatcctggggcggctgtgatccaaaagctccggtcagcaaaattcacagagctcattggtgaagaaaagatatgcctgacagttggtgacgccgtaaagaaatttgctccccagttgactgagaatgtctga

SEQ ID NO: 3094 - DNA, 920 bp, Oryza sativa
atgagaaatttggagttcagagttgaaaaaaagaaccggcaaaacaacaaccccatatgcaacacgagtgctgtggcagatcatttgtcacgcgacctcccatacaagctatcttctgatgacatcttcctaaccgctggaggaactcaggccatcgaggtcgtaatctcaatccttgcccaacctggcacaaacatattgcttcctagaccaggctacccaaactatgaagctcgagccgcgttcaacaaccttgaagtggcagaggtagcaaggaagcttgggatattggtaattactgatgaggtgtatggtaatttggtttttgggagttccccatttgtcccaatgggttgctttgggcacatcgtaccaatattaaccataggatcgctatcaaagaggtggatagtgccgggatggcgacttggttgggtagcaatatgtgaccccaagaagactctacaagaaaccaagattgcaacattaattactaatttccttaatgtttcaactgatccagcaactttcattcagggagctctaccgaatattcttaagaataccaaggaagaattctttaagaggataattgatttgcttacggaaacatcagatatttgctatagaggaataaaggatattaaatgcatcacttgtcctcacaagcccgaaggatccatgtttgtgatggtgaaattgaacctatatcttttggagggaatccatgatgatgttgatttttgttgccaacttgcgaaagaagagtcggtgattctttgcccagggagtgtgctgggaatgaagaattgggttcgcattacttttgctattgattcatcttctctcctggatggtcttgagaggatcaaatccttctgccaaaggcacaagaagaaaaaccctttaaattatatcta

SEQ ID NO: 3095 - DNA, 2016 bp, Oryza sativa
atgcctgcgctcgccgtggacgccgctgcacctgtcgcgcacgccttcgcgtgcgacgcggcgcgcttccccgcgccgctgctgggccccgccgccgcggctgcggcggtggcggaaaagccggacgcggccgcttgttcggccgacctctcgtccgcgctgtacaacgtggacggctggggcgcgccgtacttcttcgtcaacgacgacggcgacgtcgccgtgcgcccgcacggcgccgcaaccctgcccgggcaggagatcgacctcgccaaggtggtggccaaggccgccggcccgcgctccggcggcgggctcggcctgccgctccccctgctggtgcggttccccgacgtgctccgccaccgcgtggaggccctgaacgcggcgttcgactacgccgtgcgctccaccggctatggcgggaggtaccagggcgtgtaccccgtcaagtgcaaccaggaccgccacgtcgtggaggacattgtggagttcggcgagccgttccgcttcggcctggaggccggctccaagcccgagctgctgctcgccatgagctgcctcgccgcgcgcggcaacccggacgccctgctcatctgcaacggctacaaggacgacgagtacgtctcgctcgcgctcatcgcgcgcaccatggggctcaacacggtcatcgtgctcgagcaggaggaggagctcgacattgtggtcgacgctagccgccgcctcggcgtgcgcccggtggtcggcatgcgcgccaagctgcgcaccaagcacgccggccacttcggctccacgtccggggagaagggcaagttcggcctcaacgccgcgcagattctctccgtcgtcgccaagctcaagacccttggtatgctcgactgcctccagctcctgcacttccacattggctcccagatcccgaccactgctctgctcggcgatggcgtcggggaggccgcgcagatctactgcgagctcgcccgcctgggcgcggccatgcgcgtcatcgacgttggtggaggcctcggcattgactacgacgggagtcactcggcgcagaccgacatgtccgtggcatacagcttggaggagtacgcggcggccgtggtggccgcmgtcggccgcgtctgtgaccgcaagggcgtcgcgcatcccatcatctgcagcgagagcggccgcgcgctggtgtcgcaccactctgtcctggtgttcgaggccttctcggcttcggcgcccggccgcattgacccggccacgggctacctgctcgacgagctcaccgacgactgccacgccgactaccgcaacctcatggccgccgcggtgcgcggcgacttcgacacctgcgctctgtacgccgaccagctgaagcggcgctgcgccgatcagttcaaggacggcgttcttggcctggagcacctcgccgcggtggacagcctctgcgagatcgtcgcccgcggcatgggcgccgccgagccgccgcgcacgtaccacatcaacctgtccgtgttcacctccctgccggacatgtgggcgatcgggcagatgttcccgatcatcccaatccagcgcctcggtgagcgccctgcggtcgacggcgtcctctccgacctcacctgcgacagcgacggcaaggtcgaccacttcatcggcgggaggcacagcctgccgctgcacgagctccccgtccacggcacccgcggctactacctcggcatgttcctcggcggcgcctaccaggaggccctcggcggcctccacaacctgttcggcgggccgagcgtgcacgagcccgaggtgatgttcgaggtgctcaagcagaggaccgacggcgccaccgccgccgcgctcgccagggcgttcggcgcaatgccgtacctgtcgttcgacccggaggccgcggcgatggccagcggggagagcagcggcatgagcagcgactcggaggggtcggccgccggcgcggcggaggaggatgacgacgagtgggagttcatgcgggggctcaccgtgtga

SEQ ID NO: 3096 - DNA, 1590 bp, Oryza sativa
atgcggggagccatgaagccgtcgatcgtgcactgcctcaagctgctcatgctgctggcgctcggcggggtcaccatgcacgtccccgacgaggacgacgtggtcgcgtcgctcggggcgctgcgcctcgacggccatttcagcttcgacgacgcccacgccgccgcccgggacttcggcaaccggtgcagcctcctgccggcggccgtgctccaccctggctcggtgtccgacgtcgccgccaccgtcaggcgcgtgttccagctgggcaggagctcgccgctcaccgtcgcggcgcgcgggcacggccactcgctcctcggccagtcccaggccgccggcgggatcgtcgtcaagatggagtccctcgccgccgccgcagccagggcggtgcgggtgcacggcggcgcgtcgccccacgtggacgccccgggcggcgagctctggatcaacgtgctgcatgagacgctcaagcacgggctggcgcccaggtcatggaccgactacctccatctcacagtcggtggcaccttgtcgaatgcgggggtcagcgggcaggcgttccggcatggaccgcaggtcagcaatgtcaaccaactggagattgtgacagggaggggagaagttgtcacctgctcgcacgaggtgaactctgatctcttctacgctgctcttggcggcctgggccagtttgggatcatcaccagggctcggattgctcttgaacctgctccaaagatggtgcggtggatacgtgttctctactcggactttgagaccttcaccgaggaccaggagaagctgatcgcgtctgagaagaccttcgactacatcgaagggtttgtgatcataaacaggacaggcatcctcaacaactggaggacgtcgttcaagccacaggacccagtgcaggcaagccagttccagtcggatggaagagtgctatactgccttgagctgacgatgaacttcaaccacgatgaggctgacatcatggaacaggaagttggtgcgctgctatctcgactcagatacatatcgtccactctattctacaccgatgtcacatacctggagttcttggacagggtgcacacttctgagctgaagctgagggctcaaggcctctgggaagtcccacacccgtggctgaatcttctgatcccaaggagcacagtccacaaatttgcaaaggaagtcttcggcaagatcctaaaagatagcaacaatggtcccatactgctttacccagtgaacagaaccaagtgggacaacagaacatcagtggtcataccagatgaagaaattttctacctggttgggttcctatcttcagcaccatcatcctcaggtcatggtagtgtcgaacatgcaatgaacctgaacaacaaaatagtggacttctgtgaaaagaatggtgttgggatgaaacagtatctagcaccctacactacacagaagcagtggaaagcccacttcggagcaaggtgggagacatttgaacggaggaaacacacgtacgatcccctagcaatcctagctccagggcagagaatatttccaaaggcatcactacctatgtccttgtga

SEQ ID NO: 3097 - DNA, 1077 bp, Oryza sativa
atgtcggcctactgcggcaagtacaaagatgagctcataaagaatgctgcctacattggcaccccgggcaagggtatcctcgctgcggacgagtccactggcaccatcggcaagcgcttcgccagcatcaatgttgagaacgtcgaggataaccgccgtgccttccgcgagctcctcttctgcacccctggcgccctccagtacatcagcggcgtgatcctcttcgacgagaccctctaccagaagaccaaggatggcaagcccttcgtcgatgtcctcaaggaggccggtgccctccccggcatcaaggtggacaagggcaccatcgaggtcgccggcaccgacaaggagaccaccacccagggccacgatgacctcggcaagcaatgcgccaagtactacgaggccggtgcccgcttcgccaagtggcgtgccgtcctcaagatcggacccaaccagccctcccagcttgccattgatctgaacgcccagggccttgcttgctacgccatcatctgccaggagaacgggctggtgccgatcgtcgagccggagatcctcgtcgatggccctcacgacatcgatcgatgcgcgtacgtctccgaggtggtcctcgccgcgtgctacaaggcgctgaacgagcaccatgtcctcctcgagggcaccctcctgaagcccaacatggtcaccccgggttccgacgccaagaaggtggcgccggaggtcatcgcggagtacaccgtccgcaccctccagaggaccgtccctcctgctgtgccggccatcgtcttcctctccggtggacagagcgaggaggaggcgacgctgaacctgaacgccatgaacaagctcagcgccaagaagccgtggtcgctgtccttctcctttggccgtgccctgcagcagagcacgctcaaggcctgggctggcaagacggagaacgtagagaaggccagggcggccttcctcgtcaggtgcaaggccaactccgaggctaccctgggtacttacaagggtgatgctgtcctcggcgagggcgctgctgaaagcctgcacgtcaaggactacaagtactga

SEQ ID NO: 3098 - DNA, 1428 bp, Oryza sativa
atggctctcctcttgacgctgatcctcctctccggcctcggattcttgccccgccatgccgacgccgcgaggggctacgtcaccgtctccacatccagcttcgcggtgagctccacctgcgccgacgaactccctggacgagattgggattcgttgcgagtttcagctgcctcgccgcggaacggcacgtcggcggtgctgcggctgacgcaccggcacgggccgtgcgccccggcggggaaggcgtcggcgctgggatcgccgccgtcgttcctcgacacgctgcgcgcggaccagcggcgggcggagtacatacagaggagggtgtcgggggccgccgccgccgcgccggggatgcagctggcgggatccaaggcggcgacggtgccggctaacctggggttctccatcggcacgctgcagtacgtggtgacggtgagcctcggcacgccggcggtggcgcagacgttggaggtggacaccggcagcgacgtgtcgtgggtgcagtgcaagccgtgcccctcgccgccgtgctacagccagagggacccgctcttcgacccgacgcggtcgtcgtcctactccgccgtgccgtgcgccgcggcgtcgtgctcgcagctggcgttgtactccaacggctgctccggcgggcagtgcggctacgtggtcagctacggcgacgggtccacgaccaccggcgtgtacagctccgacacgctgacgctgaccgggtcgaacgcgctcaaggggttcctcttcggctgcggccacgcgcagcagggcctcttcgccggcgtcgacgggctcctcggcctcggccggcagggccagtccctggtgtcgcaggcgtcgagcacctacggcggcgtcttctcctactgcctaccgccgacgcagaactccgtgggttacatatcgctgggcgggccgagcagcaccgccggcttctccacgacgccgctgctgacggcgtcgaacgacccgacatactacatcgtgatgctcgccggcatcagcgtcggcgggcagccgctgagcatcgacgcgtccgtgttcgcgtcgggcgcggtggtcgacacgggcacggtggtcacgcggctgccgcccacggcgtactcggcgctgcggtccgcgttccgcgccgccatggccccctacggctacccgtcggcgccggcgacggggatcctggacacctgctacgacttcacccggtacggcaccgtgacgctgccgacgatctcgatcgcgttcggcggcggcgcggccatggacctcggcacgtcggggatcctcaccagcgggtgcctggcgttcgcgcccaccggcggcgacagccaggcgtccatcctcgggaacgtgcagcagcgctcgttcgaggtgcgcttcgacggcagcaccgtcggcttcatgcccgcctcctgctga

SEQ ID NO: 3099 - DNA, 1659 bp, Oryza sativa
atggagcacggcctccacaagctcggccattggttccataagcgggagaagaaggccatgggcgaagcgctcgagaagatcaaagcagagttgatgctgctgggcttcatatcgctgctcctcactgtggcacaaacgcccatctccaagatatgcatcccggagtcagctgccaacatcatgctgccgtgcaaggcagggcaagatatcgtcaagggcctgaagggaaaaaaggaccatcgccggaggcttctctggtacaccggagaagaagagagccatcgccggtcactggccggcgccgccggcgaggattactgcgcgcaatcgggcaaggtggcgctgatgtcatcgggcggcatgcaccagctgcacatattcattttcgtgctcgcggtgttccacgtcacctactgcgtcatcaccatggctctagggcgtctcaaaatgaagaaatggaagaaatgggaattagagaccaactcgttggagtatcagttcgcaaacgatccttcacgattccggttcacgcatcagacatcgttcgtgaaacggcatctgggactgtcaagcacacctgggctcagatggattgtggcgttcttcaggcagttcttcgggtctgtcaccaaggtggactacctgaccatgcggcaaggcttcatcaatgcgcatttgtcgcagaatagcaagttcgacttccacaaatacatcaagaggtcattagaggacgatttcaaagttgtcgttggcatcagcctcccattgtggtttgtcgcgatccttgtgctcttccttgatatccaagggttcggcacgcttatctggatctcttttgttccactcgtcatcctcatgttggttgggacaaagctggagatggttatcatggagatggcacaggagatacaggacagggcaactgtgatcaagggagcaccggtcgttgaaccaagcaacaagtacttctggtttaaccggcctgattgggtcttgttcttcatacacttgatactgttccagaacgcatttcagatggcacatttcgtgtggactctggcaacccctggcctgaagaaatgcttccatgaaaacatgggcttgagtatcatgaaagttgtagtggggatattcattcagttcctatgcagctacagcaccttccctctctacgcactcgtcacacaggtgaaaccatttagacaaaaatcacttgtaaatgctcttggaggtctcaattccaacgtcctcaacctttccgtgtgtttgcagatgggatcaaacatgaagaagaccatcttcgaggagcagacgatgaaggccctgatgaactggaggaagacggcgagggagaagaagaagctccgggacgccgacgagttcctagcacagatgagcggcgacacgacgccgagccgcggctcgtcgccggtgcacctgctgcacaagcaaagggtgaggtcggaagatccgccgagcgcaccggcatcgccggggttcgccggagaggccagggacatgtacccggtgcccgtggcgccggtggtgcggccgcatgggtttaaccggatggacccggataagaggagggcggcgtcctcgtcggccatccaagttgacatcgccgattctgatttctccttcagtgtacaacggtga

SEQ ID NO: 3100 - DNA, 1344 bp, Oryza sativa
atgtcgatgctgatgctctccaccgccgtcgccgtgtgcggctccttcgagttcggcacctgcgtgggttattctgcacccactcagtcagggattgtggatgaagttggactgtccatttcgcagtttgcactattcggatctgtactgacgattggggcaatgattggtgctgtcactagtggtcgcttagcagattttcttggacgtaaaatggtgtgtcatatttttcgtttgtcgcagacaatgcggatatcagctactatttgcatttttggatggctttctttgcatttggctaagggtgttatcatgctctactttggaaggatattgttgggctttagtactgggattctttcttatgtggtgcctgtgttcatcgctgaaatagcaccaaagaatctcaggggaggccttgcaacttcaaaccaggtaatttgtcttcatatccatagaaataacatgtttattcttcacattcatgctggatggtatagtaccatgtgttttgctattaacaggacttctcttcattccagagtcaccaagatggctgaatttaatgtgaaggactttgctcagactgatcattttctccaggagtatattgaatcactccataggttcccaaaggccagggttcaagatttgtttctcagaaaaaatatatacgctgtcactgtgggtgttggcttgatgatatttcagcaattaggagggataaatggtgtaggcttttatgcaagctctatcttcaatttcgcagttctgtatgaactttgtgattttatcgcacttcaggttttttctggaaaactttggaaccattctttgattggcattattcagattcctattacattgttcggagccattctaatggataagagtggaagacgggttcttctaatggtctcggcatccggaacatttttgggctgctttctgacaggaatatccttctacctaaaggcacaagggctattctcagaatgggttcctgaattggctcttaccggtatactggtttatattggagcatactcgattggaatgggccctgtcccttgggttgtcatgtctgagatattctcgattgacatgaaagcaatcggtggaagcttggtgacactagttagttggttaggttccttcgcgatttcttactcgttcagcttcctcatggactggagttctgcagggaccttcttcatgttctccgcggcgagcttgatcaccatcctgttcgtggtgatggtcgtgcctgaaaccaaagggaggacgctcgaggagattcaggactcgctcatcgactccagatcaagattgagggatccatag

SEQ ID NO: 3101 - DNA, 2450 bp, Oryza sativa
atggctcttctcatttttgtagtactactattcgccttaagcatcccagcaagttctgccacgatcgacaccatctcaattggcacggcgttggccaaaaacgataagcttgtctcagaaaatcgcaggtacgcacttggcttctttgagacacaaagaaaagcatctcagaaaactagcaagtggtacttaggaatttggttcaaccaggttcccaagctaaatcctgcatgggttgcaaatagggataagccaattgatgatcccacatcagtggaactaacaatcttccatgatggaaatcttgccatcttaaaccagtcaacaaagtccatcgtttggtctacacaagctaatatcactgccaacaacaccgttgctacgctattgaatagtggaaatctcatcctaacaaacttgtcaaactcattagaagttttctggcagagctttgactaccccacagatacattttttcctggggcaaagcttggatgggacaaggtcacaggccttaaccgtcagattatttcttggaaaaactcaattgacccagctaccggttcctattgcaaagagttagacccttctggtgttgatcagtacttgcttttgccattgaattcctccacaccgtattggtctaccggtgcatggaacggcgattacttctcctcaatcctggagatgaaaagccatactatttttaattcatcatttgttgataatgatcaagagaagtactttagatatgatttgctagatgaaaggactgttagtcgtcagatattagacatcggaggtcaggaaaagatgttcctttggcttcaggactcaaaagattggacactgatctatgcccaacctaaagctccgtgtgatgtctatgcaatttgtgggcctttcacagtctgcatcgataatgagcttccacattgcaactgtataaagggcttcaccgtaacatcactcgaggattgggaactggaagatcgaacagatggatgctcaagaaatactccaatagactgcattaacaacaaaaccacaacacattcaactgatatgttctattctatgccatgcgttagattgcccccaaatgcccataatgtggaaagtgtaaaaagttcaagtgagtgcatgcaagtttgcttaactaattgctcttgcactgcttattcattcatcaatggtggatgctctatttggcacaatgaattgcttaacataagaaaagatcaatgtagtgaaaatagcaatacggatggagaagctctttacctacggctagctacaaaagaattttatagtgcaggcgttgatagtagaggaatggttattggacttgctatttttgcaagttttgctttattatgtttgctaccactaatcctactactggtgagacggagtaaaactaagttctcaggtgacagattgaaagattcccagttttgcaatggaattatttcatttgaatacattgatttgcaacgtgcaactacaaatttcatggagagacttggaggaggtagctttggttctgtatttagggggtctctaagtgattccacaacaatagcagtgaaaaggcttgaccatgcatgccaaattccacaaggagataagcagtttagggctgaagtgagctcaattggaaccattcaacacatcaatttagttaaattgatcggcttctgttgtgagggtggcagaagattgcttgtttatgagcacatgtcaaatcgttctctcgatctccaattatttcagagcaatactacaatatcctggaatactaggtatcaaatagccattggaattgctagaggattgtcttacttacacgaaagctgtcaagattgtatcatacattgtgatattaaaccagaaaacatccttctagatgatttattcattccaaaaattgctgattttggtatggcaaagcttttgggaagggattttagccgagttttgacaacggtgagaggaactgcaggttaccttgcacctgaatggattagtggtgttcctataacaccaaaagtcgatgtttatagctatgggatggtcttgctagaaataatatcaggaagaaggaactcatatacctcatctccttgtgttggtgaccatgatgattattttccagtgcttgtggtccgtaagcttcttgatggagatatatgtggtttggttgattatagattacatggtgacatcaacataaaagaggccgaaacagcttgcaaggttgcgtgttggtgcattcaggataatgagtttaatcgaccaacaatggatgaagtggttcatattctcgagggtctagttgaaattgacatacccccgatgccgaggctacttgaagcaattgtagctggaagctcaaatccaacatgtacctcatctagttttttcggatcaattcgagaatccttgta

SEQ ID NO: 3102 - DNA, 3264 bp, Oryza sativa
atggacggcgacgcggatgccgtgaagtcggggaggcacgggagcgggcaggcgtgccagatctgcggcgacggcgtgggcacgacggcggagggcgacgtgttcgccgcctgcgacgtctgcggcttcccggtgtgccgcccctgctacgagtacgagcgcaaggatggcacccaggcttgcccccagtgcaagaccaagtacaagcgccacaaggggagcccggcgatccgtggggaggaaggcgaggatactgatgctgatgatgtcagtgactacaactaccctgcatctggcagtgccgaccagaagcagaagattgctgataggatgcgcagttggcgcatgaatgctgggggtggtggagacgtcggccgtcccaagtatgacagtggcgagatcgggctcaccaagtatgacagtggcgagatccctcggggatacatcccttcagtcactaatagccagatctcgggagaaatccctggagcttcccctgatcatcatatgatgtctcctaccggaaacattggcaagcgtgctccattcccctatgtgaaccattcaccaaatccatcaagggagttctctggcagcattggaaatgttgcctggaaagaaagagttgatggctggaaactgaagcaggacaagggagcaattcccatgaccaacgggacaagcattgccccttctgaaggtcggggagttggtgatatcgatgcatccactgattacaatatggaagatgccttactgaatgatgaaactcgccagcctctctctagaaaagttccccttccttcatccagaataaatccctacagaatggtcattgttctgcgtttggttgttctaagcattttccttcactaccgtattacgaatcctgtgcgcaatgcgtatccgctctggcttttatctgttatatgtgagatttggtttgctttgtcctggatattggatcagttcccgaagtggtttccaatcaaccgtgaaacctaccttgataggctggcattgaggtatgacagagaaggtgagccatctcagttggctgctgttgacatttttgtcagtacagtcgaccccatgaaggaacctcctcttgttactgccaataccgtgctgtccattcttgctgttgattacccagtggacaaggtctcttgctatgtatctgacgatggtgctgcaatgctgacttttgatgcattggctgagacttcagagtttgctagaaagtgggttccattcgttaagaagtataacattgagccaagagctcctgagtggtacttctcccagaaaatcgattacttgaaagacaaagtccacccttcatttgttaaagaccgtcgtgccatgaagagagaatatgaagaattcaaagttaggataaatggccttgttgctaaggcacagaaagtcccggaggagggatggatcatgcaagatggcacaccatggccaggaaacaatactagggaccatcctggaatgattcaggttttccttggtcacagtggtggccttgataccgagggtaatgagcttccccgcctggtctacgtatctcgtgagaagcgtcctgggtttcagcaccacaagaaggctggtgccatgaatgctcttgttcgtgtctcagctgtgcttaccaatggacagtacatgttgaatcttgattgtgatcactacatcaacaacagcaaggctctgcgggaagctatgtgcttccttatggatccaaacctaggaaggagtgtctgttatgttcagttcccacaaaggttcgatggtattgataggaatgatcgatatgcgaacaggaacactgtgtttttcgatattaacttgaggggtcttgatggcatccaaggaccagtttatgtgggaactggttgtgtattcaacagaactgctctatatggttatgaacccccaattaagcagaagaagaagggaagtttcttgtcatcactatgtgggggcaggaagaaggcaagcaagtcaaagaagaagagttcggacaagaagaagtcaaacaagcacgtggacagtgctgtgccagttttcaatcttgaagatatagaggagggtgttgaaggtgctggattcgatgatgagaaatcacttcttatgtctcaaatgagcttggagaagagatttggccagtctgcagcgtttgttgcctccactctcatggaatatggtggtgttcctcaatctgcaaccccagaatctcttttgaaagaagctatccatgtgataagttgtggctatgaggacaagaccgaatggggaactgaggctatgcaacttgcaatgattgggtggatctacggttccgtgacagaagatattctcactggattcaagatgcatgcgcgaggctggagatcaatctactgcatgcccaagcgcccagctttcaaggggtctgctcctatcaatctttcagatcgtcttaaccaagtgcttcggtgggcacttggttctgttgaaattcttttcagtcgccattgtcccatatggtacggctatggaggacgccttaagttcttggagagatttgcctacatcaacaccactatttatccattgacatcgatcccgcttctcatatactgtgttttgcctgctatctgtttgctcactgggaagttcatcatcccagagattagcaactttgctagtatttggttcatctctctcttcatttcaatttttgccactggtatccttgagatgaggtggagtggtgttggcatcgatgagtggtggaggaatgaacagttctgggttattggaggtatatctgcgcatctttttgccgtcttccagggtctcctcaaggtgcttgctggtatcgacaccaatttcactgtcacctcaaaggcttctgatgaagatggcgactttgctgagctctacatgttcaagtggacaacgcttctcatcccaccgacgaccatcttgatcattaacctggtcggtgttgttgctggtatctcatacgcgatcaacagcggctaccattcatggggaccgctctttggcaagctcttctttgccttctgggtgattgtccacttgtaccccttcctcaagggtcttatgggtcggcaaaaccgcactccgaccatcgttgttgtttgggcaatccttctggcttcgatcttctcattgctgtgggttcgcatcgatccattcaccacccgtgtcaccggcccagatacccaaacatgtggcatcaactgctaa

SEQ ID NO: 3103 - DNA, 1185 bp, Oryza sativa
atggcggcggagacgttcctcttcacctccgagtccgtgaacgagggtcacccggacaagctgtgcgaccaggtgtcggacgcggtgctcgacgcgtgcctcgcccaggaccccgacagcaaggtggcgtgcgagacgtgcaccaagaccaacatggtgatggtgttcggcgagatcaccaccaaggccaccgtcgactacgagaagatcgtccgcgacacctgccgcggcatcggcttcgtgtccgacgacgtcggcctcgacgccgaccgctgcaaggtgctcgtcaacatcgagcagcagtcgcccgacatcgcgcagggggtgcacggccacttcaccaagcgccccgaggagatcggcgccggcgaccagggccacatgttcggctacgccaccgacgagacccccgagctgatgcccctcagccacgtcctcgccaccaagctcggcgcccgcctcaccgaggtccgcaagaacggcacctgcgcctggctcaggcccgacggcaagacccaggtcaccgttgagtacctcaacgacgccggcgccatggtccccgtccgcgtccacaccgtcctcatctccacccagcacgacgagaccgtcaccaacgacgagatcgccgccgacctcaaggagcacgtcatcaagccggtcatccccgacaagtacctcgacgagaagaccatcttccacctcaacccctcgggccgcttcgtcatcggcgggccccacggcgacgccggcctcaccggccgcaagatcatcatcgacacctacggcggatggggcgcgcacggcggcggcgccttctccggcaaggacccgaccaaggtcgaccggagcggcgcctacatcgccaggcaggccgccaagagcatcgtcgccagcggcctcgcccgccgctgcatcgtgcaggtgtcgtacgccatcggcgtccccgagccgctctccgtgttcgtcgactcctacggcaccggcaagatccccgacaaggagatcctcaagatcgtcaaggagaacttcgatttcaggcccgggatgatgaccatcaacctcgacctcaagaggggcggcaaccggttcatcaagaccgcggcgtacggccatttcggccgcgaggatcccgacttcacatgggaggttgtcaagccgctcaagtatgagaaggcatcttcctga

SEQ ID NO: 3104 - DNA, 1650 bp, Oryza sativa
atgggtcgcaagatcaaagtcaagaagaagaaggcatcgagcaaggtatggcaacctggtgtggatacactggaagaaggggaggagctccagttcgatcctcaggcttacaattatctcagagggtttaacattggctggccgtgcttgagtttcgatgttgtgcgggatcaacttggactcgtgcgatcggaattcccacatacattatatggcgttgctggaactcaggctgagagggcttcatggaattatataggcattttcaagatttgcaacataaatgggaagaagcgggaacctataccagcatcagcaattgatggcgacagtgatatggatagtgaaagtagtagtgatgaagaagatgaagcagctaatgaagacacaatgcccattttacatgttttgatttttgatagccgaggcactgaaagtaaattgtatcaacgtttagagtggacttgtgaggtgtgggacttcagctccttccttaattcattagcagagtctggagcagttgcacacaacgaagacgacagaatccataatcacgtacctgtgaaaatatttggtggccataaagatgaaggctatgcaattgattggagtccgcttgttactggaagacttgtttctggtgattgcaataaatgcatccacctctgggagccaacttcaaacagttggaatgtcgatacaaatccattttggagtcccacagaagccgacatatttgcctcttgttcagccgacagaacaatatctatctgggatatacggacagggaagaaaccttgtatttctgttagggctcacaatgctgacgtgaatgtcatctcatggaaccggctcgctagctgtatgatagcttcaggatgcgatgatggaagtttctcaattcgtgatcttagattaatcaaggatgactccttggtcgcccattttgaataccacaagcacccgattacatctgtggaatggagcccacatgaaccgtcaacactagctgtatcatcagctgaccatcaactgacaatttgggatctttcattggaaaaagatgctgaagaggaggcagagttcagggcaaggatgagagaacaggctgatgcccctgaagatttacccccacaacttctctttgttcatcaggggaggcaattaatggaccacctgacaaaggagcagatcgccgagttccgggaggcattcaacctgttcgacaaagatggagacgggacgatcacgagcaaggagcttgggacggtgatggggtcgctggggcagtcgccgacggaggcggagctgaagaagatggtggaggaggtggacgcggacggcagcggcagcatcgagttcgaggagttcctgggcctcctcgcccgcaagcttcgcgacaccggcgccgaggacgacatccgcgacgccttccgcgtcttcgacaaggaccagaacggcttcatcacccccgacgagctccgccacgtcatggccaacctcggcgaccccctctccgacgacgagctcgccgacatgctccacgaggccgactccgacggcgacggccagatcaactacaacgagttcctcaaggcgaaggcagaatatgatggagggacatggaagtggaggccatcggtcaagtaa

SEQ ID NO: 3105 - DNA, 1257 bp, Oryza sativa
atggccgtcgacgacgccgacgacgaccagctcgcctccatgtccacggaggacatcgtcagggcaacccgcctcctcgacaacgagacccgcgtcctcaaggatgagctgcagcggacgaaccttgaggtggaatcctacaaggagaagatcaaggagaaccaggagaagatcaaactcaacaagcagctgccttaccttgtcggcaacatcgtcgagatattggaaatgaaccccgaggatgaggctgaagaggatggtgcgaacatcgatctggattcacaaaggaaaggaaaatgcgttgttttgaagacatccacaagacaaacaatattccttcctgtaatcgggcttgttgaccctgaaaagctcaagcctggggatttggttggagtcaacaaagacagctacttgatactagacacgctaccttcagaatatgattcacgggttaaggcaatggaggtagatgaaaagcctacagaggattacaatgacattggtggccttgagaaacagattcaagagcttgttgaagcaatagtattgcccatgactcacaaggaccggtttcagaagttgggaattcgccccccgaaaggtgttcttttgtacggaccacctggcactggaaagaccctaatggctcgtgcatgtgctgcccaaactaacgccacatttctgaaacttgctggtccacagcttgtccagatgttcatcggtgatggtgcaaagcttgtccgtgatgcctttcagcttgcaaaggagaaatccccctgcatcatttttattgatgaaattgacgcaattggaacaaagcgttttgatagtgaagttagtggtgacagagaagtgcagcgcacaatgttggagttgctgaatcagctagatggattcagtagtgacgagaggataaaggtgatagctgcaactaatcgcgcggacattcttgatcctgctttgatgaggtctggtaggctggaccgaaaaattgagttccctcatccatccgaagaagcccgagctagaattttgcaaatccattcaagaaaaatgaatgtaaaccctgatgtcaactttgaagagttggcacgatctacggacgacttcaatggtgcacaactgaaggccgtttgtgtagaagcaggcatgcttgccctacgccgagatgctacagaggtgacacacgaggatttcaatgaagggatcatacaagtgcaagccaaaaagaagtccagtttaaattattacgcttaa

SEQ ID NO: 3106 - DNA, 1005 bp, Oryza sativa
atggcagcacagggtgttacctccgtgctagcggttgtattggtcatcggagccttcgtgtccatccctacagtgcaatccatcggcgtgtgctacggcgtgaaagggaacaacctcccgccgcggagcgaggtggtgcagctgtacaagtccaagggcatcaacgggatgcgcatctactaccccgacaaggaggcgctcaacgccctgcgcaactccggcatcgccctcatcctcgacgtcggcggcttcgacacggtgtcctatctcgccgccagctcctccaacgcggccgcgtgggtccgtgacaacgtcaggccctactacccggccgtcaacatcaggtacatcgccgtcggcaacgaggtggaaggcggcgccacgaatagcatcctcccggccatccgcaacgtcaactccgccctggcctcgtcgggcctcggcgccatcaaggcgtccaccgcggtgaagttcgacgtcatctccaactcctacccaccctccgccggcgtcttcagggacgcctacatgaaggacatcgcgcgctacctggcgagcaccggcgcgccgctgctcgctaacgtgtacccgtacttcgcctacagggggaacccgcgcgacatcagcctcaactacgccacgttccggccgggcaccacggtgagggaccccaacaacgggctcacctacaccaacctgttcgacgccatggtcgacgccgtgtacgccgcgctggagaaggccggcgcggggaacgtgaaggtggtggtgtcggagagcgggtggccgtcggcgggagggttcggggcgagcgtggacaacgcgagggcgtacaaccaggggctgatcgaccacgtcgggcgtggcacgcccaagaggccggggccactggaggcgtacatattcgccatgttcaacgagaaccagaagaacggggatcccaccgagaaaaactttgggctctcctaccctaacaagtcgcccgtgtatcccatccgcttctag

SEQ ID NO: 3107 - DNA, 999 bp, Oryza sativa
atgactacgcaaggatttgctcccgtgcttgcagtagcattgctccttgcagcatttcctgcagcggttcagtccattggcgtgtgctacggcgtgatcggcaacaacctgccggcggcgagcgacgtcgtgaagctctacaagtccaaggggatcgactccatgcgcatctacttcccgaggagcgacatcctccaggcactcaccggctcgaacatcgccctcaccatggacgtcgccaacgagaacctcgccgcgttcgccgccgacgccaccgccgcggccgcctgggtcaagcagaacgtccaggcctacccgggcgtctccttccgctacatcgccgtcggcaacgaggtcaccggcgacgacacgggcaacatcctcccggccatgaagaacctcaacgccgcgctcgccgcggccggcctcggcggcgtcggggtgtcgacgtcggtgtcccagggcgtgatcgccaactcctacccgccttccaacggcgtcttcaacgacgactacatgtttgacatcgtggagtacctggcgagcaccggagcgccgctgctggttaacgtgtacccctacttcgcctacgtcggcgacacgaaagacatcagcctcaactacgccacgttccagccgggcacgacggtgacggacgacggcagcgggctgatctacacgagcctcttcgacgcgatggtggattccgtctacgccgcgctggaggacgccggcgcgccggacgtcggcgtggtggtgtcggagaccgggtggccgtcggccggtgggttcggggccagcgtgagcaacgcgcagacgtacaaccagaagcttatcagccatgtccaaggaggcactccgaagagaccaggggtggcgttggagacgtacgtgttcgccatgttcaacgagaaccagaagaccggggctgagaccgagaggcacttcgggctgttcaaccccaacaagtcgccgtcctacaaaattagattccactag

SEQ ID NO: 3108 - DNA, 1005 bp, Oryza sativa
atggccaggagacagggagttgcttctatgcttacaattgctctgatcattggagcatttgcttctgctccaacaactgtgcaatccatcggcgtgtgctatggcgttctcggcaacaacctcccgtcgcggagcgaggtggtgcagctgtacaagtccaagggcatcaacggcatgcgcatctactaccccgacaaggaggcgctcaacgccctgcgcaactccggcatcgccctcatcctcgacgtcggcgaccagttgtccaacctcgccgccagctcctccaacgcggccgcgtgggtccgcgacaacgtcaggccctactacccggccgtcaacatcaagtacatcgccgtcggcaacgaggtggaaggcggcgccacgagtagcatcctcccggccatccgcaacgtcaactccgccctggcctcgtcgggcctcggcgccatcaaggcgtccaccgcggtgaagttcgacgtcatctccaactcctacccaccctccgccggcgtcttcagggacgcctacatgaaggacatcgcgcgctacctggcgagcaccggcgcgccgctgctcgccaacgtgtacccgtacttcgcctacagggggaacccgcgcgacatcagcctcaactacgccacgttccggccgggcaccacggtgagggacccaaacaacgggctcacctacaccaacctgttcgacgccatgatggacgccgtgtacgccgcgctggagaaggccggcgccgggaacgtgagggtggtggtgtcggagagcgggtggccgtcggcgggagggttcggggcgagcgtggacaatgcgagggcgtacaaccaggggctgatcgaccatgtcgggcgtggcacgcccaagaggccgggggcactggaggcgtacatattcgccatgttcaatgagaaccagaagaacggggatcccaccgagagaaactttgggctcttctaccctaacaagtcgcccgtgtatcccatccggttctaa

SEQ ID NO: 3109 - DNA, 2610 bp, Oryza sativa
atgaagctctcgccgtcggccggcggcgtctccgaccagccgccgtcgccgccggaagttgcagaggagcagaagtgcctaaattctgagttgtggcatgcatgcgccggccctctcgtttcgctgcctgcggtcggtagtcgggtggtttattttcctcaaggccacagtgagcaggtagctgcatcaacaaataaggaaatggagtctcagatccccaactatcctaacctgccgccgcagcttatatgccagctacataatgtgaccatgcacgccgatgcagagacggatgaagtctatgcgcaaatgacgctgcagccactcagcccgcaagagctcaaggatccattcctacccgccgagctaggcactgccagcaagcagccaacaaattatttctgcaaaacgttaactgctagtgacacaagtacacatggtggattctctgttccccgtcgagcagcagagaaagtatttcctccgctggatttcactcagcagcctccagctcaagagttgatggcgaaagacctccatggaaatgaatggaaattccgtcatatctttcgtggccaaccgaagcggcatcttctgactacgggttggagcgtctttgtaagtgcaaagagactggttgctggagactctgtcctttttatctggaatgacagtaatcagctgcttctgggaattcgtcgggcaaataggccacaaacggtcatgccatcatcagtattgtctagtgacagcatgcatattggtctgcttgctgcagctgctcacgccgcatcaacaaatagccggtttactattttctataatccaagagcaagcccttcggagtttgttataccactggctaaatatgtaaaggctgtctaccatacccgcatatcggtgggcatgcgtttccggatgctttttgaaacagaagaatccagtgttaggagatacatggggacaataacaggaataagtgatcttgatcctgttcgttggatgaactcacactggcgctctgtcaaggttggatgggatgagtcgactgctggagagagacagccaagggtgtctctttgggagatcgagcctctgacaactttcccgatgtatccatctccttttcctctcagactaaagcgtccatggccaacaggcttaccttctttatatggcggaaaggaggatgacttggcttcttctcttatgtggcttcgagatagtcaaaacacaggtttccaatctctgaattttggaggacttggtatgagtccgtggatgcagccaaggctggatagttccctacttggtctgcaacctgacatgtaccaaacgatagcggcggcggcggctttacagaacaccactaagcaagtatcacctgccatgctgcagttccagcagccgcaaaacattgtcggtagatcttctcttctatccagtcagattctgcagcaagcacagcctcaatttcagcagatgtaccaccaaaacatcaatggcaactcaatccaaggccatagtcagcctgagtacctccagcaaccgcttcaacattgccaatcatttaacgaacagaagcctcagttgcagccgcagcaacagcagcaagaatcacaccagcagcaacctcagcatcaacaaatgcaacaacagaaacacttgtccaactttcagactgtaccaaatgcattgtcggttttttcacagctttcctccacccctcagtctacaccctccacattgcagacagtttcaccattctcacagcaacataatttccctgacacaaatatcagttgtctctctccatccaatgtctcatccatgcacgatacactgagatcattcccttcagaagctgcttcagacctcccaggtgtgccaagaatcacccctgtacctgtctctgacccatggtcatctaagcgagttgcagtggaatctacgatcacttctcgcccacatgacatttcatcacagatagagaacttcgacttgacaccttctagtattcctcaaaactccacgttagcaccactgcctggaagggaatgcctggtggatcaagatgggagctctgatcctcaaaatcacttcttgtttggtgtaaatatagactcacagtcacttttgatgcaagatggcattccaagccttcacaatgaaaacagttcaagcacaattccatattccacatccaacttccttagcccttctcaagatgattatccattgagtcaaacactaactactccgggctgcttagatgaatcaggatatgttccatgttcagataatgctgatcaagtgaagcgaccgcatgcaacctttgtgaaggtttacaaatctggaaccgttggaagttgctcgacatcactagatttagcagttatcatgaacttcgtagtgagggaatttgtgaacagtgtgtcttgcataaagatactttcgccgcaggaggttcagcagatgggcaagccgggcattgaactcttctcgacttctgcaaggagacttggcaacagctgtgacaactacatgagcaggcaggaatcaagaagcctaagcactggaatcgcgtcggtgggctcagttgagttctga

SEQ ID NO: 3110 - DNA, 1152 bp, Oryza sativa
atggcttcctgctgcggcggtttcatggagaaggccaagccctacttcgccatgatctgccttcagttcggctacgccggcatgaacgtgatcaccaaggtctcactcaaccatggcatgagccactacgtactcgtcgtgtaccgccacgccttcgccaccatctccattgctcccttcgcgctgatcctcgagagaccggtgatcgaccagaacttctactacgccggcctgaagttcaccggcccgaccttcgcctgcgccatgagcaacatcctgccggccatgaccttcgtcatggctgtcatcttcaggatggagaagctggagctgaagaaggtgaggtgccaggccaagatcgccgggacgctggtgacggtggccggcgcgatgctgatgacgctgtacaagggcccgctcatggagatggcgtggagccggcacgccggcgccggcgtggcggaggcccccgccgccgccgccgccgccatctccggcagggactggttcctcggctcgatgttcgtcatcgtcgcgacgctcgcgtgggcgtccctcttcatcctccagacgcacaccatcaagcagtactcggcgcagctgtcgctcaccaccctcatctgcctcgtcggcacgctccaggccgtcgtcgtcaccttcgccatggagcggcgccgcccctccgtctgggccatcggcttcgacatgaacctcctcgccgccgcctacgccggcatcgtgacgtcgagcatcgcgtactacgtgcagggcttggtgatccagaggacggggccggtgttcgcgtcggcgttcagcccgctgatgatgatcatcgtcgccgtcatgggctccttcatcctctccgagcagatctacctcggcggcgtcgtcggcgccgcgctcatcgtcgtcggcctctactccgtgctctggggcaagcacaaggagacccaggagaagcaggctgacaccaagctatcactgcccacttccaaaggcgccgccgccgctgcggaggcggaggagatcaccggcgccggagaagacgacggcgacggcgacgatgacgcggagcgcagcaagaaccaccgctcgagtggtggcgtgaggtcatcatcggactccaatggacatggagctagtgcggtttga

SEQ ID NO: 3111 - DNA, 1407 bp, Oryza sativa
atggggtcttcggccgagccgccgccgccgtgccacgtcgtggcggtgccgtacccggggcgcggccacgtcaacgcgatgctgaacctgtgccgcatcctcgccgcgcgcgacggcgtcaccgccaccgtcgtcgtcaccgaggagtggctcggcctgctcggcggcgcggcggccgcggcggcgaagggcggcgtccgcctcgaggccatccccaacgtcgtgccctccgagcacggccgcgccggcgacatgctcgggttcgtgcgggccgtgtacaccaggatggaggcgccgttcgagcgcctcctcgaccgcttggctctcggcgcggcgccgccgccgccsgcsgccatcgtggccgacacgttcgtgctgccgtgggcggtcggcgtcggcaaccggaggggcctgccggtgtgcgtcctctcgccgctcagcgccaccatgttctccgtgcactatcacttcgaccgcctgcccacggccaccgacatcgccgatggcgatgaggtcggaaactacattcctgggctgaaatcgatcaggtttagcgatcttgagcccacacacacgaacaagaacatggtagacctcatcctcgaagcctactcccatgccagaaaagcacagtgcgtcatcttcacctccttctacgagctcgagagcaacgccatggacgctctccggcgagacctcccttacccggcgttctcggctggcccttgcatcccatacatggcgctccaagctgacgaacaccacgccggcgacgaggaagaagagccatacatggcgtggctggacgcgcagccggtgggctcggtgctgtacgtctccctcgggagcttcctctcggtgtcacggccgcagctcgacgagatcgccgccggcctcgccgacagcaaggtcacgttcttgtgggtgctccgcggcgactccggcgcgcgagacatcctccgcggcggcggcggcatggtggtgccgtggacggaccagctgaaggtgctgtgccacccttccgtcggcggcttcttcacccactccggcatgaactcgacgctggaggcggtgcacgccggcgtgccgatgctgacgctccccatagcgttcgaccagccgatcgtcgcccggctcgtcgccgacgagtggaggatcgggtacggcctcagggagaacggggacggcggcggctgcagcggcgtcgtcgggagggaggagatcgccgcggcggtgaggaggctgatggtgatggattccgatgcggcggcggcggaagaggcgaaggagatgaggaggagagcttcgctgatgcgagaggcctctcgcgccgcggttcaagagggtggttcttcctacagagacgtgacgtctctgatcaactacatttcagagttcaagaactga

SEQ ID NO: 3112 - DNA, 980 bp, Oryza sativa
atggctcggccgtcgtcgtcgtggtggatggcgctgctcgtcgtcgccgccgtggcgcagctcggcgcgtccgacctgaggacggactactacaacagcacgtgccccaacgtcgagagcatcgtgctcggcgtggtgaaggacaagatgcaggccaccatccgcaccatcggctccaccgtccgcctcttcttccacgactgcttcgtcgatgggtgtgacggctcggtgctgatcacgtcgacggcgggcaacacggcggagagggacgcgcccgacaacctctcgctggcgttcgagggattcgagacggtgaggagcgccaaggccgccgtcgaggccgcgtgccccgaccaggtctcctgcaccgacgtgctcgccatcgccacgcgcgacgccatcgccctgagcggtgggccattcttcccggtggagctgggcaggctggacggcatgaggtccagcgccagcaacgtcgccggcaagctgccgcagccgaacaacaccctcagcgagctcgtcgccatcttcaaatccaacggcctcaacatgtctgacatggtcgcgctctcagcggcgcacagcgtcgggctggcgcactgcagcaagttctcggaccggctgtaccgctacaacccgccgtcgcagccgacggacccgacgctgaacgagaagtacgcggcgttcctcaagggcaagtgccccgacggcgggccggacatgatggtgctcatggaccaggccacgccggcgctcttcgacaaccagtactaccggaacctgcaggacggcggcggcttgctcgcctccgacgagctgctctacaccgacaaccgcacgcggccgacggtggactcgctggcggccagcacgccggacttctacaaggccttcgccgacgccatcgtcaagctcggccgcgtcggggtcaagtccggcggcaagggcaacatccggaagcagtgtgacgtcttcaactg

SEQ ID NO: 3113 - DNA, 1245 bp, Oryza sativa
atgaccgtgatcgacggcgccgtcgctgccgacgccggcggcgcagccgcggcggtggtgcagccggggaacgggcagaccgtgtgcgtgaccggcgcggccgggtacatcgcgtcgtggctcgtgaagctgctgcttgagaagggctacactgtcaagggcaccgtcaggaacccaggcatgcacacacacggacgccataagctactacagctcgttcatgacccgaagaacgcgcacctgaaggcgctcgacggcgccggcgagcggctggtgctctgcaaggccgacctcctcgactacgacgccatctgccgcgccgtcgccggctgccacggcgtcttccacaccgcctcccccgtcaccgacgaccccgagcagatggtggagccggcggtgagggggacggagtacgtgataaacgcggcggcggaggccggcacggtgcggcgggtggtgttcacgtcgtcgatcggggcggtgaccatggaccccaaccgcgggcccgacgtcgtcgtcgacgagtcctgctggagcgaccttgactactgcaaggaaaccaggaactggtactgctacgggaaggcggtkgcggagcaggcggcgtgggaggcggcgcggcggcgaggggtggagctggtggtggtgaacccggtgctggtgatcgggccgctgctgcagccgacggtgaacgccagcgtcgcccacatcctcaagtacctggacggctcggccagcaagttcgccaacgccgtccaggcctacgtcgacgtccgcgacgtcgccgccgcccacctcctcgtcttcgagtccccttccgccgccggccgcttcctctgcgccgagtctgtcctccaccgcgagggtgtcgtccgcatcctcgccaagctcttccccgagtaccctgtccccaccaggtgctccgacgagaagaaccccaggaagcagccgtacaagatgtcgaaccagaagctccgggacctggggctggagttccggccggcgagccagtcgctgtacgagacggtgaagtgcctccaggagaagggccacctgccggtgctcgccgccgagaagacggaggaggaagcccgccaagaatttgctaccaagacagcaggttgtgaaaacccacacaccgatataatcgtgcagcaccgtttgcttaacaatagtagggtgcaaagcaaaactggaaatgaacgtacgaatctacgaacaaaatttggcgagagaaagctctag

SEQ ID NO: 3114 - DNA, 1263 bp, Oryza sativa
atgaccaagaactcgttaggcttttacatttgtttctatgtggaggagtatgttgctgggttcctcgctctctatttgcttgaaattggggatcgattgcgcctttgcgggagcgacctcctcccgttctacgaaatcgagttccatggatgtgatgcttggtttagaaaaaaacaacctgttgaaggtgatgatggtgaacatagagtgaagatattttcttacagtgagttgagaaaggctacccatgattttagtggggcaaataagattggagagggtggttttggctctgtgttcaggggagtgcttagagatgggacaaccgttgccgtaaaggtgctgtctgctacttcaagacaaggcgtccgagagttcttgactgaacttacagcaatttctgacatcaagcatgaaaacctcgtcacacttattggttgctgtgctgaaggatctcataggatccttgtttacaattatcttgagaacaacagtcttgcacagacattgctaggatctaggggtagcaacatccggttcgattggaggacccgtgtaaaaattgctgtgggtgttgctcgtggaattgcatttttacatgaggaaattcgccctccgattatccaccgtgacataaaggcgagcaacattcttcttgacaaggacctcaccccaaaaatttctgatttcggattggcaaggctccttccacccaacgcaactcatgtgagcacccgagttgcaggcacattaggatacctggcacctgaatacgctatccgaggccaggtgacaaagaaatccgacatctatagcttcggtgttcttctactggaaatcgttagcggcagatgcaacaccaacacaagattgccttatgaagatcaatttcttctcgaaaggacatgggtacgctacgagcaagaacgcctggctgagatcatcgatgctgacctggggaatgacctggacgtcgacgaggcatgccggttcctgaagattggcctgctatgcacacaggacgcaatggcgcgccgccccaacatgagcaccgtcgtcaggatgctcaccggggagaagcacttctcggtgcaccggatcaccaggccggccatgatcaccgacttcgccgacctcaaggtcagcagcagccagcagaaggagaacgagacaacacggtcatccaacatgagatcgttcagcaccactgatgaaacggagcctttctcatcgtcagagacgccgacgcagacgtctatctga

SEQ ID NO: 3115 - DNA, 1368 bp, Oryza sativa
atggaagatttacaagattgtgactgcaaaagccttgttgctgttcctggttctgtggttctgcacctctttaggctgtttaatcagcaggataattcctggcagaagtacacattagcctactttcttttggtcaggaatgagtacttctctagggattcaaggaagcattcagatgggaagaaccaacttcttgactgctgtgatgattcagaattagatttggatgtgctgtatgctgatttggatagtaaagaactggagcttaagttgcagaaacctgttgtcaagactcaatcaaaaggtgactcaagtgccagtggatcaaatgattgcttctttcctggccttcacgacgacctggctcaggactgccttgcttgggcgagcagatcagactacccatcgctttcttgtttgaataagaagttcaatttgttaatcaacagcgggtatctgtacagactgagaagaaaatatggcattgttgaacactgggtgtatctagcgtgtagcttgatgccctgggaagcatttgatccttcacgcaagcgatggatgaggctcccaagaatgccatgcgacgagtgcttctcttgtgcagacaaggaatcgcttgccgtcgggacacaactgcttgtgtttggccgtgaatatacaggtcttgctatttggatgtacaatttactggcccgtggttggtcccgatgcactccaatgaacctgcctcgctgcctctttgcctcaggaagctttggtgagattgctattgttgctggtgggtgtgataagaatggacaggtgctgaaatctgccgagctgtacaattcagagactggtcattgggagactttgccagacatgaacttgccgaggaggctctcatctggtttcttcatggatggaaagttttatgtcattgggggtgtgtcaagtcagagggattctttgacttgtggagaggaatacaatcttgaaacaaggacatggagaagaatacatgatatgtaccctggagggactagtgcctctcaatctcctcccctagttgctgttgtgaataatcagctttatgcagctgatcaggcaacaaatgtggtaaagaagtacgacaaaggaaataacacctggaacatagtgaagccattgccagtcagagctgactcttccaatggttggggcctagctttcaaggcatgtggtgatagattgcttgttattggtggccatagagtaccccgtggtgaagtaatattgctgcattcttggtgccctgaagatgggaatggtggtgctgactgggaagtgctctcggtgaaggagcgtgctggtgtattcgtttataactgcgcaataatggggtgctga

SEQ ID NO: 3116 - DNA, 822 bp, Oryza sativa
atggcctgcgcgctcgtggcgctggtgctcgggctctgctgcgtcggcggcgcacgggcgacggggaggatcgacgaggggctggargtgatgtggggcgacggccgggggarcgtttcgccggacgggcaggtgatggcgctgtcgctcgaccaaacctccggctccgggtggaggtccaagaacacgtacctgttcgcgcgcgtcgacctgcagatcaagctcgtcgccaacaactccgccggcacggtcaccacctgctacttcatgtcggaaggggagtgggatatccacgatgaggtggacctggagttcctcggcaacgtcaccgggcagccgtacacgctgcacaccaacgtcttcgccaatggcaccggcggcaaagagcagcagttccacctctggttcgaccccaccaccgacttccacacctactccatcgtctggacctcgcagcacatccttgtgctggtggacgggacgccgatccgggagatgaagaaccacgcggacaaggggatcgcctacccgtcgtcgcagcggatgcggctgtacgggagcctgtggaacgccgacgactgggccacgcagggcgggcgcgtcaagacggactggtcgcaggcgccgttcgtcgcgcggtaccgcaacttcaccgccacggaagccgcgtcgtcgtcgtcgccggcagggtacgaccagcagatggacgccacggcgcagcaggcgatgaagtgggcgcgcgacaactacatggtgtacgactactgcgccgacagcaagcggttcccgcagggcttcccgcccgagtgctccatgccgtag

SEQ ID NO: 3117 - DNA, 2115 bp, Oryza sativa
atgcctgcacctttgatcccttaccggcaagaagaactcaacattctacgaggggacggtaaaattggaccatacaaggagcatgaccgtatctaccgttatgattactataacgaccttggccaaccagacaaaggcagtaaactagtacgaccagtcctcggtggcagccaagaactcccctatccccgtcgaggcagaactggccgggccccaacaaagactgacccaaatacagaaagcaggcttcctctgctggacttgaacatttatgtcccacgcgacgaacggttcgggcacctcaagatgtcagacttccttgggtactctcttaaggctattgttgagggtgttctcccaataataaggacctatgtcgatacgacaccaaaggagtttgattcttttcaagacatcatggaactctatgaaggtggattgaaagtggccaatgcctctgcactagcagagatcaagaagagagttccctttgaacttattaagagtcttttgccagttgctggcgatcaagtcttgaagttacccctaccacatgttatcaaagaggacaaatttgcttggaggactgatgaggagtttgcacgagaaatgctcgcaggagttaacccagtgatgatcaagcgtctgacgaatttcccggcaaaaagtactctggatccaaatgtgtacggtgaccataccagcaagatcaccgaagctcacattaagcacaacatggagggcctcacggtgcaaaatgcactgaagggcaacaggcttttcatcctagaccaccacgatcacttcatgccgttcctggacaagatcaacaagttggacggtaacttcatatatgcgagcaggaccattctgctcctgaaggacgatggcaccctgaagcccctggcgatcgagctgagcctgccgcaccccgatggccagcagcacggcgccgtcagcaaggtgtacactccagccaacaccggcgtcgagagccaaatctggcagctcgccaaggcttacgcctccgtcaacgactctgcttggcaccagctgatcagccactggctgaacactcacgccgtgatcgagccgttcgtgatcgcgacgaaccggcagctcagcgtggtgcaccccgtgcacaagctgctgagcccgcactaccgcgacacgatgaacatcaacgctctggcacggcagacactcatcaacgccgatggcatcttcgagaagaccgtcttcccaggcaagtacgcgctcgagatgtcctccgtcgtgtacaagaactggaagttcaccgagcaggctctccccgtcgatctcgtcaagagaggggtggccgtgccggacccgacgagcccgtacaacgtccggctgctgatcaaggactacccgtacgccgtggacgggctggtgatctggtgggcgatcgagcggtgggtgggcgagtacctggccatctactaccccaacgacggcgtgctccgcggcgacgaggagctgcaggcgtggtggaaggaggtgcgcgaggtcggccatggcgacctcaaggaccaggactggtggcccaagatggacaccgtccaggagctcacccgggcgtgcaccatcatcatctggatcgcgtcggcgctgcacgcggcggtcaacttcggccagtacccgtacgcggggttcctcccgaaccggccgacggtgagccggcggccgatgccggagccgggcaccgaggagtacgcgaagctggagcgcggcggtgacgaggccgacctggtgttcatccacacaatcaccagccagttccagaccatcctcggcatctcgctcatcgagatcctgtccaagcactcctccgacgaggtctacctcggccaacgcgacacgccggagtggacgtcggacgccaaggcgctggacgcgttcaagaggttcggcagccggctggtggatatcgagaaccggatcaaggacatgaacggcaactcggcgctcaagaaccggaacgggccggtgaagatgccgtacatgctgctgtaccccaacacgtcggatgtcaccaaggagaagggccaagggctcaccgccatgggcatccccaacagcatctccatctga

SEQ ID NO: 3118 - DNA, 930 bp, Oryza sativa
atggccaccggtctctccggcggcgctatgaccagcttcgccgtcaagaagccgctcctcgcggccgccgtgcgccgccggtcgtggcccccgccgtcgggccgcgcgctgccgttctcgccgctcacgcggaccccgcgcagccgcgggctcgggaccgtcacgtgcttcgtgccgcagggcacggagagccagcaggccccggctccgtccccgccgccgacggtgcccgtgcccgtgccctcgctggaggaagaggcggctgccgcggcggcgcggcgcatcgcggagaggaaggcgcggaagctgtcggagaggcggacgtacctggttgcggccgtcatgtccagcctcggcttcacgtccatggccgtcgccgccgtgtactaccgcttccattggcaactggagggcggggatgtgccgatgaccgagatgtttggcacgtttgcgctctccgtcggcgcagcggttgggatggagttctgggcgcagtgggcgcaccgctcgctgtggcacgcctccctgtggcacatgcacgagtcgcaccaccgtgcgcgcgagggcccgttcgagctcaacgacgtgttcgccatcaccaacgccgtgccggccatctccctcctcgcctacggcttcttccaccggggcatcgtccccggcctctgcttcggcgcgggcctcgggattacgctgttcggcatggcctacatgttcgtccacgacggcctggtccaccgccgcttccccgtcggccccatcgcgaatgtgccctacttccggcgagtggccgcggcccacaagatacaccacacggacaagttcgagggcgtaccgtatgggctgtttcttggacccaaggagctggaggaggttggtggtctggaagagctggagaaggagcttgcgagaatcaaccggagcttgtga

SEQ ID NO: 3119 - DNA, 792 bp, Oryza sativa
atggcgacggcgaggttgatcctcctgctcacggtggcggcggcggcggcgggctcctgctgcttctgcagcgcccaggaggtgatcgtgggcgtcgtcggcgagcagctggcgacgcgccgccgcgcgcgtccctcgcygccgccgccgtactgcggcagcgtgaggracggcggtggaggcgscacacatcatcggctggaaracgtgccggcggactgcgccgagtacgtctccgactacttgaccggcgagcgatacggccgcgactccgacgtggtgatcaacgaggccatcgcctacgccgagagcctcaagctctccggccatggcaaggagatctgggtgttcgacgtcgatgagaccgccctctccaccctgccctaccaggccaagcatggctatggaactaagccatacgaccacgcgagcttcgtccaatacgtggctggagggagcgcaccggcgctacagggaacactgcgactctaccgacggttgctgcagctcggcatcaagccggtgttcctgaccgaccgcaccgaggaccagagggccgtcaccacccacaacctcctctcgcaaggctactacagctgggagaagctattactccagcctgttgggctccagaccacgactcaggcgttcaagaccggcgagcggcagaaattggtgagcgccggctatgtcatcgtcggtaacatcggtgaccaatggagcgatatcctcggatcaccggagggctaccgcaccttcaaataccccaaccccatatactacgtcgcgtag

SEQ ID NO: 3120 - DNA, 1014 bp, Oryza sativa
atgaagaggggttgtgaagatgaacttggagctggtgatgtgattctacgaggggtggaggaggtagaagaggaagatgatgatgacctggttctccccggattccggttccatcctaccgacgaggagctagtgacgttctaccttcgccggaagatcgccgagaagcggctgagcatcgagatcatcaaggagatggacatctacaagcatgatccctccgacttcctcaagacgagcacggtgggcagcgagaaggaatggtacttcttctgccttcgagggaggaagtacaggaacagcatccgacccaaccgggtcaccggctccggcttctggaaggccaccggaatcgaccgcccaatytgctytgccgccggcggcggcggcggcgactgcatcggcctcaagaagtcgctcgtctactaccgcggcagcgccggcaagggcaccaagaccgactggatgatgcacgagttccgcctcccctccgccgcccgccgacgacctcgccgccggccgctcctcccctcctccgagcctccaagaagcgtttggaccatctgccgaatcttccagaggaacatcacccacaagaagcagccgcagccgcagctcgccgtcgccgccgccgcggtgccggcgccggtgccggacgcgacgagctcgatcaccggcagcctcgagtccgacagcgccggcgacgacgtcgtcgagtacatgaacaccctccagccgccgccggcgagcaacgtgaacggtggctacagcaaccagcgctacttccaggagcaatggaacagtagcagcaatgataataccacagtgtttcatcagcatgcggcggcggcgccaccgccggagccttcgccggcgacggcgatggccggattcggccatgatcagagcgttctcagctcgccggcgccgagcgatttctactacaaggatggatgcaacgatacacatttacaggatggtgatggagctcgccgatccgagcttgttctatga

SEQ ID NO: 3121 - DNA, 1128 bp, Oryza sativa
atggaggaggagaagaggttggaaaggattattaaggagattgacagtccaattagcccaggaggaggagcagctttattagcagaagatgatgatctggtgtttccagggtttcgatttcatccgacggatcaagagctcgtggggttttatctgacaaggaaggtggagaagaagcctttcagtattgacatcatcaaggagatcgatatctacaagcatgatccctgggatcttccaaaggtgagccatggcgcggtggcgctgcagggctcgtcgtcgtcgtcgtcgttgtcgacggcggcggcggcggagaaggagtgcggctatttcttctgccttcgagggaggaagtacaggaacagcatccgccccaaccgcgtcaccggctccggcttctggaaggccaccggcatcgacaagccaatctactcttcctcactcgccgccgccgccgccgccgccggtgccggcgactgcattggcctcaagaagtctctcgtctactaccgcggcagcgccggtaaaggcaccaagacagattggatgatgcacgagttccgactcccctcctccatctccgactccgatcacctccaagacgcatcagagacatggacgatttgccggatcttcaagaggagcatgacctacaccaagggcagggcggcggcggcagcagcatccatgaacaagcgaattagccatgagcttcagcacattcatcatcatcagcagcagcaattctactaccacgaggtagtccatgacggccatggccaccaccatcgtcgccacctgcagcactacgccggcagcgcttccatggcagcggcggcggccaacatcgtcgacgtcatcgatcactcgtcggacgccgagacgacgacgaggtctcactctcactctcagtctcacctcgtcgctgacattcgtcatcgtcagtcgccgttcatgctcgacttccatgctgggacggcgtcgtcgtcgtcgtcgacggcggcggggtggagcgaggtgatgagcttcagtagggatggcgggagcagcagcggcagtagctgggacgagctggggaggatcatggatatctctaccaattctgctaataataattactacttgtaa

SEQ ID NO: 3122 - DNA, 1467 bp, Oryza sativa
atggggagcgacgcggagccggccaaggggctgctgccctacctgcagcgcgccgacgagctgcagaagcacgagccgctcgtcgcctactactgtcggctctacgcgatggagaaggggatgagaattccgcagaaggagcgcaccaagaccacaaactccctcctcatctctctcatgaaccagctggagaaggataagaagtcattgactttggggtctgatgaccatcttcatgtagaggggtttgcattgaatgtctttgctaaagcagacaaacaggatcgtgctggacgagcggacataaacactgcaaaaaccttctatgctgccagcatcttctttgagakcctcaaccaatttggtgagcttcagactgatgttgagcagaaacagaaatatgccatctggaaggctgctgaaataagaaaagctctcaaagaaggacggaggcctgaagctggtcctcctggtggggacaaagatgaagcacctgacagcaccaccacaaattcccatctaacggatatggggcgcagccaatcctttggcagtgggcagcatgggaacgaagcatcatctcagcatgtagatcaggattttagcaggagggatagcttctctgcggtccaaccaggaaataatgcactccggcacagtacagagaagttcaatgaccatgtctctgcccagtcaccttattcaccacmacccccacaatcccagacgcccccacaatcccagttttcatctcctgcacagtcatcttattcctctccgtcatatcaaggaacagattacccttcttctgatgttcacaaaccaccccacggttattcatccgccccatatacaagcacagactaccctaccaatgaggtccacaaaccaccatccaattattcctcaccaccgtacacaagaacagactacccttccagtgatagctacaatccccagagcaatgataaaccagatatccctacttatcctcacacataccaccagccaccctacacaattgaaccgcagcacacatctcaaaactactactctacagaaaccccagctgctccgtataactactctaattttcagtcctatccaagctttcaggacagctcggtaccttctgtcccaactcatcagtcttcgttctatcctgctagtgatggtacaagcgctgtatcatactctccttctggatcgaaccatcctgcaccaacacaataccacccgagtgctgatactactacgcatcaagttactccccctgctatcgcaccaccggctagccaatacaagtatgatagcagttaccagccagaagttgaaaagattgccgaggctcacaaggcagcaagatttgcagttggtgccctcgcatttgacgacgtgtcggtcgctgttgatcacctgaagcgcgcgctggatcttctgacgaacccttccgccgaaactcattag

SEQ ID NO: 3123 - DNA, 660 bp, Oryza sativa
atggggaggagacctgcaaggtgctatcgccagatcaagaacaagccgtaccccaagtcaaggtactgccgtggtgtccctgaccccaagatcaggatctacgatgtcgggatgaagaagaagggtgtggatgagttctcccactgtgtgcatctcgtctcttgggagaaggagaatgtcaccagtgaggctcttgaggctgcgcgtatcgcgtgcaacaagtacatgaccaagtctgcaggaaaggatgccttccacctcagggttcgggttcacccgttccatgtgctccgtatcaacaagatgctttcgtgtgccggggcagataggctccagactggaatgaggggtgcttttgggaagccacagggaacctgtgctagggtgkatattggccaggtcctcctttctgtgcggtgcaagcccaacaatgctgtccatgccagcgaagccctccgtcgtgccaagttcaagttccctggtcgccaaaagatcattgagagtagaaagtggggtttcaccaagttcagccgcgatgaatacgtcaggcttaagagcgagggtagaatcatgcctgatggtgtcaatgctaagctacttggttgccatggtcgcctctctgctcgtgcccccgggaaggccttcctctcagccgcttag

SEQ ID NO: 3124 - DNA, 957 bp, Oryza sativa
atgagatcccttcgccaagatacattcagaggatggtgcaacataaaagctcttcctggagctaatcggttgataaaacatttgaagagtaatggagtaccagctgctttggcttccaactcaccaggatcaaacattgaagcaaaaatttcctgccatcaaggatggaaagagtcattctctgcaattgttggtggcgatgaagtagagaaggggaagccatccccagatatatttttggaagctgcaaaacgaatgaacacaaatcctccaaattgcttagtaatcgaggattccttgtgttgcagctggaaaagctgcaggaatgcatgtatagctgtaccttcagtccccaaaaggactgctgaattcagttctgctgatgaggtgatcaattccctccttgacgtaaggcctgaaaaatggggattgcggccatttagtgattggattgatgataccttaccaatagaaccatggtttataggtggatctgtgattaaaggattcggccgtggttctaaagtactaggaattccaacagccaacttacctgcagaaaacttttccgacgtactatcagagcatacatcaagggtatactttggctgggctggactttcaacgcgaggtatatataagatggtcatgagcattgggtggaacccttattttgataacacggagaagactattgaaccatggttgcttcacgattttggtgaagacttttatggagaggagctgcgccttgttattgttggttacatacgacccgaggccaactttccttcactagagagcttgatagagaggattcacgaggatgcaaggatagcagagaaggccctgaatttaccattatacgccaagtatacagactcgccgtatctaagaaattccttgaaggaggacaattctgctaacgggaaccagtcagtgatagattccaagtga

SEQ ID NO: 3125 - DNA, 960 bp, Oryza sativa
atgagcmtggggcactacaccaacctgacggatccgaggacggagctkgargtggtcagggactggaacggcgtcgaccaggtcgtgctccgytcgccgcggggcgcctacgcgcgggtgagcctgcacggcgggcaggtcctytcctggaggaacgaccgcggcgaggagcttctcttcaccagcagcaaggcaatcttcaagccaccaaaggcgatgcgtggtggaatcccgatatgttttccacagtttggaaattctggaacattggagcaacatggatttgcaagaaacaggatatgggccctagatgaggagcatccaccattaaatcaaaatgataacaacagcaaagcttctgttgaccttatactaaagccatctgaagatgacctgaagtgctggccacatggttttgagttccgcctgagagtttctcttacaaaggatgggaacctgtcactagtatcacgcatcagaaatgttaatggcaagccattcagtttctcatttggttatcacacatatctgtctgtttctgacatcagtgaggtgaggatagaaggccttgagacacttgattatctcgataatcttagccagagagaacgttttacagaacaaggagatgccataacatttgaatcggaggttgaccgagtctatgttagctcaccaaatgtaatagctgttctggaccatgagaagaaacgcacatttgtcataagaaaggaaggactgcctgacgttgttgtgtggaatccgtgggaaaagaaatcgaaaaacatcgtggacttcggcgatgaggagtacaaacagatgctgtgcgttgatgcggctgcagcggagagacaaatcactctgaaaccgggagaggagtggacagggaagcttgagctttctgaagttccatcgactaactgcagtggccatcttgatcaacccggtatcatcatttag

SEQ ID NO: 3126 - DNA, 696 bp, Oryza sativa
atggcggaagcggacggcgaccgtggcgtcgctgccgccgccgccgccgccgccgtcgtccacgacgacgtcctagagtctgacgaggaggacttcaccttcgcggcggcggcggctgtcacgtgtgtggttggaggcggccgcatcggcgctgtcgtgtacccggtcttcggccgcccgcggtcgccgccgccggtgcaggaggtggaggagcctgacacggccaccgtgcgggtgccgctggggcagcttctgctggaggagagggcgtcggcgccgccgtcgggggagcaggccgacgaggatggcgttcttgacggcgtgccggcggagacgtactgcctgtggtcgcccggatcacccgcgccggcggtttctaactctccggcgaggtgccagaagagcggctcgaccgggtcggtcctccggtggcggcagcggctcatcgggcggagccacagcgacgggaaggagaagttcgtgttcttgagctcgggctccgacgtccgtagtaaggggaggacgaccacgacgtcgcgcggcgatgccggtggccgtggcggcggctggagatattacgcgagtggaggcggcaatggcggtggccggaggccgtcgttcctcccgtacaagcaggatctcgtcggcttgttcgccaacgccggcgcgttccgccggagctaccacccgttctaa

SEQ ID NO: 3127 - DNA, 1983 bp, Oryza sativa
atggaggacacggcggcggcggtcgagacgccggtgacggtgtccacattcggtgtatccaggcacccggacacggccaggctcgtgctgagcagccccaagccgccaggcgtgcgcgaggagttcgtcggcgtcgtccgcaaggcgttccggccgcgggcgagcggcggcggaggagcaggccgtacgccgccggcgcggtgggggtgggccctcacggcgctgcagaccgtgttccccgtgctgcagtgggggaggacctacaacttcaagttgttcaggagtgacgtcatggcaggcctcactcttgccagccttggaattcctcagagcattggatacgccaatttggccaagctggaccctcagtatggtctttacacgagcgtggtaccgccgctgatctacgccgtcatggggacgtcgcgggagatcgccatcggccccgtcgccgtcgtctcgctgctgctgtcgtccatggtctccaagatcgtcgacccggccgtcgatccggtcacctaccgcgccctcgtcttcaccgtcaccttcctcgccggcgtcttccaggtctccttcggcttgttcaggttgggtttcctggtggatttcctgtcgcacgcggcgatcgttgggttcatggcaggagcggcgatcgtgatcgggctgcagcagctgaagggattgcttgggctgagccatttcaccaacagcaccgacgtcgtctccgtcatcaaggctgtctgctctgcactccgagacccgtggcaccccggcaacttcttgatcggatgctcattcctcatcttcatcctcgccacgcgattcattgggaggaggtacaagaagctgttctggctgtcggccatctcgccgctgctgtccgtcatcctgtccaccgccgccgtgtacgcgacgagggccgacaagcacggcgtcaagatcatccagcgggtgcacgccggcctcaacccgagctccgccagccagcttcgcctcagcgggccgtacaccgtcgactgcgccaagaccgccatcatctgcgccgtcatcgccctcacggaagccattgctgttggacgatcattcgcgtcgataagagggtacaaactcgacgggaacaaggagatgatcgccatgggatgctcaaatgtggccggatctctctcctcgtgctacgttgcaacaggctcattttcacgaacagccgtcaacttcagcgccggcgcgaggtcaaccgtgtccaacatcgtcatgtccatcacggtgttcatcgcgctggagctgctcatgaagtcgctctactacacacccatagccgtgctggcctccatcattttgtcggcacttccaggcctgatcgacatcaaggaggctctcagcatctggaaggtcgacaagatggatttcctcacatgcctcggcgcgttcgtcggcgtgctcttcggatcagtcgagatcggcctcgccgtagcgctcgccatctcctttgccaagatcatcatacagtcaatccggcctcaggtagaggttcttggtaggcttcaggggacaaacatcttctgcagcatcagacagtaccctgttgcttgccggattccgagtgtattgacaattcggattgatacatcattcctgtgctttatcaactccactttcatcaaagaaaggatcatcgaatggatacgagaagaagtcgagacgtctgatgagaaggccagggagagggtgcaatctgttgtccttgacatgtcaaatgtggtaaacattgacacttcagggatttcggccttggaagagatacacaaggagctggcatctcttagcatacagatggccattgccggcccaggatggcaagcgatccagaagatgaaattggcaggtgtggttgaccaggtaggaggagactggatatttttgacagtaggtgaagcggttgaagcctgtgtaactatgcaaaagggcactgctctggaatgctga

SEQ ID NO: 3128 - DNA, 1347 bp, Oryza sativa
atgcctgtcaatatgatctccaagttacttgagaaggctgttcttccagcactggatgttgcacctcctgtaaaaataggagggcctcggcgtacgagcgtgctgcgcaatccaaacatggagaagcttcagaaggggtacttattcccagagattagcatcaaacgtgaggaacacctgaagaagtacccagatgcgaaggtgataagtttgggtatcggcgacacaactgaacccataccaagcatcgtaacatcagctatggctgaggatgttccatttccattttgtagatatgctcttgcattgtcaactcctgaaggataccaaggttatggaccagaacaaggccacaagaatctgaggaaggaaattgctgacaaggtgtaccctgacatggggataaaagagagtgaagttttcatttcagacggagcacagtgtgacattgctcgtcttcagacgctgttcggtccaaacgtcaccattgccgtccaagatcccacatttccggggtacgtggacaatggcgtgatcatggggcagaccggcaaggcggacgacggcggcaggtacgccggcatcgagtacatgcggtgcgcgccggagaacgccttcttcccggacctktcccggktccggcggaccgacgtgatcttcttctgctcgcccaacaatccgacggggcacgcggcgtcgagggagcagctccggcagctggtggagctcgcgcggcggaacggctccatcatcgtcttcgactccgcctactcgtcctacatctcctcctcctcgtcgtcctccacgccgaggtccatctacgagatccccggcgcgagggaggtggcgatcgaggtgtcgtccttctccaagttcgccgggttcacgggcgtccggctggggtgggctgtggtgcccgacgagctgctctactccgacggggtccccgtggcgcgggacttcgaccgcgtggtgtgcacgtgcttcaacggcgcgtcgggcatcgcgcaggcgggcggggtggcgtgcctgtcgacggaggaaggccgcggcgcagtggcgcgggtggtcggggtgtacagggagaacgcgcgggtgctggtggagacgttcaggtcgctggggaaggaggtgcacggcggcggcgacgcgccgtacgtgtgggtgaggttcccggggcggcggtcgtgggacgtgttcgcggagatcctggagaagacgcacgtcatcaccgtgcctggcagcgggttcggccccggcggcragggcttcatcagggtcagcgccttcaacagcagggacaaggtcctcgaagcgtgccaacgcctcaaaagcttcctcgcatga

SEQ ID NO: 3129 - DNA, 1848 bp, Oryza sativa
atggcggccgccgtgcagctgctcgtcgttgccgccgccgccgccatggcggcggcttgttgcgccggcatggcggrtgakaacacggtggaggtkacctgggacctggagtacgtactgtgggcgccggawtgccagcagcgggtgatgatcgggataaacggcaggttcccggggcccaaaattaccgggggcgccggggacgtgatcagggttaccatggacaacaagatgcaaaccgggggcgtcgtcatccactggcacgggatcagacagtgtcaccgcctcgaactggccactggttttctagcaacccctaaaacaggaaaacacgaagaagattttatttttgaacaggaaaagctcaaatttggcacgccgtgggcggacgggacggcatcgatatcccagtgcgcagtgaacccgggcgagacgttcgtctacaagttcgtcgccgacaagccgggcacctacttctaccacggccacttcgggatgcagcgcgccgcgggcctgtacggttccctcatcgtcctcgactcgccggagcagcccgagccgttccgccaccagtacgacgacggcggcgagctccccatgatgctcctcagcgactggtggcaccagaacgtctacgcccaggccgccggactcgacggcaaggacaggcacttcgagtggatcggcgagccccagacgatcttgatcaatgggagaggacagttcgagtgcacgctggggccagcgaggaagagctttgagaagctcctcaacgagaacgtggagacctgcgtcgacgaccagaagatgtgcagcgaccaggagaagtgcctgaggaggagcgagtgcgggccgtactgccccaggagccagtgcgcccctgtcgtgttcaatgtcgagcaggggaagacttaccgccttaggatcgccagcaccacctccctttctctcctcaacgtcaagattcaagggggggcgccaccccaagacggtgccggcgctcgccatcctcagcttacggcaaacggcaacrcggcgccgccgccgctccagctgcccgccggcgagccccccgtgacgccggcgtggaacgacacacagcgcagcaaggccttcacctacagcatcagggcgcgcaaggacaccaaccggccgccgccggcggccgccgaccggcaaatcgtcctgctcaacacgcagaacctcatggacgggcgctacaggtggtccatcaacaacgtgtccctgacgctgccggcracgccgtacctgggcgccttccaccagggcctccaggacagcgcgttcgacgcktccggcgacccgccggcggcgttcccggaggactacgacgtgatgaggccgccggcgaacaacgcgacgacggcgagcgacagggtgttccggctgcgacacggcggcgtggtggacgtggtgctccagaacgccaacatgctgagggaggaggtgagcgagacgcacccgtggcacctccacggccacgacttctgggtgctcggctacggcgacggccggtacgacccggcggcgcacgcggcggggctmaacgccgccgacccgccgctgcggaacacggcggtggtcttcccgcacgggtggacggcgcttcggttcgtcgccaacaacaccggcgcgtgggcgttccactgccacatcgagccgcacctccacatgggcatgggcgtcgtcttcgtcgagggggaggacaggatgcacgagctcgacgtgcccaaggacgccatggcgtgcggcctcgtcgccaggacggccgccacgccgctcaccccggcaacgccgctgcctccgtcgccggcgccggcgccatga

SEQ ID NO: 3130 - DNA, 1419 bp, Oryza sativa
atgacgacaaagacctttgtgctgttcccgtcgctgggcgtcggccacctgaaccccatggtggagctagccaagcacctgcgccgccgcggcctcggcgtcatcgtcgcggtgatcgatccgcccaacaacgacgccatgtcggccgacgcgatggcgcgcctcgccgcgggcaacccttccgtcacgttccgcatcctgccggcgccggccagcccggaccccggcgcgcaccatgtcaagcgcaacctcgacacgctccggctcgccaaccccgtgctccgcgagttcctccgctcgctgcccgccgtcgacgcactcctgctcgacatgttctgcgtcgacgcgctcgacgtcgcggccgagctcgccatccccgcctacttcttctttccctccccggccagcgtcctcgccgtcttttcccacctcccgtattactaccgcaacgcgccgtcgttgagggagatggataaggcggcgctcatccgatttcccggcattccgccgatccgcaacgtcgacatgctggcgacggtgaaggacaaggagagcgagacgaccaagatcaggttgtaccagttcaagcggatgatggaagggaagggcgtgctggtgaacagcttcgactggctggagcccaaggctctgaaagcgctcgccgccggtgtctgcgtgcccaacgagcccaagcagagagtctacttcatcgggccactggtcgacgcccgcaagaaggtagggagcggcgccgagaggcacgcgtgcctcgcgtggcttgacgcccagccgcaacggagcgtcgtgttcctctgcttcggcagccagggcgcgttcccggcggcgcagctgaaggagttagctcatgggctggagagctccggccaccgattcctgtggaccgtgaggagcccaccggaggagcagtccacatcaccggagccggacctggagcggctgcttccggcggggttcttggagaggacgaagggcagaggcatggtggtcaagaactgggtgccacaggcggaggtggtgcagcacgaggcggtaggcgcgttcgtgacgcactgcgggtggaactcgacgctggaggcgatcatgtcggcgctgccgatgatatgctggccgctgtacgcggagcaggcgatgaacaaggtgatcatggtggaggaaatgaagatcgccgtgtcgcttgacgggtacgaggaaggagggttggtgaaggccgaggaagtggaggctaaggtgaggctggtgatggaggccgaggaagggaggaagctcagggagaggctggtggagacgagggacatggcgttagatgccatcaaggaggctgggtcttctgaagtggcatttgatgagttcatgagagatttggagaagagcagcttggagaatggagttcgcagctga

SEQ ID NO: 3131 - DNA, 1170 bp, Oryza sativa
atggaagagcataggcttggcggcggcggcggcggaggcggaggcggggggaggccgccgatcccgggggcggcggggaggaagcttccggggctttcgcggcacgcctcgttcgagcaagcaggtccaagatactttgcttcaagatctaaaacgtcaactattttgatactggagggagtgaggagtcctgcaaacagtacaaaatctggaactgagaaaacttttgaaaacatggatgctgttgcatatatgcctgttgtaaggtctggaggttgggctgatattgggtcaaggcacacaatggaggatgtctttatttgttctgataacctcatgaaagagtttggagttgaaagttttgaagatggtccgagcgcattttatggggtttttgatgggcatggtggaaagcacgctgctgactttgtgtgcagcaatttggcaaggtttatcgttgaggatgaggattttccaagggagatagagaaagctctgtcctcagcgttcttacagactgatgctgctttcgcagatgcttgttctgtgaactcctctcttgcttctggcacaactgctcttgctgctcttgtggttgggaggtcacttctggtagcaaatgctggtgattgtagagcagtactttgttgtcgtggaaaagccattgaaatgtccagggatcacaagccttcttgcaacagagagaaggttcgcattgaagcctctggtggttatgtttatgatggctacctgaatgggcagcttaatgttgcgcgggcaataggagactggcacatggaaggaatgaaggcatgtgatggtcttggacctcttagtgctgagcctgaggtgatgatcaggaatctcactgaggaggatgaattcctcatcatcggttgtgatgggatctgggacgtattccgcagccaaaatgcggtagactttgcacgccgaaagctccaggagcacaatgatcctgttacctgttgtaaagaacttgttgatgaggccatcaagaggaagagcggcgacaacctttctgttgttgtcatctgcttcaactctcggccgcctcctgtcctaacaactccaaggcctcgtgtacagaggagtatatctgcagaaggcctgagggagttgcaaagctttcttgatagcttggctgattga

SEQ ID NO: 3132 - DNA, 579 bp, Oryza sativa
atgcaggcgagcaaatacagaggctactaccacgacgaggcatcgtcggccgccggcggcggcggcggcggcggcggcggcgacgggtacaggagggagaagcaggtgaggaagaagcggctgacggcgcagaagaggaaggagatcaaggaggcgttcgacctcttcgacaccgatggatcaggtaccattgatccaaaggagctcaacgtcgccatgagagcactggggtttgagatgacaccagagcaaatacaccagatgatcgcggaggtggacaaggacgggagcgggacgatcgacttcgacgagttcgtgcacatgatgaccgacaagatgggcgagcgcgacgccagggaggagctcaacaaggccttcaagatcatcgacaaggacaacaacgggaagatctcggacgtggacatccagcggctggccatcgagaccggcgagcccttcacgctggacgaggtcagggagatgatcgaagccgccgacgagaacggtgatggcgaggtcgaccacgaggagtttctcaagatgatgaagaggataggatttggggccgggtttttttag

SEQ ID NO: 3133 - DNA, 1880 bp, Oryza sativa
atggcgagcatggagggtctgatcggcctgatgaaccgcatccagcgagcctgcaccgccctcggagaccacggaggtggagaaggagccaacctccctaccctctgggagtctctccccaccatcgccgtcgtcggaggccagagttcgggcaagtcctccgtgctagagagcattgttggcagagatttccttccccgtggttctgctcttgttcgtcaagaaattgcagatgagacagatagagtgactgggaaaactaaacaaatatcccctgtgccaatacatctcagcatctactcacccaacgtcgtgaacttaacattgattgatcttcctggattgacaaaagtcgctgtagagggacaacctgaaagtgttgttcatgatatagagaatatggttcggtcgtatgttgagaagcccaattgtatcattttggctatatctccagcaaaccaggacattgccacttctgatgccattaagctttcgaaggaggttgacccatcaggtgagaggacattcggtgtgttgacaaagttggacttgatggacaagggaacaaacgctcttgatgttcttgagggaagagcctatcgtcttcagtatccgtgggttggaattgtcaaccgctcacaagcagatattaacaggaaagttgatatgattgttgcaagagaaaaggaaagagagtattttgaaaatagtcctgattatgcacacctagccagtaagatgggttctgtgtatctagctaagcttctttctcagcatcttgaagccgttattaaagcacgcattcctagcatcacatcattaatcaacaaaactatagatgaacttgaatcggagctggataccattgggaaagaagtggctgctgatccaggggctcaactgtacactatattggagctctgtcgtgcttttgaccgtgttttcaaggaacatctggacggagggagatcaggtggtgataaaatttatggcgtgtttgatcataagctccctgccgcttttaggaagctgccttttgatcgttatctatccgtgcaaaatgtgaagaaggtggtatcagaagcagatggctatcagcctcatcttattgctcctgaacaaggttaccgtcgtcttgttgaagccggccttgcgtatttcaagggaccagctgaagctacagtcgatgcggtccatgttgttttaagggacttggtgaggaaatccataggagagacagagccactgagaagattccctaccctgcaagctgcgattgcaactgctgctaatgaagctctggaaaggtttcgggaggatggacgtagcactgcacttcggcttgttgacatggaggcatatttgacagtggaattcttccggaaactcccgcaagatccagatagtggcagcaaggttgggaataataccaatgaatccaatggctcaggctcaggctcagtgacagtggaccgctacggcgacgggcactacaggaatatcgcgtccaatgtgtcccagtacataaagatggtgggagaccaactgttacacaagatcccaaaggcggtggtgcactgtcaggtccgagaagccaagaggtctctgcttaaccatttctacgtgcacatcgggaagaaagaggcgagccagtttgggcatttactggatgaggacccagcgatgcttgagcgtaggcagcaatgctggaagaggttggagctgtacaaatcggctagggatgaaatcgactctgtcgcatggaccagggagatwacaaaggcagaaaagtgcataaaaagraaaagaaaatccgcaaaaaaaaggaaagaaaaacaacaacaacaacaacaacaacaaaagtctgtttcycctaagtg

SEQ ID NO: 3134 - DNA, 1245 bp, Oryza sativa
atggccgcggcgatcatcggcgtcggcggcggcggatggacgcgcctccgcagcatcgggcacggcgcgtccggcgccacagtgtctctcgcggcggacgacgcctccggcgagctcttcgtcgtgaagtcggccggtgatgcggtcgccgccacggcgaggcagcagctccggcgagagtggagcgtcatgtccgggctctcctcgccgcacgtgctcaggtgccttggctttgtccaggccgccgccggcgccggcggcgagcaccagctgctcctcgagtacgcgcccggcggatcgctcgccgacktgktggcgagaaacggggatcgcctcgacgaragcgccttcagggcgtacgcggcggacgtgctcagggggcttgattacctccacgagaagctcgtcgtgcacggcgacgtcaaggggagtaatgtgctcgtcggcgccgatggccgcgccaagctcgccgacttcgggtgcgcgagggtggtgatgcccggtggttcgaagcagccggtgctcggcggcacgccggcgttcatggcgcccgaggtggcgcgcggcgaggagcaaggcccggctgccgacgtgtgggcgctgggctgcaccgtcatcgagatggccaccggccgcgccccgtggagcgacatggacgacgtgctcgccgctctccggatgatcgggtacacggacgccgtgccggacctgccgccatggctgtcaccggaggcgaaggacttcttgcgccggtgcatgcaacggcgcgccggcgaccggcccacggcggcgcagctgctacagcacccgttcgtctcaaagtcatgcggtctcaagaaagaagtcgtgaaggcgacatgggtgtctccgacgagcgcgctcgacgcagcggcggcgttgtgggagtccgagacgtcgtcatcgacagacgatgaggaagctgacgacatgtcgaacagccccaccggccggatcatagcaatggcatcctccggcggccagacattgccggactgggactccgacgaccatggctggatcgaagtactcggcaccgtctccattaacatagcaaaaaaaaaaacagcagcagcagaagattacgaagcttcagagtctccggccaagagggtgagagcaatggcgtgctcgccgtcgtcggtgccggactgggactccgacaaccatggttggatcgatgtcctcagcgcgtcaccggccgacgacaatggcgagcaagggtag

SEQ ID NO: 3135 - DNA, 1065 bp, Oryza sativa
atggtggtgctcgcgaagccggcggcgctggagcagatctcgctggtgaggtcgccgtcggtggaggataacttcggcgccgggttgccggtggtggacctggccgcggacggcgcggcgggcgaggtggtgcgggcgtgcgagaggtttgggttcttcaaggtggtgagccatggcgtcggggagggcgtggtgggtaggctggaggcggaggccgtccggttcttcgcgtcgccgcaggcggcgaaggacgcgcacggccccgcgtcgccgttcgggtacgggagcaagcgcatcggccgcaatggcgacatggggtggctcgagtacctcctcctcgccatcgacggcgcgtccctctcccgttcctcccccgcaccgtcgtcctcgctccgggacgcggcgaacaagtacgtgggcgccatgcgggggatggcgaggacggtgctggagatggtggcggagggcctcggcgtggcgccgcgcggcgcgctcgccgacatggtcgtcggcgacggcgcggcgagcgaccagatcctccggctgaaccactacccgccatgcccgccgctgctgcagaacctgatgcccaactgcagcccgaccgggttcggcgagcacaccgacccgcagctcatctccatcctccactccaactccacctccggcctccaggtcgccctccaccacgacgccgacgccggcgaccaccagtgggtcaccgtccctcccgaccccgcctccttcctcgtcatcgtcggcgactcgctgcaggtgatgacgaacgggaggatgaggagcgtccggcacagggtggtggccaacaagctcaagtcgagggtgtcaatgatctacttcggagggccgccattggagcagaggatcgcgccgctgcggcagctgctggtggccggcgtcggcaacggcgaggaggaggagcagagccggtacgaggagttcacgtggggggagtacaagaaggctgcctacctctcccgcctcagcgacaaccgcctggcccccttccaccggcagccaccacctgtcgctaacccactcgcctaa

SEQ ID NO: 3136 - DNA, 516 bp, Oryza sativa
atggcggaccagctcaccgacgaccagatcgccgagttcaaggaggccttcagcctcttcgacaaggacggcgacggttgtattactactaaggagttgggaactgtcatgcgttcgctggggcagaacccaactgaggcagaactacaagacatgatcaatgaggtggatgctgacggcaatggaacaatcgatttccctgaatttctcaacctgatggcccgcaagatgaaagatactgattctgaggaagagctcaaggaggcgttccgtgtgttcgacaaggaccaaaatggttttatctctgctgctgaattgcgtcacgtcatgactaaccttggtgagaagctgacagatgaggaggttgaagagatgatccgtgaggccgatgttgatggtgatgggcagatcaactacgatgaattcgttaaagtcatgatggccaaatgtaattttgtggggatagatatgttccaaaccgaaattcttgatattcagagacatcctatgctgtag

SEQ ID NO: 3137 - DNA, 1296 bp, Oryza sativa
atgccctttgctgcagagtttgatatgttggcatttaataatccaattgagctactgagcaatgcatatgtgctgtgcatgggacctacacataggtctatcaaattagggactaccagaaaacaatataaacagttgggtttccccattaagaaagctggcaaagtttgcctatggcacgtttttcttgaaccaggtcagcttgctcttgctgctgcttctgactctgacagatccaaggacaaacatgaagatcaaaagcaatattttccttatcactttgtagacattgcgtcggctcgcccaaaatcgcgaggctgcaaggaagagtcgtttgaggaaaagattcatggaaaatggaaaagttttgccaaaattctatggggaatcacttgcaaaaatcggctgggtatggggattggatgctggtcgggacatggcagagagctccaagggtatataggcatgcaagacttgcagtctcgcacagtgccctccaattctgggcagttgcaggcatatgttcaacaattggagaatagcaggctaaagcttacacaactagaacaagaattgcaacgagctcgtcagcagggcatttttatatccagctcagtggaccagactcattccatgagtggaaatggggcattggcttttgatatggagtatgcacgttggttggaagaacacaataggcaaattaatgagctaaggtctgcagtcaatgctcatgcaggtgataatgagctccgtggtgttgttgacaagatcatgtcacactatgaggagattttcaagcagaaaggaaatgcggccaaagcagatgtctttcatgtgttatcaggcatgtggaagacaccagctgagaggtgtttcttgtggctaggaggattccgaccatccgagcttttaaagcttgaacctctcactgagcagcagctgtcagggatagccaaccttcagcagtcttcacaacaagctgaagatgctctttcacaaggaatggaggcccttcagcagtccttggcagaaacattggctgggtctcttggttcttctggatcaacgggaaacgtggcaaactacatgggccaaatggcaatggccatggggaagcttgggacccttgagaattyccttcgccaggctgacaacctgcggcagcagactcttcaacagatgcaaaggatactgaccactaggcagtctgcccgtgcgcttcttgtgataagcgattactcttcgcggcttcgtgcccttagttccctctggcttgctcggccgaaagaatag

SEQ ID NO: 3138 - DNA, 1554 bp, Oryza sativa
atggaggtgacatccaccccagcgatgctgctctacgccgccctgttcgcggcggcgctgctgtacctcgccgtcgcggtccggcgcggccgcggcgccggcctgccgccgggtccgacggggctgccgctcgtcggcagcttgctgtccctcgacccggagctgcacacctacttcgccggcctcgccgccaggtacggccccatcttctctatccgcctcggctccaagctcggcgtcgtcgtcacctcgccggcgctggcgcgggaggtgctgcgcgaccacgacctcgtcttctccaaccgcgacacgcccgacgccgcgtgctccatctcctacggcggcgggcagaacatcgtgtggaacccggtcggccccacgtggcgcctcctccgccgcatctgcgtccacgagatgatcggccccgccggcctcgacagcctccacggcttccgccgccgggagttcatggccacgctccaccacctgcgcgcgcggtccggcgagcccgtcaacgtcggcgcgcagatgttcctcaccgtgatgaacgtggtgaccggcgcgctgtggggcggcaacgtcggcagcgagagcgagcggacgacggtggggaaggagttccgggagctcgtcgccgacatcaccgagttgctcggcgcgcccaacgtgtccgacttcttcccggcgctggcgccgctcgacatccagggcatccgcaacaagtccgacctgctcaaggaccgcttcgacgacatcttcgccaggatcatccagaagaggaccgagtccgaccatgccgccgccgccggcgagacggcgtcggacttcctcgagtacatgctcaagctggagaaggaaggcggcgacgggaagaccgccttcaccatgaccaacgtcaaggccctgctcatggacatggtgatcggggggacggagacgacgtcgaacaccgtggaatggggcatggcggagatgctccagaacagggggacgctgcgcaaggtgcgggaggagctcgacgcggtggtggggcgcgacggcgtggtggaggagagccacctcccgaagctgcactacctgaatctggtggtcaaggagacgctccggctgcacccggcgctgccgctgatggtgccgcactgccccggcgaggacgccacggtgggcggccaccgcgtcccggcgggcgcccgggtgttcgtcaacgtgtgggcgatccagagggacccggcggtgtggaaggacccggaacacttcatcccggagaggttcttgccggcggacggcggcggagggcggaggctggacttcaccgggagcgagcaggagtacatgccgttcgggtccgggaggaggatctgcgccggcgtcgccatggcggagcggatggtggcctactcgctggcgatgctggtgcaggcgttcgactgggagctgccggccggcgagcggctggacctcgccgagcggttcggcatcgtgatgaagaaggccacgccgctggtcgccgtgcccacgccgaggctctccaaccctcagctctactccgcctag

SEQ ID NO: 3139 - DNA, 5115 bp, Oryza sativa
atgtcgtcgccggctgcgggcgaggccgacgccgccgcccgcgtgctcgcccgcgccctcgacaaggtcatcaagcactcctcctggcgcaagcactccgcgctcgtcgccgcctccaagtccgccctcgacctcctctccgcctccccggatgtcgacgaggccgcctccgcctccgcttcccctatccagggggtcgccgcggccgccgccgacgcggcaatccgcgctctcctgatcgcgctcgacccgggctcccccaaggtcgccgagcccgcgctggaatgcgtytcaaccytcytttccctcsgcytcytcmacggcraggtcgtagccktcgctgccgctggcgctgctgacgccgacgacgccgcctcgccggtatccaagctcttcgcggccgtggtctcctgcggggggctcggggacgagggcctcgagctcgccgcgctccgcgtgctggtcgccttcgcgcggtgcccctcggtctccgtctccggggactgcctgggccacgtcgtgagggcgtgctacaacctatacctcggcagcgcgarcggcgggaaccagctctgcgcgaagctggcgctcgcgcaggtgctcgccatcgtgttcgcgcgcgtcgaggcggatgccatggacgtgcgcgtgcgcaccgtctccgccgccgacatgatggacctctccgatcgcagcctgaatgactccagcgtagtgcaggcggcacaggcgttcataaacgaggcaatggaggggagcgatgtgccagaggaggttcccccatcggatttgccagctgaggcagatgaaaatggagatgatgtggggatgagcaggatcagggaggatgggctggcattgttcaaaaacctttgcaagctgtcgatgaagtttgccacgccggataaccccgatgatccggtgctgctgcgggggaaggttttgtcacttgagctgcttagaacagtcgttgacaatgcagggccattctggaaatcaaatgaaatgtatcttgaagcgattaagaagcacctatttttatcattgctgaagaacagtgccttgtcagcaatgagtgttttccagcttctgtgctccatttttgttggtctgctgtcaaggtttagatctggcttgaaagaggaaattggattattttttcctatgcttatcctaagagttcttgaaaatgtccttcagcctagctttctgcagaaaatgacagttctaaactttttggagaaaatatgtaaagagcctcaggttatcattgatatttttgtgaactatgattgtgatgttgatgcgccaaatatttttgaaaggattgtcaatggactagtaaagactgctttaggtgtccctgctggatcaacaacaacattaactgttgcacaagaccaaacatttcgaattgaatctgtcaagtgccttgcagttattgttaagtcaatgtgttcatggatggaccgacaactgagaattggtgaattttccctgattagttcagaaactccaggctcaatggacaatcatactaccaatggagatggaagtggaatggattatgacatgcaacctgacacaagcagctctgacatatctgattcttcctcacttgagcaacgacgtgcttataaaatagaacttcagaaaggaattgccttgtttaacaggaagccttccaaaggtatcgattttcttgtccgcagcaagaaaataggccattcgccggaagatgtggctcttttcttgaaaaacactgctggcttaaatgcaacaatggtaggagactatttgggtgaaagggatgacttccccctaaaagtcatgcatgcttatgtggatgcactgaactttaaaggcatggacttcggtgaagcaatcaggtttttcttgcaaggtttcagattaccaggggaagcacagaaaattgaccggatcatggaaaaatttgctgaacgctactgtaaatgcaatccaaatgcttttactagtgcagatactgcctatattcttgcttactctgttatcttgctaaacactgatgctcacagtgtcatggtgaaagataagatgtctaaggctgatttcatgcgcaataaccgaggaattgatgatgggaaggacttacctgaagattatcttagtgcattatatgaccaaattgtcaataaggaaattaaaatgagtgctgattcttcaacgacacaaatcaaacaacccaatagcataagcaagcttcttggcttagacaatatcatcaattttgtcaactggggacaggcagaagacaaagcattaggtgcaaatgacttgctcattaagcacatacaggagaaatttaaagcaaaatgcaggaaatcggagtctgtgttctatactgtttctgatgcaaccattttaagattcatgatggaggcctgttgggctcctatgatggcagcattcagtgtgacactagaccaaagcgatgataaggcttctgcagcgcagtgtttaaagggattaagatttgctgtgcatatcacatctgttatgtgcatgcagacacagagagatgcttttttgacaaccatagccaaattcacatccctccattctgctgcagacatgaaacaaaaaaatgtcgatgctatgaaggctattatatccatcgcaatcgaagatggcaattacttgcaggaagcatgggaacatgtattgacttgtttgtcacggtttgagcatttgcacctgcttggagaaggggtacctactgactcgtcgtttcttacagtacccttagttgagtccgaacaaaaaaatcataagtccagctctggtctatcttcaaagagaaccaatgctcttcagaatcctgctgtaatggctgctgttagaggaggttcttacgacagcacagtggcaaaaaccagtgcctcgtcattggttactcctgaacagatcagtaatttcatatcgaacttaaatttgttggaccagattggtattgttgagttaaatcatatatttacccacagccaaagattaaacagtgatgccattgttgcttttgtgaaagctctttgcaaggtctcaatgactgagttgcagtctccaacggatcctcgtatcttctgccttacaaaaatagtagaaatcgcgcattacaacgtgaaccgcatacgtttggtgtggtctcgaatttggaaagttctgtcagaattttttgtatctgttggactgctagaaaatctttctgttgcaatatttgtgatggattctctgaggcagctggcaatgaagtttctggaaagagaggaactggcaaactataacttccagaatgagttccttagacctttcgtgattgttatgcagaagagtaatgctccagaagtacgagagctgattgtccggtgtgtctcacagatggttctaagtcgtgtcaacaacataaaatctggctggaagggtgtttttatggtatttacttctgctgcagctgatgatacaaaaagtattgtcctattggcatttgaaactatggaaaaaattgttcgagattactttccatacataactgagacggagaacaccacattcactgattgtgttaactgtcttattgcgtttacaagcagccaatttaatagtgatgctaatctcaatgctattgcgtttctccgattctgtgctgttaaacttgccgatgaaggatttggttgtcaggaaaagtgtactgatgaacccaggaatttaggcatgtcagatggaaatgccactgtggacaaggatgattctatttccttatggattcctctccttgcaggtttagctaaattgactagtgattcaagatcaaccatcaagagaagtgctgtgggagtactttttgacattttgaaggatcatggacaactcttctcagagtccttttggaccaacatccttgaatctgttatttatcctctatttagcagtgaaaggtcttcatcaaatgatccgacctcaacaccgagtatccctgaggatgacttttcaaatcttgaaacccaaacattggcagtgaaatgtttagtgggtttgtttattaatttctttgatgtgatgcgtccagaacttgctagggttgcatctatagtcacatattttatccgaagtccctacaaacattctgctagcataggtgtatctgctttgatgcgcttaattgagggagttggtggtgaactttccaaggaggaatggaaagacatattgctgcgcttcaaggaatcggtggcacatacttttcttgtattctccaaaattgtgagaatgatgcaagatattgaaattcctgatagatttgaatcttattcagaaaatgatcagtactcagatcatgaaaattatggtaatgaagaagaggaagctaatatggagacaacttcttatgctattgtcaaactgaagaatcatatggctctgctcctcttagttgttcagggaataattaaattatatgaagaacacagaaaatatctgtcttccgatcatattaatattcttttggagatgatatcagctattgcgacacatgcaagtgaatttcataaagcatgttcccttatggaagtatctgagccagcaattgtccatttcgaaaatgagtcataccagacctacctcaagcttctgcaagcgctgtttcgtgactatccatccatgtcggaagaaatggacattgaatcacaaatacttcgtgtttgtgagaaaatacttcggatatatctacagtgtgcacagcgagaaccatccaatgaagctttgcacagaaacgcatctatacattgcatagtgccactgggtgctgctaaaaaagaggaattggctgctaggacttcattggtcctcctcgtgatgcagttactgggaaacctggaggaggattcatttaggagagtactgccctggtttttcccgttgctagttgatctgatccgttgtctacgattttgttactctattttgttcacgttattccagttaactaagggggcccaggactatctttcgacatccttgatttatcttatctgtttcgaaatcctggagttcaagtttaatatgatcaatccagatacgtga

SEQ ID NO: 3140 - DNA, 1299 bp, Oryza sativa
atggagattgagagagagagcagtgagagagggagcatcagctggagagctagtgcggcacatgatcaagatgccaagaagctcgacgcagatgatcagctgctaatgaaggagcctgcatggaaaaggttccttgcccatgttggtcctggattcatggtgtctttagcctacttggatcctggcaakttggaaaccgatctgcaagccggagccaaccacagatatgagctgctctgggtgattctgattggactcatcttcgcacttatcatacagtcgctagcagctaatcttggagtggttacagggaggcatctggctgagatctgcaagagtgagtaccccaagttcgtcaagattttcctatggctgctggcagagttggccgtcatcgctgcagatatcccagaagttatagggacggcctttgctttcaacatattgttccatattccggtgtgggtcggcgtcctcatcaccggcaccagcactctactgcttcttggcctccaaaaatacggggtgaggaagctggagtttctgatatcgatgctggtgttcgtgatggcggcgtgcttcttcggggagctgagcatcgtgaagccgccggcgaaggaggtgatgaaggggctcttcatccccaggctcaacggcgacggcgccaccgccgacgccattgccctcctcggagctcttgtcatgccccacaatctgttcttgcattctgccttggtgctatcgaggaagacaccggcatcagtcagaggaatcaaggacgggtgcaggttcttcctgtacgagagcgggttcgcgctgttcgtggcgctgctgataaacatcgccgtcgtctccgtctccggcaccgcctgctcctccgccaacctctcccaagaggacgccgacaagtgcgccaacctcagcctcgacacctcctccttccttctcaagaacgtgctgggcaagtcgagtgcgatcgtgtacggcgtggcactgttggcatctgggcagagctccactattaccggcacatacgctggacagtacatcatgcagggtttcttggacatcaggatgaggaagtggcttcggaacctgatgacaagaaccatcgccatcgcgccgagcctcatcgtctccatcatcggcggctccaggggcgccggccgcctcatcatcatcgcttcgatgatactgtccttcgagctgccgtttgctctcatccctcttctcaagttcagcagcagtaagagcaagatggggccccacaagaactctatctatcaaatgtacaagtaa

SEQ ID NO: 3141 - DNA, 798 bp, Oryza sativa
atgaaccgatggctatggagaagagaagcaactgccagtgtgaaagatgatgagcacgtctatagtgctcccaatgttgacccgaagaacaaggcacggattagtatgtctcaatttggtgtgcctgctatgatgatggatgaattgcctttgactttttggggaataccttttgagaatgggagtagcccaatcagacagggcagttcctcccaattgttattgcccttgggtgatcagatgcaatggagttttattagcactattctttgtgaccttgaaccttattggcaggtgcagttggtgttccttacaatggcacaagagagctggaaaaaggaggcagaggagactggagtccacacacctgaggcccctatattgtgcgttaacaactgtggcttctttggcagccggatgacagaaaacatgtgctcaaagtgttatagggacaccgttaaggccaagacagtggccactgttgtggagaagaaacctcttgcttcattgtcttccacacctttggtgacagaagtcacagatggagggtctggttcagttgcagatgggaaacaagtaatggaggaggatacaccaaagccacccagtaaccgttgcttatcatgccggaagaaggttgggttgacaggattcaagtgccgctgcggaggcaccttctgttcaatgcaccgctatgccgattcacacaaatgcacatttgattacaagcaggtcgggagggagcagattgccaaacagaatcctcttgtgaaagctgacaagatcaccaaaatctga

SEQ ID NO: 3142 - DNA, 732 bp, Oryza sativa
atggcgacggcgaggttgctcctagtgctcacggtggtggcggcggcgggcagctgcttctgcagcgcccaggaggcgaagccgccgccgtactgcggcagcgtgaggacggccattgaggcgcacaacatcatcggctggaagacgttcacggcggattgcgccaaatacctcgccgactacctcaccggcgatcgatacccccgcgacgccgacgtggtgatcaacgaggccatcgcctacgccgagagcctcaagctctccggcagcggcaaggagatctgggtgttcgacgtcgacgaaaccgcgctctccacactgccctaccaagccaaccatggctacggagttcagccatatgatcaggcaagcttcatccagtacgtgtccgagggaagcgcaccggcgctgcaggggacgctgcggctctaccaacggctgctccagctcggtgttaagccagtattcctgactgaccgcaccgaggaccaaaggacagtcaccaccaacaacctcctctctcagggttactgcagctgggagaaactgttgttccagccggttgggcttcagaccacaacacaggcgttcaagactgatgagcggcagaagcttgtggacgccggctatgtcatcgtcggcaacatcggcgaccagtggaccgacatcctcggctcgccggagggctgccgtacgtttaagtaccccaaccccatgtactatgtcgcctag

SEQ ID NO: 3143 - DNA, 1329 bp, Oryza sativa
atggcgttcgtggcggcgggcaacatcctcctcgagtactgcatcggcggcgcggcggtggcgcgcgcgtggacctcctacttcgccaccctcctcaaccaccaccccaacgacttccgcatccacgccgcctccctcgccgccgactactcccgcctcgaccccatcgccgtcgccgtcatcgccatcatctgcctcctctccgtcctcagcaccaaggcctcctcccgcttcaactacgtcctctccgtcctccacgtcgccgtcatcgccttcatcatcgtcgcgggcctcaccaaggccgacgccgccaacctcacccgcgacttcatgccctacggcccccgcggcgtcttcgccgcctcggcggtgctcttcttcgcctacatcggcttcgacgccgtcagcaccatggccgaggagaccagggaccccgcccgcgacatccccgtgggcctcgtcggcgccatggcgctcaccaccgcgctctactgcgccctcgccgtcaccctctgcctcatggtgccgtacggggagatcgacccggacgcgcccttctcagtcgcgttcgccgaccgtggcatgggctgggccaagtacgtcgtcgcgttcggcgcgctcaaggggatgaccaccgtgctgctcgtcagcgccgtcggccaggcgcgctacctcacccacatcgcccgcacgcacatgatgccgccgtggctggcgcgggtgcacccggggacggggacgccggtgaacgccacggtggccatgctcctcgccaccgccgtcatcgccttcttcaccgacctcaacgtcctctccaacctcctctccatctccacgctcttcatcttcatgctcgtcgccgtcgcgctcctcgtccgccgctactacgtgtccggggagacgtcgcgcgccgaccgcaacaggctggccgcgtgcatcgccgccatcctggcgtcgtcggtggcgacggcgacgtgctgggggctggaccggggagggtgggtgccgtacgcggtgacggtgccggcgtggctggcggcgacggcgagcctgtgggcgctggtgccgcaggcgagggcgccgaagctgtggggggtgcccatggtgccgtggctgccgtcggcgtccatcgccatcaacgtcttcctgctgggctccatcgactccaagtcgttcatgcggttcgggatatggacggcggcgctgctcgtctactacctcttcgtcggcctgcacgcgtcctacgacacggccaaggcgctcgccgccgacgccgtcgccggcaaggtggaggacggcgacgccaagaccagcgcgccgcccatgtaa

SEQ ID NO: 3144 - DNA, 786 bp, Oryza sativa
atgttcccgcgtcgccgcggagatgctgcgtgtctcctgcttctggcgatagcttgcatcctctcatgcgtcgccgtcgctgacgcacggccaatgccgccgccgcctacgctgcgccatcacggcggcgtggtcagccggtacgcgttctggacgggcaagccgcggtggacgcgacacggacgaccaatggtgctgacgtacgccgtgtcccacaccgacgccgtcggctacctcccgggcgacgccgtgctggccgtgttccggagcgcgttcgcgcggtgggcggaggtgatcccggtgagcttcgcggagatcacgacggaggacgacgcggcggcggcggaggcggacatcagggtggggttctacggcgccggcgagcacggcgacgggcacccgttcgacggtccgctgaacgtgtacgcccacgccaccgggccggaggacgggcgcatcgacttcgacgcggcggagcggtgggcggtggacctggccgccgacgcgtcgccggcggccgtcgacctggagacggtggcgacgcacgagatcggccacgccctcggcctcgaccactcgacgtcggagagctcggtgatgtacccgtacgtcggcacgagggaaaggaaggtgcggctcactgtggacgacgtggaaggcatccaggagttgtacggggtcaacccaagcttcagcttcctagactacttcaagccggaccatgacaccccaaggagtcgtttttggcgacttggtatagcctgcatcttacttttgccgctctag

SEQ ID NO: 3145 - DNA, 1053 bp, Oryza sativa
atgtctctacaggtgccaaatgtgcaggaactcgcactgacttgcaaccgacctgaccagcagatacctgacaggtacatcaggccggaggctggcaccgaagaggtcatctgcggccaaggcatcaacacggcaatcccggtcatcgatctcgccaagctgctcaacccgcagtcatcccaagaggagtgtgccaagctgcgatctgcatgtcagcactggggtttcttccagctcgtcaaccatggggtgcctgacgatgtgatcagcgacgtgaggagagacttaactgagttcttcaagctaccacttgaagccaaggaggcgtacgctaaaccaccagacaagtacgaaggctatggccagcacttcgtcgtttcagagaagcagaagctggactggggagacctgctacacctccggcttcgcccaaccgagtccagggatttgaggttctggcctgcccatccttcatctttcaggaattccatggagaggtactccttggagacggcaaaagtagcacgctgcctgttggagttcttggccatggacatgggcgttgatccggagtctctcctggaggtattcagaggccagccccagaacatgagggtgaactactacccgccgtgcaggcaaaccggcaaggtgctcggcctgtcgccgcactgcgacgcgaccagcctgacgctgctgctccatgtgaacgacatgcagggcctccagatcaggaaggacggcaagtggctcaccatcgaagccctcgacggcgcgttcgtcgtcaacgtcggcgacatgcttgagattctgagcaatgggaggtacaggagcgttgagcacagggccgtggtgcacccggagaaggagcgcatctcggcggcggtgttccaccaggcgtgccgggacgcgacggtcgggcctctgccggagctcgtgacgaaggacggtggcaggccggtgtacaagtcgatggcctacgaggatttcatgaagcgcttcttctcggccaaacttgacggaagggctaacgtcgagggcatgaagatttag

SEQ ID NO: 3146 - DNA, 1074 bp, Oryza sativa
atggcgggagcaagatccgttggttctctcccagtgcctaatgtgcaggcgcttgcagaaatttgcaatgatccagatgaacacatacctgaaaggtacatcagaccagaggctagttctgaggaggtcatcaacaactaccaaggtgacatggcgattccgatcatcgatctcaagaaattgctttgtccgcaatcatcagaagaggagtgtgtgaagctgagatctgcctgccagtattgggggttctttctgctcattaaccatggagtgccagatgaagtgattgcaaacctgaagagagacattgttgatttctttagccagccactggacaccaagaaggagtacacacagctaccgaatagcctagaaggctatggacagagctttgttttctctgaggaccagaaacttgactgggcagacatgctgtatcttcatgtccatcctagcgattcaagggacctaaggttctggcccacttctccagcatctttcaggcaatccattgatgcatactcatcagagactaaaagcctggcactctgcttgtttgagttcatggctaaggctgtgggcgctaagccagagtcacttttagatttatttgaagagcagcctcgaggcttaaggatggcctattacccaccatgccggcaagctgacaaggtgatgggcctttcgccacactctgatgcgggtggcctgacactgctgctcgagattaacaatgtgcagggcctgcagatcaagaaagatggcaagtggttctccatagatgctccaaatggtgcacttattgctaacattggcgacacacttgagatcctgagtaacggaaagttcagaagtgttgaacacagggccgtgataaacccaaataaagagcgaatttcagcagcactcttccactatccaagtgaaaatatggtgatcagccctctgccggagtttgtgaaagatggtaaagtgaagtacagatcaataagttaccttgatttcatgaaacaaatcttcacacaacagcttgatggaaaaaaccgagtggaggtattaaagctggaccagtag

SEQ ID NO: 3147 - DNA, 2199 bp, Oryza sativa
atggccggcgaccgagcggaggaggaggagggggaggcgccgcctccggaggcgcgtgccgcggcggcggtggagagggtggcggcggcggtggaggccgtggcggcgggggcgggggcgggggcgggggcgggggaktaccggaacgcgtacaggcggcagctgctcgcgctktcgcggcggattcggctgctggggcccttcgtggaggagctccgggagcggaggcggggggagggggagggggaggaggaggagcgggcgctggcgccgctcgccgacgcgctcgaggcggcgctcgcgctgctccggctcggccgcgaggggagcaggatctccttgtggatattgtctatagctttgaattgttcttttgaggagaggcctcaaacccttcatcgagtccgtgttatcaatgggatgctttatgagtgctatgacataatattggttcttgagagggacagcgtaatgaaaaagtttcagggagtaattttgcagctggaacaagctctgtgcgacattccgtacaatgaattggatatatcagatgaagttagagagcaggttgagttagtgcacgcacagctcaaaagagcaaaagaacggattgatatgcctgacgatgaattctacaatgatctactatctgtatatgacaagaactatgacccaagtgcagaactggctattcttggaagattgtcagaaaagctacacttgatgacaatcaccgatctcacgcaagaatcactcgccttacatgagatggtcgcatccggcggtggtcaggacccaggagaacacattgagagaatgtcaatgctactgaagaagattaaggattttgtgcaaacacagaaccctgacatggggcctcctatggcttccagggtattggattcaaatggggattcaaggcctataaccattcctgacgagttccgatgtccaatttctcttgagctgatgaaggatcctgttatagtgtctacagggcagacatatgagcgggcatgcattgagaaatggatagcatcaggccatcatacctgcccaaccacgcaacagaagatgtcaacctcagcattgacgccaaactatgtccttagaagtctcatttcccagtggtgtgaaaccaatgggatggagccaccaaagcgctcaacccagcctaacaagcctacgcctgcatgctcttcgagtgaacgtgctaacatcgatgctctgctatctaagttatgctctccagacactgaggagcagagatcagctgctgcagagcttcgcctccttgcaaagcggaatgcaaacaaccggatttgcattgctgaggcaggtgccattcccttgctattgagtctgctgtcctcatctgacctacggactcaagaacatgcagttactgcccttctgaacctctccatacatgaggacaataaggcaagcatcatatcatctggtgctgtcccaagcatagtccatgttctgaagaatggcagcatggaggcacgggagaatgctgcggccacactttttagtctctcagtgattgatgaatataaagtgacaattggagggatgggggctatccctgcgcttgtagtgctgttaggcgagggtagccagcgggggaagaaggatgcagcagcagctctcttcaacttgtgtatataccaagggaacaagggacgagcgattcgagctggccttgtgccactcatcatggggctggtgaccaaccccacaggagcgctcatggatgaggctatggcaatactctccatactatccagccaccctgagggcaaggcagcgattggggcggcagagcctgtccctgtgcttgtggagatgatcggaagcggaaccccgagaaatcgagagaatgctgcggctgtcatgctacatctgtgcagtggagagcaccatcttgtgcatttagctcgtgcgcaggagtgcgggatcatggtcccgttgcgggagctggctttgaacggcaccgatagggggaagaggaaggctgtgcagctgctcgagcggatgagcagattcctagtccagcaacaagaggaacaggagtcccagtcgcaagcctccgcgcaggtccctcctcaggccacccctgagcaggtcccggaaaatgacatccctgaacaattggacagcccagcgtctcaataccctatggttgtatga

SEQ ID NO: 3148 - DNA, 3192 bp, Oryza sativa
atggcggcatataagttgggtgtggaggttgcaagtgctcatgacctgatgcccaaggatgggcaaggttcagcaagtgcctgtgtcgagcttacgtttgatggccagcggttccgcacggctatcaaggacaaggatctgaacccagtgtggaatgagcgcttctacttcaacgtttcggatccgtctaatcttcctgagcttgcgcttgaagcgtacgtctacaacatcaacagatccattgatggttcaaggtccttccttggcaaggtcagaattgctggaacctcattcgtgccattccctgatgcggttgtcatgcattatccactggagaagcgtgggatgttctcacgtgtgaaaggggaactgggtctgaaagtatacattaccaatgacccatccatcaaagcttcaaaccctctcccagcaatggatcctgtttcaaacaatcctcccccaacgccagcggagcaaatagcaactgatataaccggtacaaatctcagcacaactcatgagcacagggctgaggtgaaaacattgcacaccatagctaaggaggtgcagcatcagcaccatgggcatggccatctaccagcttcctttcccgaccaaccttccaagtatgctgttgaccagatgaaaccagaacctcaacaacccaagattgtaagaatgtattcagcagcctctcagcaacccatggactatgcactcaaagaaactagtccatttcttggtggcggacaggttgttggaggccgggttatacgtgccgagaagcatgccagtacatatgacctagtggagcgaatgcagtatctttttgtacgtgtggttaaggcacgggacttgcctgacatggatgtcactggaagcctagatccttatgttgaagtgagagttggcaactacaggggtataactaggcactttgagaagcagaagaatccagagtggaatgcggtctttgctttttccagagaccgtatgcaggcaactatccttgaagttgttgtcaaagacaaggatttgctaaaagatgactttgttggtctggtgcgatttgatctgaatgatgttccgatgcgtgtgccccctgacagtccattggccccagaatggtaccgcctcgttcataaaactggggataagtcaagaggcgagctgatgcttgcagtttggatcggcacccaagccgatgaggcatttcctgacgcatggcattcagatgctgcaacacttgaggatccatctgctgtaacacacatgaagtctaaagtttaccatgctccaagactctggtacctgcgagtcaatataattgaggcccaagatattgccataactgataagacacgctatccagatgtttttgtaagggcacaagtggggcatcagcacgggaggacaaaacctgttcaagctagaaatttcaacccattctggaatgaggatctaatgtttgtggctgctgaaccttttgaggatcaccttattctttcccttgaagatcgtgtagctcctaacaaagacgaggtgcttggccgtgtaattataccgttgacaatgattgatagaagagccgatgatcgtattgtccatgggaaatggttcaatcttgagaagccggtacttattgatgtggatcaattgaagaaggagaagttctctactcggcttcatcttcgtctctgccttgatggagggtaccatgttctagatgagtccactaactacagcagtgacctcagaccaacagccaagcaactctggaaaccgtccattggtttgcttgagcttggaatcctgggtgctcaagggattgttccaatgaaaacacgggatggaaaaggttcatcagacacttactgtgttgctaagtatggttcaaagtgggtacggacacgtaccatcgtgaacaacccgggccccaaattcaatgaacaatatacctgggaagtttatgatcctgcaacagtcctgactgtcggtgtttttgacaatggccagcttggagagaaaggtggtgagaagacgtccagttctaaagatgcgaaaatcggcaaggttcggattcgtctttccactcttgaaactggccgtgtctacactcactcatatcccctcctggttctacatccatcgggggtaaaaaagatgggtgaattgcacttagccatacgattttcctcaacttcattagtaaacatgatgtacctgtactctcgacctttgctaccaaagatgcactatgtacgcccaataccagtccttcaggttgacatgctgcgccatcaagctgtccagattgtgtctgcccgacttagccggatggaaccacctctgagaaaggaagttgttgagtacatgtcagatgttgattctcacttgtggagcatgagacgaagcaaagccaacttcttcaggctcatgtcagtcttctcaggcttgtttgcagttagcaagtggtttaatggggtttggaactatcgttaccgaccttgctatcctccacacatgaacactaagatctctcatgcggaggctgtccacccagatgaacttgacgaagagttcgatacattcccaacaagcaggagtcctgatgttattaggatgaggtatgataggctgaggagtgttgctggaagaatacagactgtgtggcttgtccaggagagcacttcagtgttgctgaaagcaaatatgggagcagctgagtcatcttcaaagctcgctggctccatccatgaattcactgtgaaggatgcgagggggagtgatgtggaactcagcagatacaagggaaaagttgttcttattgtgaatgctgcatctcgatgtggtctgacgaattacaactacactgaacttggtcagttatatgggaaatacaaggagacaggagccaccgagccaggcagcaatgagcaggttgtggagtttgcttgtacccgcttcaaagcagagtatcctatccttggcaaggttgatgtgaatggcggcaatgctgctccactgtacaagttcttgaagtcagagagaggtggcctcttcggagaacgcatcaaatggaacttcaccaaatttctggttgacaaagagggtcatgtggtgaaccgttatgcaccaaccagctccccattgagcattgagaatgacatcaagaacctgctaggggcttag

SEQ ID NO: 3149 - DNA, 528 bp, Oryza sativa
atggcggccaacgccggcaacaagatccgcaacgccaaactggttcttcttggagatgtgggcgcaggaaaatctagcttggtgcttcgttttgtaaaaggacagtttgttgagtttcaggaatcgacaattggagcagcatttttctcacagaccttagcagttaatgacgaaaccgtgaagtttgaaatctgggatacagctgggcaggagagatatcacagcttggctcccatgtactataggggtgcggctgctgccatagttgtctatgacatcacgaatccggcctctttcacccgtgcaaagaaatgggttcaagaacttcaagctcaaggtaactcgagtacagtggtggctcttgctggcaacaaagccgatttgctagagactaggcaggtgcaaatagaggcaaatactcttgccatttctatacggttttacaatggcatttatctttttactgagttctgcatatatcccaatttaaatggctgcatatatccggtggatgtagaggccgggtaa

SEQ ID NO: 3150 - DNA, 5760 bp, Oryza sativa
atggagatggctctccggcctcaaagccttctatgccctcggagcaggctgaaggtcgtcatccggccagctagcagtgccagcggtggtggcctcgcgcagtatttcttaatgaccaggagatatactggaagcagaattgttcgatgcatggtttcaagttcagactgtcctaataggaaagcaaagaggacgatttcccttcatacggaagtcgcttcttctaggggatatgctccgagaattgctgctgaatcaagtattcaggagcgagaacatattaatagtgatgaagaaacatttgatacgtacaacagattactacgtaatgagtcaacagagtggaaaaagttagatactactgaagtggatttgtcacaagatgtttcaagcagttcaatgaggaaagtggatgcgacggatgaagctaagctagatatacttgaggatgatttgcccagaaatttgttgaacggtgtaacaatgggggaagtagatatgttggatgaagctggggcagaagatgatgtatttgaggtggacttgtcagccttgcataattccacagtggggaaaatggatgcggtaaatgaagttgggactgaaaatgacttatttgaggtggatctgtcagcattgcatagtgctgcagtggggaaggtggatgtagtagatggagctaaagctaaagaagatttgtttgagatggattcattagcattgcacagtgttacaatggggaaggtggatgcaataaatgcagctggagctgaaggagacaaatttgaggtggatctgtctgcgctcgcgtcgaacaattcaatgatagaggcagttaatgtgatggatgaagctaaggctatagaagacacactcgaggtggatttgtcaggaaatgctacaagcagttcaacatatggggaagttaaatttgaggtggattcattaggaaatacttcaagcactgtaatgtatgggccagcggatggagcgtatgaacctcggtccgatgaagtcacttttaaggtggattcatcagaaaatgcgtcaaacaatgtaatgtatgggagagcagatgtggtggatgaatcttgggctgatgaaggcatatttgaggtggatttttttacaaatgcttcaagcggcgcagaatatggaaaagtggatgtggtggatgaagctaaaactgatgatttcacatttgagattgattcattagaaaaagattcaaacaataaaatgcatgggaaagctcatatggtggatgaagcttgggacgatgaagccatatttgaggttgatttgtttggaaatgcttcaagcattccgatatatggggaggtgaatgtgttggatgaagctcgggctgatgatggaaaatttgaggttgacttattagggaatacttctagcaattcaacacatgaggaagtggatgtggtagatgaagctcaaacaggtgaagccacatttgaggtggatttgcttggaaatgctttaagcagtgcaatatataaagaagtgcctgtcatgggtggagctcaggatgatgaagttgatgtagatttctcaataaatgcttcaatcaccgaaacagaaaaggaagcagatgcagttgatgaagctagagttgaagatgagacatttgatatggatttagtaggtaaacagatatcaatcgattctatgaatgatgatgtagttgaagaagggactaaacatcacagatatccaatgttgtcttcagcattcatagaagtcaagaccattcatgaaacacctgtaagtttaaagcctgaacttatgtcagttgtcatggatcaggaacaagacaaaccaatttccagcgtttatcaacaagaaggatcaatttttaatttgcatgcagaaaaccaatcaacggtagattttcatgaacgggagcaaatggctattacttttgataaacaaaaggaatcagttgctaaactctctaaagaagaccaacagactgctggtttacctgagcaaaacatgtcctttgatggtgtccataggaaaagccagtcaattattgggctcccatttcaacaccaatcaattgttagttcccctgaaaaataccgatcaattgtgggttttcatggacaaaatcaatcaatcatcagctctcataaacaagacaaatcaattgttggtgttcctaaaaaaattcaatccattgttggttccactaagcatgatgattcaattgttggtttccgcaaacaagacagatcaattgttagtgtgcctgagcaaaaacaatcaatagttggttttcataaacaagatctatcaattgttgctgtcagcgaacaaaatctatcaattgttgctatacctagagagagtcaatcaaagcaaatttctattgttcggagacatgatccactacatttgaaggaagtggaaacaaaggatagagatggcatatctaaaaaatctggtggtgacgatgatttgccacatatgctcttcgaagaagagctttcacaggttgaagatgtagcaagggcaatcgcctataaaaagcagcatgaagttgatgtaatctctttgactccagatatccaggagtcaccacaggacaatatcgacccacaagaactccgaaggatgctccaagaacttgctgaccagaattgttcaatgggtaacaagcttttcgtttttccagaggcagtgaaggctaattcgacaattgatgtatatttgaatcgtaacctatcggctttggcgaatgagcctgatgtccacatcaaaggagcattcaatagttggagatggaggcctttcaccgaaagactgcacaagagtgaattgagtggggattggtggtcttgcaaactgcacatacccaaggaagcttatagattagactttgtgttcttcaatggtcgtttagtctatgataacaatgatagtaatgattttgtgctgcaagtagaaagtacaatggatgaagattcctttgaggagttcttggttgaagaaaagaaaagagaacttgagagagttgccactgaagaagctgaaaggaggaggcatgctgaagagcagcagcgaatgggagaacaaagggctgcagaacaagctgccagggaacaggctaagaaggagatagagttgaagaagaacaaattgcaaaatctgttgagttcagccagaacacatgttgataatttgtggcacatagagcctagcacatatagacaaggggacactgtcagattgtactataacagaaactcaaggccgcttatgcatagtactgagatctggatgcatggtggttgcaatagttggactgatggactctctattgttgaaagacttgtcgaatgtgatgacgaaaatggtgattggtggtatgctaatgttcatatacctgaaaaggcctttgtattggactgggtttttgctgacgggccacctggaaatgcaaggaattatgacaacaatggtcgacaagattttcatgctattcttccaaatgccatgactaacgaagaatattgggttgaagaggaaaactgtatctatacaaggcttctccacgagatcagagaacgggaggaagctattaaaataaaggttgagaaaagagcaaaaatgaaatctgagatgaaggaaaagactatgagaatgtttctactttctcagaaacacattgtttatactgaaccacttgaaatacgtgctggaacaactgtggatgttctatataatccttctaatacggtgctgaatggaaagccagaggtttggtttaggtggtcctttaaccgatggatgcatccaagtggtgttttaccacccaagaagatggtgaaaacagaagatggttgtcacttaaaagcgacagttagtgttccatcggatgcttatatgatggactttgttttctctgagtcggaagaaggtggaatctatgacaacaggaatgggacagactatcatattcctgtttctggttccaatgcaaaggagcctcccattcatattgtccatatagcggttgagatggcacccattgcaaaggttggaggccttgctgacgttgtcacaagtctttcacgtgcaattcaagagttaggccatcatgttgaggttattctcccgaaatataattttatgaatcaaagcaatgtgaagaatttgcatgtacgtcaaagcttttctttgggtggtacagaaattaaagtgtggtttggactagttgaagacctgtctgtttacttcttggaacctcaaaatgggatgtttgggggtggatgggtatatggagggaacgatgctggcagatttggcttgttctgtcagtctgctctagagttcctccttcagagtggatcttctccacatataatacactgccatgattggtcaagtgcaccagttgcctggctatacaaggaacactatgcagaatccaggttggcaactgcccggattatatttaccatccataatcttgagtttggagcacattttattggaaaagcaatgacatactgcgacaaagccacaactgtttctcacacgtattcaaaggaagtcgcaggtcatggtgccatagctcctcatcgtggaaaattctatggaattctcaatggaattgatccagatatctgggatccatatactgataacttcatcccgatgcattatacttctgaaaatgtggttgaaggcaagaatgctgcaaagagagcattgcagcagaggtttggactgcagcagactgatgtccccattgttggaatcatcactcgtctgacagcccagaagggtatccacctcattaaacatgcacttcatcggacacttgaacgcaatggacaggtggttttgcttggttcagctccagatcctcggatacagagtgatttctgcagattggctgatagtcttcatggtgaaaaccatggcaggatatatgctggctctgacttcatccttgttccatccatctttgaaccttgcggtttgactcaacttgttgccatgcgctatggatccatccctattgttcggaaaaccggaggactttacgacactgttttcgacgtagaccatgacaaagaccgggctcgagttctaggccttgaaccaaatgggttcagctttgatggagctgactgtaatggtgtggattacgccctgaacaggcaaatgaacggtccaacgttggacacgaatatctacggctacacttattttaggatggagaattggaattggaatttggaaggtgagaagttagcttgcttggggcaaccaggtagagtagactcagacctggttykwgcakktaaagaaagatctcactctgtttatgccatgtgttgtgtcgcagaaaggaggcaggctgaggccaaccgcatcagggagaagtatcccgatagaattcctgtcattgttgagaaggctgagaggagtgacattcctgacattgacaaaaagaagtcagttctcaaccattttacttttaagaataaatctagtgccactttatctctatttgttttggcaagttatgttgacacttcattttttatgctgctgaaaatagttttagcaaattataccaggtaccttgttcccgctgacctcacggttggacagtttgtgtatgttgttcggaagcggatcaagctcagtgctgagaaggcaatcttcatcttcgtcaagaacacgcttccaccaacagctgccctggatgtccgctatctatga

SEQ ID NO: 3151 - DNA, 2049 bp, Oryza sativa
atgcccgcggccgcggcggcgcaccacctcgccggcgtcgccgcagccttcctcctcgccgtcctcctccacgtccacctcgccgccggtgaagacgaacctccaccgtggtacctgtgcgacccctacagcgcgagcggccgctactcggagaacagcacgttccaggccaacgtcaaccgcctctccgccaccctccccaggaacacctcctcgtctccggccatgtacgccacgggcgccgccggcgacgtcccggacaaggtgtacggctacgcgctctgccgcggcgacgtcgccgacgcccamgcctgcgagcgctgcgtcgcggccgccctccgcgacgcgccgcgggtgtgcccgctcgtcaaggacgcgctcgtcttccacgacctctgccagctccgctactccaaccgcaacttcctcctcgacgacgactactacgtcgccacgtactcgctccagcgctcctcccgcctcgtgagcgcgccggcgccggcggcggtggcggcgttcgacgcggccgtggccatgctcgcmaacgccaccgcggagtacgccgcggcggcgaacacgtcgaggcggtacggcacggcggaggaggagggcgtcgacggcgacggcgacagcggccgccccaggatgtacgcgctggcgcagtgcacgccggacaaggcggcggacgtctgccgggcctgcctcacgacgctgaccaccgtgcagctgcccaagctctacagcggcgggaggacgggaggtggggtgttcggggtgtggtgcaacctccggtacgaggtgttccctttcttctccggccgcccgctgctgcatcttccggcgttcgtggaggcgccgccgccagcgacgtcggcggcggcgaccagaagaggagagaaaaagaggaataagacaggtatagttctagccattgttatgcctacaattgctgcaatgctgctcatcgtcgtagcatacttttgttgttggaggaggagacgaccagaagaacagacgtttctgccctacgatattcaaagtattgattcgcttctactcgatctatcaacactacgagctgctacagatgattttgctgaaactaaaatgatcggcagaggagggttcggtatggtttacaagggagtcctgcctgaaggtcaagaagtagctgtgaaaagactttgtcagagttccggacaaggaatagaagagcttaaaagtgagctagttttagttgctaagctttaccacaagaatcttgtaaggcttattggtgtttgcttggaacagcaagagaaaatacttgtctatgaatatatgtcaaataaaagccttgataccattcttttcgatatagacaaaaacatagagctagattggggcaaaaggttcaagattataaatggaattgctcaaggcttgcaataccttcacgaagattctcgattgaagatagtgcaccgagacctcaaagcaagcaacattctattagactttgattacaaccctaagatttctgattttggcttggcgaagatatttgatggggatcaatcaaaagatatcactcatcgaattgccggaacatatggatacatggcgcctgaatacgccatgcatggtcattattcagtcaagttggacgtatttagtttcggcgttttggtactagagatcgtcactggaagaagaaatagtggctcatatgatagcgggcaagatcttgatctcttaaaccatgtgtgggggcactggaccaggggaaatgttgtagagttgattgatccatccttgggcaaccatcctccgatcgagcagatgttgaagtgcatccacatcgggctgttgtgtgttcagaaaagacctgcaagcaggccgacgatttcgtcagtaaacatcatgcttagcagcaacactgttcgtctcccttctctatccaggccggctttctgcatccaggatgttagtgccagtgacagctctaatccgcattcaacagcggtgtcttcgaatgatatgtcaatcacagatcttgtgccgagatga

SEQ ID NO: 3152 - DNA, 2136 bp, Oryza sativa
atggcgacgacggtggcgacggccatgcgacgccgacgaaatctcactccctgcgacagccgcctcgccaccgcagtccccctgctcgtggcgttcctcctcctcctccacgcgccgccgctcgcggaagcgcagccgctgccgtggcagatgtgcgacaccgccggcggaaactacacggaggggagcacctaccaggccaacgtgcgcgccctcgccagcgctctcccggtgaacgcctcctcatcgcgcgccctcttcgccaagggcgccgccggcgcggcgccggacgtggtgtacgccatcgcgctctgccgcggcgacaccaacgcctcctcctgcgccgcctgcgtcgccaccgccttccaggacgcgcagcagctgtgcgcgttcaacaggcgcgccaccatgttcgacgacccctgtatcctccgctactccgaccaggacatcctcgccaacgccaccgacggccaggggaatttcatcgcctggaactacaacaacgtcagcgcggcgagggcggcggcgttcgacgccgcttccggccggctcgtcaacgccacggccggctacgcggcggcggacccggtcaggcggttcggcacgggggaggtcgggttcgacgacgcgacgtacccgaggatcttctcgctggcgcagtgcacgccggacttgtcggaggccgactgccggagctgcctcggccgcataatcaggtgggtgccccagtatttcgccgggaagcccggcggcagggtcttcggcgtgcggtgcaacttccggttcgagtcgtactcgttcttctccggccggccgctgctgcagttgccggggccgccgccggcgccggcgccgtcgccggccaacatggcgccaccatcaccaccggggaccatgggaggaagaacaagacatagaacaggacgtgtcttggccattactctgcctattgctggagcaatattagcactcattgtcctgacatgcttttgtttttggagaaggagaacacctgcaaggaaggcctcaccagtgccatactcaacaaacccagatgacattcagagcatcgactcgctccttctggacctatcaacgctacgggctgcaacagacaacttcgctgaaagaaataagcttggcgaaggagggttcggtatcgtttacaagggagttcttcccgaaggtcgagaaatagctgtaaaaaggctctcacaaagctccagacaggggatagaagagctgaaaactgagctagttttagttgctaaacttcggcacaagaaccttgtgagccttgttggtgtttgcttggaagaaggcgagaaactactggtgtacgagtacctgccaaataagagcctcgacaccattcttttcgattatgagaaaagcaaagatcttgactgggggaagaggctcaatattgtaagcggagtcgctcgaggcttgcaatatctccacgaagactctcaactgagggtagttcatcgagacctcaaagcaagcaacgtgctgctggacttcgatcacaacccaaagatttcagactttgggttagcgaaactgtttgagtgggatcagacgcaagacgtcaccagtcacatcgctggaacatatggatacatggcaccggaatacgccatgcgtgggcagtattcagtcaagtcggacgcgttcagttttrgtgttctgatcatagagattgtcacgggaaggagaaacagcagcttctccaactcggagcaatccattgacctcttgagtcttgtatgggagcactggacaacggggacgatcgaggagctgctggatccggcgataggcagccgtgcagtgaacgttctgctgaagctgatcaacatcgggctgctctgcgtccaggacaacccggcggacaggccggcgatgtcggcggtgaacgtgatgctcagcagcgacacggtctccctccaggccccgtcgaggccaacgttctccattcaggagatggacggcgccgccgacacggatctctacgagtcgggagcgtacccccggagcgcgttccagcccaccggcgacggcaacacgagagcagcggcggcggcgtcgccgaatgagttgtcgctctcggagctggaaccaagatga

SEQ ID NO: 3153 - DNA, 2265 bp, Oryza sativa
atgaagaataatatgtgtgacctgggcaacggggatcagagagtctcgctggctgacgggcacgtgtctctctctagtcaacacacaattctagttagtcaactccctagccccaccgctcttctatttcctctgcaactgcgacctttcctcgagcagctagaccaccatggcgacggcggtggcggcgacggccatgcgacgcgggcaacaccttcctctctctctttctctctgctacaacctcgccgcagtcgccctgctcgtggcggtgttcctccacgcgcctccgcgcgcgggagcgcagccgctgccgtggcaactgtgcaacgccaccgccggcaactacacggaggggagcacctaccaggccaacgtgcgcgcgctcgccagcgccctccccgggaacgcgtcgtcttccccggccctcttcgccgagtcktcgccggcacggcgccgaacgtggtgtacgccatcgcgctctgccgcggcgacaccaacgcctcctcctgcgccgcctgcgtcgccaccgccttcgacaccgcgcagcagctctgcgcgttcaacaagcgcgccaccctgttcaacgacccctgcatcctccgctactccgacctggacatcctcgccaacgtcaccgacaacagcgggaggttcgtggcctggaactacaacaacgtcagcgcggcgaaagcggcggcgtacgacgcagcatccggccggctcgtcaacgccacggcggactacgcggcggcggacccggtgaggcggttcggcacgggggaggtcgggtccgacgacgcgacgtacccgaggatcttctcgctggcgcagtgcacgccggacatgtcggaggccgactgccggagctgcctcggggacataatcaggaaggcgacgcccaagtacttcgtcgggaagcccggcggcagggtgttcggcgtacggtgcaacttccggttcgaggcgtacgagttcttctccggccggccgctgctgcagctgtcggggccgccgccgccgccggctaacatgacaccaccggtgaccagtgaaggaagaacaagccatagaacaggacggatcttggccattactctgcctattgctggagcagcattagccttcattgccttgacatgcttttgtttccggagaaagagaacaccagcaaataaggcctcatcactgccattctcaactaatccggatgatattcaaagcatcgactcgctccttctggacctatcaacgctacgggctgcaacagacaacttcgctgacagaaataagcttggcgaaggagggtttggtgccgtttacaagggagttctttctgaaggtcaagaaatagcagtgaaaaggctctcacaaagttcaagacaagggatagaagaactgaaaactgagctagttttagtcgcaaaacttcggcacaagaaccttgtgagccttgttggtgtttgcttggaaggagatgagaaactacttgtgtacgaatacatgccgaataagagcctcgacaccattcttttcgattatgagaaaagcaaagatcttgattgggggaagaggctcaagattgtaagcggagtcgctcgaggcttgcaatatctccacgaagattctcaactgagggtagttcatcgggacctcaaagcaagcaacgtgctgctggacttcgatcacaacccaaagatctcggactttgggttagcgaaactgtttgagtgggatcaaacgcaagacgtcaccagtcacattgctggaacatacggatacatggcgccggagtacgccatgcgtgggcagtattcagtcaagtcggacgcgttcagtttcggagttatgatcctagagattgtcacgggaaggagaaacagcagcttctccaactcggagcaatccattgacctcttgagtcttgtctgggagcactggacaacggggacgatcgaggagctgctggatccggcgatgcgcggccgttcagctgacgatctgctgaagctgatcaacatcgggctgctctgcgtccaggacaacccggcggacaggccgacgatgtcggcggtgagcgtgatgctcagcagcgagacgttctccatccaggccccgtcgaggccaacgttctgcatccaggagacggacagcgccgccgacacggatctctactcgagcgcgcttcggtccaccggcgacagcaagacgagagcagtggcgtcgccgaatgaggtgtcgctcaccgagctggagccaagatga

SEQ ID NO: 3154 - DNA, 1917 bp, Oryza sativa
atgcgccgccaccgtccctacctcgacggcgtcgccgccgccgccgcaaccttcctcctcgccgtcctcctccacgcgccgctcgccgccggagaggacgagcctccgccatgggtcctgtgcgggccgtaccctcccagcggcaactactcgaagaacggcacgtaccagctccgstaytccaaccgsgacttcttcctcgacgatgactacttcgtcaccacctacaccctccagsgctcccgccgcgtgggcgccgcggcggcggcagcgttcgacgcggccgtcgcagtgctcgtcaacgccaccgcggactacgcggcggcggactcgtcgaggcggtacggcacgggggaggaggagggcgtcgacggcgacagcgaccgccccaagatctacgcgctggcgcagtgcacgccggacaagacgcccgaagtctgccggacctgcctctcgacggtgatcgggcaactgcccaaagaattcagcgggaggacgggagggggcatgttcggggtgtggtgcaacttccggtacgaggtgttccctttcttctccggccgcccgctgctgcagcttccggcgttcgtggagacgccgccgccgccgccttcgccatcggcgaccagtggagagaaaacgaaaaataggattggtacagttctagcgatagttatgcctgcaatagctgcaatactgctcatggttgtagcatgcttttgttgctggaagaggatcaagaagagacgaccagaagaacagacgtttctgtcctattcagttagttcagacgatattcagagcattgattcgcttatacttgatctaccaacaatacgagttgctacagatgattttgctgatactaaaatgatcggccaaggaggatttggtatggtttacaaggtagaaaatcataccacatgtacctttatcagttatatttttgttggttatataggagtcctacctgatggccaagaaatagccgtgaagaggctttgccagagttccagacaaggaataggagagctgaaaagtgagctgattttggttgctaagctttaccacaagaatctagtaaggcttattggtgtttgcttggagcagcaagagaaaatacttgtctatgaatatatgccaaatggaagccttgatatcgttcttttcgcctcagataccgacaagaacagggagctagattgggggaaaagattcaagattataaatgggattgctcgaggcttgcaataccttcatgaagattctcaattgaagatagtgcaccgggacctcaaagcaagcaacatcctattggactttgattacagccctaagatttctgattttggcttagcaaagatatttggaggggatcaatcagaagatgtcactaatcgaatcgccggaacatatggatacatggcaccagaatacgctatgcgtggtaattattcaatcaaatcggacgtgttcagcttcggcgttttggtattagagattatcaccggaagaagaaacactggctcatatgatagtgggcaagatgttgatctcttaaacctagtgtgggagcactggacaaggggaaacgttgtagagctgattgatccatccatgggcgaccatcctccaatcgagcagatgttgaagtgcatccacatcgggttgttgtgtgttcagaaaaaacctgcaagcaggccgacgatttcgtcagtaaacatcatgcttagcagcaacactgttcgtctcccttctctatccaggccggcgttctgcatccaggaggttagtgccagtgacagctctaatccgtattcagaacgctatccaagaccaagacattccgggtattctgataattcaacagtggtgtcttcgaatgatttgtcaatcacagagcttgtgccgagatga

SEQ ID NO: 3155 - DNA, 530 bp, Oryza sativa
atggcaccttccaaggtcagcctcgccgccgtgctcgccgtggccatctcgctggccatggcggccaccaccaccacctcggcgcagaacacgccgcaggactacgtcaacctgcacaacagcgcgcggcgcgcggacggcgtcggcccggtgagctgggaccccaaggtcgccagcttcgcgcagagctacgcggccaagcgcgccggcgactgccggctgcagcactccggcgggccgtacggcgagaacatcttctggggctcggcggggcgcgcctggagcgccgccgacgcggtggcgtcgtgggtgggcgagaagaagaactaccactacgacaccaacacgtgcgacccgggcaaggtgtgcggccactacacccaggtggtgtggcgcaagtcggtgcgcatcggctgcgcccgcgtcgtgtgcgcggcgaaccgcggcgtgttcatcacctgcaactacgaccccccgggcaacttcaacggcgagcgcccgttcctcaccctcgacgccgcggccaagta

SEQ ID NO: 3156 - DNA, 950 bp, Oryza sativa
atggggatggggatgaggagggagagggacgcggaggcggagctgaacctgccgccggggttcaggttccaccccacggacgacgagctggtggagcactacctgtgcaggaaggcggcggggcagcgcctgccggtgccgatcatcgccgaggtggatctctacaagttcgacccgtgggatctgcccgagcgcgcgctgttcggcgccagggagtggtacttcttcaccccgcgggatcgcaagtatcctaatgggtcacgccccaaacgsgccgccggcaacgggtactggaaggccaccggcgccgacaagcccgtcgcgccgcgggggcgcacgcttgggatcaagaaggcgctcgtgttctacgccggcaaggcgccgcgaggggtcaagactgattggatcatgcatgagtaccggctcgccgatgctggccgcgccgccgcgggcgccaagaagggatctctcaggttggatgattgggtgctgtgtcggctgtacaacaagaagaacgagtgggagaagatgcagcaggggaaggaggtgaaggaggaggcgtccgacatggttacgtcgcagtcgcactcgcacacccactcgtggggcgagacgcgcacgccggagtcggagatcgtggacaacgaccccttcccggagctggactcgttcccggcgttccagcctgcgccgccgccggcgacggcgatgatggtgcccaagaaagaatcgatggacgacgccaccgcggccgccgccgccgccgccaccatccccaggaacaacagcagcctgttcgtggacctgagctacgacgatatccagggcatgtacagcggcctcgacatgctgccgccgggcgacgacttctactcgtcgctcttcgcgtcgccgcgggtgaaggggacgacgccacgcgccggcgccggcatgggcatggtcccgttctg

SEQ ID NO: 3157 - DNA, 650 bp, Oryza sativa
atggcgcaccgggtggacaacgagtacgactacctgttcaagatcgtcctcatcggcgattccggcgtcggcaagtccaacatcctctcccgcttcacccgcaacgagttcttcctcgagtccaagtccaccatcggcgtcgagttcgccacccgcaccctgcagatagaagggaagactatcaaggctcagatatgggacacggcaggtcaagagagataccgtgcaatcacgagtgcttattacaggggtgcagttggagcacttcttgtattcgacataacaaagaggcaaaccttcgacaatgttcagaggtggctgcgggagctccgggaccatgcagacgccaacattgttgtcatgatggtcggaaacaagtctgacttaaaccatctacgatcagtccccgaggaagatggccatgcgttctctgagaaagaaggtctctccttccttgagacgtctgctctggaagcgattaatgtggagaaagcattccatactgtattgagtgaaattcaccagattgtaagcaagaaagcacttgcagctcaggaatccgcgtctacaaatgggcgttccatgcaaggaactacgatcaacgttgctgaagctccagccgccacaaaaggttcttgctgttctagtta

SEQ ID NO: 3158 - DNA, 3975 bp, Oryza sativa
atggctctgcggcctcagcttgtgcctccgctgctctcccaccgccgccgccttgtcatacctctgcttgtcttgctcctcgccgccgccgccagcgacgagcagctgctaagcctgcgtgggcaggctgctgtccttgtgtccatcaaagacgccttctccccgcctctcccgacgccattgcgcactacctggagcatcgccaacgacgcctctctctgctcctcgtggcatgccgtccgctgcgcccccgacaaccgcaccgtcgtctccctcgacctctccgcccacaacctctccggcgagctctcctctgccatcgcccacctccagggcctccgcttcctctccctcgccgccaactccctggccggcgacctaccgcccaccatcgccgccctccggcacctgcgctacctcaacctctccaacaaccagttcaacggcaccctccactactacttgtccaccatgaacagcctcgaggtcctggacgtctacgacaacgacctctccggcccgctcccgctcccggacaccaacagcaacctccgccacctcgacctcggtggcaacttcttctccggcagcatcccgaccagcttcggccgcctgcaggccatccagttcctctcggtcgccggcaacagtctcagcggccgcatcccgccggagctcggcaacctcaccgccctgcgccagctctacctgggctactacaaccagttcgacggcggcatccccgcgtcgctgggccgcctcgccagcctggtgcacctggacctggccagctgcggactgcagggggagataccgccgtcgctgggaggcctcgccaacctcgacacgctctacctgcagaccaaccagctgaacggcaccatcccgcccgcgctcgccaacctcaccgctctcaggttcctcgacgtctccaacaacgcgctcaccggcgagatcccgcccgagctcgccgcgctcacccacctccgcctcctcaacatgttcatcaaccgcttccgtggcggcatcccggagttcatcgccgacctccgctcgctccaggtcctcaagctctggcagaacaacttcaccggctccatccccggggctctcggccgcgtcgcgccgctccgtgagctggacctgtccaccaacaggctcaccggcgaggtgccgcgctggctgtgcgcgctccgcaaactcgacatcctcatcctcctcgacaacttcctcttcggcccggtgccggaggggctcggcgcgtgccggacgctcacgcgggtgcgcctggcccggaactacctcaccggcccgctcccgcgcggcttcctctacctgccggcgctcaccacgctggagctgcagggcaactacctgacggggcagctccataatgaggatgaggacgctggcagcccgctgtctttgctcaatctctccggcaacaggctcaacggctccctcccggcctccatcggcaacttctcctccctgcagacgctcctgctcagcggcaaccacttcaccggcgagatcccgcctgaggttggccagctgaggcggctgctgaagctggacctgagcggcaacaacctgagcggcgaggtccctggcgaggtcggcgagtgcgcgtcgctgacgtacctagacctgagcgcgaaccagctgtggggcgccatgccagcgcgggtggtgcagatcaggatgctcaactacctcaacgtgtcgtggaacaagctcaacggcagcatccccgcggagatgggcagcatgaagagcctcaccgacgccgatctctcccacaacgacttctccggccacgtgccccacaacgggcagttcgcctacttcaacgcgtcgtccttcgcgggcaacccgcggctggtgctgtgcggcacgcccgcccccggscccgsccccsggacgacgacgcctggcagcgggggggacgggcgggcgccggtgatgtggctggcggcggcgctggggctgctggcttgctcggtggcgttcgcggcggcggcggtggcgacgacgcgatcggcgattgagcggaggcggcggtcggggtggcagatgagggcgttccagaaggtgcggttcggatgcgaggacgtgatgcggtgcgtgaaggagaacagcgtggtggggcgtggcggggcytggggtggtgtacgccggggagatgcccggcggggagtgggtggcggtgaagcggatcgtcgacggtgggttctcggcggagcgcgaggcgaagctgctggtgtacgagtacatggccggggggagcctgggcgacgcgctgcacggcmacaccggcaccacgacgagtacgacgacgatggcagcaatactaatattattgggtcgttgttgttgccgtgggcggcgcgtcttcgtgtggcgacggaggccgccaaggggctgtgctacctgcaccacgactgctcccctcccatcctccaccgcgacgtcaagtccaacaacatccttctcgacgcccgcctggaggcgcacgtcgccgacttcggcctcgccaagtacctgcgcgccggcgcctccgagtgcatgtccgccatcgccggctcctacggctacatcgcgccagagtatgcatacacgctgaaggtggacgaaaagagcgacgtttacagctttggggtggtgctgctggagctgataacggggcaaaaaccggtgggagagcacctgcagctgcatcaagaggaggaggaggaagcaaatacgacgacgacggtggtggacctggtgcagtgggtgcgggcacgctgcggcagcggcaaggacggagtgtggcgcgtcctcgatcggcggctgggcggcgacgtgccggcagcggaggccacgcacatgttcttcgtggcgatgctgtgcgtgcaggagcacagcgtcgagcgccccaccatgcgcgagcgctgcttcctctccggtcgctgcgtccaccgagcgtcgccgcctccctggctgccgcgcccctcttccctcaccatgtccacttcctcggctacttccgctaccaccgactccgctacggtgttgtcttccacctctaccgtcgccccggttttcgtcaacccgtatgcgaccgtcgccgtcaagtcccatgttccgatctccctcgagcttcataaccccaactacaacaagtggaaggccttcttccgctcgatgtgtgggaaattcggtctcctcgatcatcttgacgctgctcctcccgccaaccctgacgccgcctgggaacaggccgattgctgcctctgcagctggctcttcggctccgtcgccgacgacgtcctcgacctcgccatggagcatgatcaatcggcccaggacttgtggatcgccatcgacaacctctttcaagccaacaaggagcctcgcgcgatctatccgcatcacgagttccactccatgacccaaggcgatctctccgtcgccgactattgtcagcgcatgaagacggcggctgatgccctccgcgacgtcggccaccccgtcaccgagtcccagctcgtcctcaacctcctccgcggcgtcaattcgcgcttcaccagcacggccgacaacatcgcgagcgcccctatcttgtcatcctttgcctctgcgaggaacatgctggttctcaaggagcttcgcaacaccaactcggtacaagtccagtccgagactgccctcgtcgcagccaacaacgcccactccaactgcaccgggggcacttgccactcctctggcagcggtgggcagcagcagaaccgcgccggcggcagcaagaacaagggcaagaacggcggccgccctggtggacagaacaacggcagcaacagcttcggcaccagcactttctccatccctgctccacgccaagctgcaccatgggtgtgcttctcgccctgggcaggacagcagcaaccctggcgtgctcccagcgccgagatacttgggccgtatccttag

SEQ ID NO: 3159 - DNA, 1038 bp, Oryza sativa
atggcggcgacattgcgttggggcggcggcgggctcgcggtggcggcgtttgcggcggtggtcgcgttgtccggcctcctcggcgtcgcggcgaactacggcggcggcggcgggttcttgttcccgcagttctatcagcacacgtgcccgcagatggaggcggtggtgggcggcatcgtggcgagggcgcacgccgaggacccgcgcatggcggcgtcgctgctgcggatgcacttccacgactgcttcgtgcaggggtgcgacgcgtcggtgctgctcgacgccgacggcagcgggcggttcgccacggagaagcggtccaaccccaaccgcgactcgctgcgcgggtacgaggtgatcgacgagatcaaggccgccctggagcacgcgtgcccgcgcaccgtctcctgcgccgacatcgtcgccgtcgccgccagggactccaccgcgctcaccggcgggccgtggtgggaggtgcccctcggcaggcgggactcgctgacggccagcctgagcggctccaacaacctcatcccggcgcccaacgacacgctccccaccatcgtcggcaagttccgcaaccagggcctcgacgtcgtcgacctcgtcgcgctctccggcggccacaccatcggcaactcccggtgcgtcagcttccgccagaggctgtacggccagctgaacagcgacgggaagccggacttcaccctgaacccggcgtacgcggcggagctccgggagcggtgcccgagctccggcggcgaccagaacctgttcgcgctggacccggccagccagttccggttcgacaatcagtactaccgcaacatcctcgccatgaacggcctcctcagctccgacgaggtgctcctcaccaagagccgggagacgatggagctcgtccaccgctacgccgccagcaacgagctcttcttcgcgcagttcgccaagtccatggtcaagatgggcagcatctccccgctcaccggccacaacggcgagatcaggatgaactgcaggagggtcaaccacttctag

SEQ ID NO: 3160 - DNA, 980 bp, Oryza sativa
atgagctccggcgccgcttsgcccccgccgccgccgcccgccgccgcggaggacgggagggtcacctcgcacgtggatcccttcctcgtcgaggcgctcgamaaccctcgccaccgcctcatggaaattatgcagaatcctcaactgcatgaattcgaattccagcattttccaacttcttatctccgctgtgctgctcatcgtgttgcacaacactatggtttagagactacagtagcagatagcttagtagatggttcagttagcaagatagttgcaaagaaaacatctgaaagcaaacttccagttattgcattgtcagaagttcccagcaaacaagcaagaaatgagcatgaagctgcagagaagcttaagtttgttatttgtccaaggcccaaggctttccaaaatggtgcaggtgatgccggtgccaagaacaatgcagcaagaactgttgaagagaggatagaggaatacaacaaagcacgagcacgcattttcaacggttccatttctgatattgaaggcacaagtgatttgggagctttatctgttgcgagagatgaaccaattaatgttgagcctcctgttgatgagaataaggtgaacacaatgaacagccgttccagagttgctgtttttaaggacactgaaaaggatcgtagtgatcctgactatgatcgtaactacaagaggtatgttaggggcccagtgcacgacttcaatgtgagtcctggtggcttcaattttgttgtgccacagtttatgcagtatggtgttggttttatgcagtctgctaatatgtcaagaaaccaaccttctgtgtactttggccaacccgatttatctatgggctcctcttctggaactgctgtctacccacagtggccaactccagcaatgatatacccccattgctatgacaatcttgggcatatgatttctcaggttccggtttaccagtccttcaaccatggctg

SEQ ID NO: 3161 - DNA, 2240 bp, Oryza sativa
  misc_feature (1)...(2240): n = A,T,C or G
atgccctcgcgccagccgccgccaccgccgccgcctccgccgcctcggcctgacgtcgcccgccgccgctcagtagctgtcgccgcggcggcgggggcggcgggggctggggccgtggcggtgctggtggtggtcgcgctgctgtggtggctgaggaggaggagggggaaggggaagggggaggcggatgaggtggtggccgcggcagggaggctgcagcggctgtcctaccggaagctgcggcgcgcgacggggggattcgcggcggggagcaagctcgggcagggggggttcggccccgtgttccgcggcgcgctcccgccgacgacgacggcggcgggagcaatccgcggctacnggccggggaggcccgtcgccgtgaaggtgatggatgccgcggggtcgctgcagggggagcgggagttccacaacgagatcgccgtcgcgtcccacctcctcgcgtcgtcgtccgcgccgggatcccctcctgtccccgacgccgccgccaagccgggtgggaaggggcgggactccatactgctgccgttcgcgtactcgatgtcgtccgcggcgcggggcgaggggcggccgcggcggatgatgctggtgtacgacctcatgcccaacgggtcgctgcaggacgcgctgctggggcggcgctgcccggagctcgtggcggagtggccccgccgccttgccgtcgcccgcgacgtggccgccgcgctccattacctccactccgtcgttaagccgccggtcgtgcacggcgacgtcaagcccagcaacgtcctgctcgacacggatctccgcgcccgcctcgccgactttggtctctcccgcatcaattccgacgcagatgcggacggcaagcctgagagcggcgcgattgcggaaggatgtgacgtcgatgggggatgtgatgatgacgcctctgtcatagcggagagcacggtcaccaccacggtgaatggtgaggggaaccccaaatcaccggaggatgacgatggcttcacatcggcatcaccggcggaagctgcgtccacttccgggtttgaccggaccagtgttgagagtggtatgaatagccgcagctgcaacggtggagggtcacgcaccggaggtaccatgggatcaggtaccgggagtgactggtggtggaagcaggataatggtgggggcagcaatggtgtaaaagattatgtgatggagtggattagatcagagatcaagaaggagcgccccaagaatgactggattgcaggggcagctattaccaatccagctgcagacaggaagaagccaaagaggagggcacgagaatggtggcgagaagaatatgctgatgagcttgcgaaaaagcagaaacgacgtgcacttgctaaatcaaagagcgagcaggcagggttgcaatggtgggagcgggatattgacgatgacttggatgcaaagggacgatccaaatggagtatgatgaagagctggagtcggagaagcaatggcagcactggcaatggcaatggcaacggcaatggcagtattaactggtgggtcaatggtgcaagaagcacccgtgattgggcaagtggggaattcgttcccaagagtagtggcgcggtgagcagcacaccgagcatgcgcggcacggtgtgctatgtggctcctgaatacggtggtggtggtcctttgtctgagagatgcgatatctatagctacggtgtcttgctactggtacttatctcaggacgccggccgttgcaagtgacggcctcacccatgtctgagtttgagaaggcaagcctcatatcgtgggcgaaacatcttgcgcgcgtgagccgcttgattgatcttgttgatccagccctacaggatgtgaaccgtgatgaggttttactctgcattacagtcgcactcctttgcatccaaaggtctccagctcgtcgaccatcaagtgaggaggtactccgaatgctgtctggcgagggagaacctccgcacctcccattggagttctcaccgtctccacctggtgggttccctttcaagtcccgaaagaaagttcggattgctattgctgatctaaagtatgagggtcaacctggtcattatgtcttctggaaaggctttattgaggcaaaaagtttcattctaaggcttgtttggatgcaaaggagtattgctgaatgccccaatcccttcggattgtggtttcaagtcgaagaaaatctcctctcatcaaagtg

SEQ ID NO: 3162 - DNA, 1383 bp, Oryza sativa
atgacgcagctcgccgatcgcatcgccaaccatggcgtccccgtcacggtcgccgtcgccgacgttccgtcgtcaggcgagtcccgtaagaccgttgcccgcctctccgcctactacccttccgtctccttccagctgctaccaccggcggcaccggcccgttccggcgccgacacggccgaccctgacgctgaccccttcatcaccctcctcgccgacctccgcgccaccaacgccgcgctcaccgccttcgtccgctccctcccgtccgtggaggccctcgtcatcgacttcttctgtgcgtatgggctcgacgccgccgcggagctcggcgtcccggcctacctgttcttcgtctcctgcgcttcggcccttgcttcctacctgcacatccccgtcatgcgatccgccgtgtccttcgggcagatggggcgctccttgctgcgcatcccgggagtccatccgattccggcgtccgacttgccggaagtgctcctgctcgaccgcgacaaggaccagtacaaggcaaccatcgctttcttcgagcagctggccaaagcgaagagcgtactggtgaacacgttcgagtggctggagccccgcgccgtgaaggcaatacgagacgggatcccccgccctggcgagcccgcgccgagattattctgcgtcggcccattggtcggcgaagagcgcggaggcgaagaggagaagcaggagtgcctaaggtggctggacgcgcagccgccgcggagcgtggtcttcctctgcttcgggagcgcgagctcggtgccggcggagcagctgaaggagatcgccgtggggctggagaggagcaagcactcgttcctctgggccgtgcgcgcgccggtcgcggcggacgcggactcgacgaaacggcttgagggccgcggcgaggcggcgctggagtcgctgctcccggaggggttcttggacaggacatgggggcgcgggctggtgctgccgtcgtgggcgccgcaggtggaggtgctgcgacacccggcgaccggcgcgtttgtgacgcactgcgggtggaactcgacgctggaggccgtcacggcaggggtgcctatggtttgctggccgatgtacgcggagcagaggatgaacaaggtgttcgtcgtggaggagatgaagcttggggtggtgatggatggctatgacgacgacggggtggtgaaggcggaggaggtggagaccaaggtgaggctggtgatggagtcagagcaagggaagcagatcagggagaggatggcgttggcgaaacagatggccactcgcgcgatggagatcggcggatcgtcgacggcgtcattcactgactttcttggcggcctgaagatagcgatggacaaggacaattga

SEQ ID NO: 3163 - DNA, 2595 bp, Oryza sativa
atggctgcggtggagctcggggcttgtcacaaagacaatggtagagttgaagggcttttggtgaagaaagatcgggaatttgttgataaggtgcttgcagtgcaaaaaaatcggtacttccacgatgagtccgtgagtgataacgatgtccgcaacatagtgttgtcttatcttatgcacaactgttttaaggagactgctgagacattcttatccagcactggtttggaactgcctgttgattacactgtagatgtagataagcgtaaagcgatttttagttttgtgttggaaggcaatgccctgaaggctatagacctgacagaagagttggcacctaacttgctagagaatgatatggatttgcattttgatcttttaagtcttcacttcattgagttagttcgttctagaaaatgcacagaagctcttgagtttggtcagaaaaagttgacgccatttgggaaagtgcccaagtacgttgagaaactagaggactttatggccctcctagcttatgaagagcctgagaagtcacctatgtttcatctactaagcccagagtacaggcagaatgttgcagatagcttgaatcgggctgttcttgcacatgctaatcgaccagcatattcatcattggagagagtgatacagcaagcaactgtggttagacaatacctacagcaggaagttggcaaggattcttacccgccattttctttgaaggcctttctgaacaaagatatcgtcagtttgaaccaatctgcagtgcacttattactatgcctgatgcttggtctctacaaactattgagctttaaaggattcaacgggaagaacccgatactcgttgggccgtggggagggttgggaggaaccctttgggacgacggcgtgcactccacggtgaggcaggtcgtgattactcatggtgcagccattgattccatcaagatcgagtatgacctgaaaggaaagtcagtctggtcagagaagcatggaggtgatggaggcaccaaaactgatcaggtgaaactcgactaccctcaagaaatcctcacctctgtcagtggctactacggatcattgggaggctgcatcgtcgtaagatcactaacattcaggagcaacctctccaagtacgggcctttcggctccgaggaagggacgcccttctcgctcccagtggcggtcaccggtaaggtcatcggcttccatggcaaatccgggtggtttctcgactcaatcggctgccatttcaagaaggagaagaacgccactccgtcgtccaatgctccttcagctctcaggagcatcacgagacctcatgacaagaatggcaacaggtacgcagatagcaatgctgggtatgacatggttcttgccgtcagagacagaggtgacagctacagtgtcctgactagcaacaatcccaaggaacagtatcctaaccaatcacaggatgctactctctggaacaagatggtgtcactgcctagtttctactcggataatgggaccatgacaataagcactccggtgagatttggtccctggggtggaaatggcggcaccatattcgacgacggtatatacactggtgttcgacagatcaatttaaagcgaggattgggtatatcgacgatgaaggtcctctatgatcgaaatgggcaggctatatggggtgataagcgtggatccagtggggcagcaagggctgagaaggtagtattcgattttccatcagagatcttaactcacataactggttacttcagttcgacgatgatcatgggatcaacggtgatcaagtctctgacattccacacgacgaagaagagccatggtcctttcggggatgagactggcacgttcttctccagctgcctgaccgaaggtaggatagtaggattccatggcagggatgggtggtacatcgacagcattggagtccatgtccttgaaggcaaggtgttgtcacagagagctgacagagcattgaccgaaacgagcccgtctcggcacgccgatatgcttgcagtagcacagagggaaataggagatgaggttacatatggtgtggtgaaagaaccaataccagtagggccagggccttggggtggcgagggaggcaagccatgggacgatggtgtctacacaggagtgaagcaaatctacatcatgagagccgatttcatcggttctgtgcagattgagtacgacaggagtggccaatccatctggtccacaaggcacggcaacggtggccagataacacacagaatcaagctggactacccacacgaggtcctgaactgcatatacggctactacaacacctgccaggatgaagggcccagagtgctgaggtcgatcactctcgtcagcaaccgggggaagtacgggccgttcggcgaggaggtcgggacctacttcagctcggcgacgacggaagggaaggtggtcgggttccatggccggagcggcctgtacctggacgccattggcgtgcacatgcagcactggctgggtgacaggaacagaactgcagctcccagctctaataagtactacatctccaagtacctgttttga

SEQ ID NO: 3164 - DNA, 4386 bp, Oryza sativa
atgaagagccaagccaagcgtgttgacctcaaattattgaccttaatcacttactttaaccatttatctgtgccttcgctcgccgccgcggccgttaccgacacgctccgcggcggccggaacatcaccgacggcgagacgctcgtgtcggccgacggcacgttcactctggggttcttctcccccggggtgtcagccaagagatacctcggtatatggttcacggtctcccctgatgccgtttgctgggtggccaaccgagacagccctctcaacgtcacctccggcgtgctggcgatcagcgacgccgggatcctcgtcctgctcgacggctccggcggcggccatgtcgcgtggtcgtcgaactcgccctacgccgcctcggtggaggcgcggctgtctaactccggcaacctggtcgtccgtgacgcaagcggcagcaccaccacgttgtggcagtcgttcgatcacccgtcgaacaccttgttgccgggcatgaagatgggcaagaacctgtggaccggggccgagtgggacctcacgtcgtggcgctcgccggacgacccgtcgccgggggcctaccgccgcgtgctggacaccagcggcataccggacgttgtcctgtggcaagacggcgtcgagaggtacaggtcggggccatggaacggccggtggttcagcggcaacccggaggcggcgacgtacacgacgaacctgatcacgttccaggtgaccgtcagcccgggggagataagctacggctacgtctccaagcctggggcgccattgacgcgctccgtcgtgctcgacaccggcgtggtgaagcggctggtgtgggaggcgacgagccggacatggcagacgtacttccaggggccgagggacgtgtgcgacgcctacgccaagtgcggggcgttcggcctgtgcgacgccaacgcgccgtcgacgtcgttctgcggctgcctcagggggttcagcccgacgtctccggcggcgtgggcgatgaaggacgcctccggcggatgccggcgaaacgtgccgctgcgctgcggcaacacgacgacgacggatgggttcgcgttggtgcagggagtgaagctccccgacacgcacaacgcgtcggtggacacgggcatcacggtggaggagtgcagggcgaggtgcgtggccaattgctcgtgcttggcctacgccgcggcggatatccgaggaggcggcggtggtagcggctgcgtcatttggaccggcggcatcgttgatcttcggtatgtcgaccaagggcagggtctgttcctgaggttggcagagtctgaattagaaggaaacacaaaatctcagggatactctaaatctgtgaaagtgaaggcggccactggaaatttctcacagagccatgtgattggccaaggaggatttggcatagtttacaagggccagttacctgatgggagaatgattgctgtaaaacggctacaccaatcaaccctcaccaagaaaggcaagaaggatttcacaagagaagtggaggtgatggctaggctcagacacggcaaccttcttcgtctccttgcctactgcagcgaaggcagcgagcgtgtgctgatatacgactacatgtcaaacaggagtttggatctctacatatttggcgattctggcctccgactcatgctcaactggagaaaaagattgggcatcattcatgggatcgccaatggtattgcgtacctgcacgagggatcaggcgagtgcgtcatccacagggatctgaagcctccgaacgtactgttggacgacagtttcagacccaagattgcagattttggcaccgccaagctattcacagcagaccagccagagccttccaatctcaccgttgtggtttcaccgggatacgcatctccggagtacgcatggcgaggggagatgacactaaagtgcgatgtctacagctttggagtcgttcttctcgaaacccttagcggacagaggaatggtcccatgtacagtctccttccacatgcatgggagctgtgggagcagggcagggtgatgtccctccttgacgcgatgatcggtctccctctctcagtctcagggcctgatcacaccgagatggaagatgaactggcgaggtgcgtgcagatcgggctcctgtgcgtgcaggatgcgccggaggaaaggccggccatgtcggcggtcgtcgcgatgctgaccagcaagagctcacgggtggatcgtcccaagaggccaggggtgcagaagctaggtgacactcttggcaagggccggaacatcaccgacggcgagaggctcgtctccgccggcggctcattcacgctgggcttcttctcgccggcgtcgtcttcgtcgtcgagcaccagccggagatacctcgggatatggttctccgtctccgacgacgtcgtctgctgggtcgccaaccgcgaccgccctctcacggacacctccggcgtgctggtgatcaccgacgcggggagcctcctcttgctcgatggctctggccacgtcgtgtggtcgtcgaacacgacgaccgggggcggcgcgtccatggcggcgcagctgctcgagtcgggaaacctcgtcgtcagtgaccgcggcaatggcggcgcgggcgctgtcgtcgtgtggcagtcgttcgaccacccgtgtgacacgctgctccccggcatgaagatcggcaagaacctgtggaccggcgccgagtggtacctctcgtcgtggcgttcgtccggcgacccgtcgccggggaactaccggtacaggacggacacgaagggcgtgccggagaacgtgctctgggacggcgacggcgagatcaccttcggctactccgccaacgccggcgcgccgttctcccgcctcgtggtgacgggcgtcggcgaggtccagcggctggtgtgggagccgagcagccgggcatggaagaacttcttccaggggccgagggacctgtgcgacgactacggcaagtgcggggcgttcggcctgtgcgacgccggcgcggcgtcgacgtcgttctgcagctgcgtggagggcttcaccccggcgtcgccgtcgccgtggaagaagatgagggacacctccgccgggtgccggcgagacgcggcgctgggctgcgccacggacggcttcctgacggtgcgcggcgtgaagctccccgacgcgcataacgcgacggtggacaagcgcgtcacggtggaggagtgctgggcgcggtgcctcgccaactgctcgtgcgtcgcctacgcccccgccgacatcggaggcggcggcggctgcggcgccgggagcggatgcatcatctgggccgacgacctcgtcgacctgcgctacgtcgatggaggacaagatctctacgtgaggttggcgaaatctgagttaggcaaagatggtattcggcaacggcggcctccagctgctgtggttattggtgcatccattgcttcagttgttggggttcttctcattattttgttggtcctcctatatgtgattaggaggcgtcagaggcctagagtatcagatgatgatgcgggcgttccagctgctactgctgctgttcatgctcgtcctaatcctgctttggctgccccttcaattaatctgtctagtgtgaaggaggctacagggaatttctctgaaagcaatatcattggcagaggtggtttcggcattgtctatcaggggaagctgcccagtggtagaaaggttgctgtaaagaggctcacacagtctcttgttactgacaaacgcaaggaggatttcataagagaggtggagatgatgtcgaacacaaggcacgcctaccttgttgagctgctctgttactgccaagaaggaggcgagatgatactagtctatgaatacatggagaacatgagcttggatctctacatatttggagaagatcgtagactgcgagcctctctgaattgggtgcaaagattagacataatccgcgggatcgccataggtgtcgagtaccttcacaacgtgaaagttattcacagggatctgaaaccatccaacatactcctagatgacaatcggagacctaagacctgggagtcttggaaacagcatgagatcgaggacattcttgatttaggactgatcaaacctgagcctgatctcctgcttgggctagacaggtgcatccaaattgggcttctctgcgtacagcaatctcccgatgacaggcctaccatgaatcaggttgtctcaatgctaaccaaatacagttcacagatagccatgcccaagaatcccatgatcaacagcagatgcgagccttcagtttcacaagtagtatctgacacagagccggcctcacacgacagacctgggccgagcctgaactga

SEQ ID NO: 3165 - DNA, 2360 bp, Oryza sativa
atgaatatggcatgcctcccctttctcatctgcttgctcctcatctccttctgcaagtgcgatgatcagctgacacaagcaaagcagctccacccaggcgacgtgcttggctccaagagcggggtgtttgcgctcgggttcttctcccctggaacctccaacaagagcttatatcttggcatatggtaccacaacatcccgcagcgcacatatgtttgggttgccaaccgagacaacccgatctccacaccttcatcatccgtgatgctcgccatcagcaatagctctaaccttgtcttgtcagattccgaaggccgaactctttggacaacgaacatcaccataactggaggcgacggtgcttatgcagcgttacttgacacaggaaacttggttctccagctgccaaacgaaacaatcatatggcaaagctttgatcacccaactgacaccattctgcccaacatgaagtttttgctgaggtacaaggcacaagtcagcaggcgacttgtcgcttggaagggcccaaatgatccatccaccggggaattctccttgagtggcgaccccagcttagacattcaggccttcatctggcatgggaccaagccatattaccgcttcgtcgtgattggtagtgtgtcagtgtccggcgaagcatacggcagcaacaccacctctttcatatatcaaactctggtgaacacacaggatgaattctatgttaggtacacaacctctgatggctcagcaaatgcacgcatcatgcttgattacatgggaaccttcaggttcctgagttgggatgatagctcgtcatcatggacagttcgcttacaacgcccagcgagcaccatcgactgctatacctacgcctcatgtggcccattcggctactgtgatgccatgctagccatcccaaggtgccaatgcctcgatgggttcgagcctgacaccaccaactcttcgagaggatgccgaagaaagcaacagttgagatgcggagatgggaatcattttggtaaccatgtccggaatgaagccggcaccacggcagaccaatcaaggtgcttgctttggactggggagctagtcgacacggggaggactggttttggtgatggtcagaacctgtacctccggttggcctactctcctgggtacacttctgaagccaacaaaaagaacaaaaaagtagtgaaggttgtagtcccaattatagcatgcctgctgacattcacatccatataccttgtcaggaagtggcaaacaaaaggcaaacagagaaatgacgaaaataagaagagaacagtgttaggaaactttacaacttctcacgaactttttgagcagaaggtagaatttccaaatattaattttgaagaggttgctactgcaacaaacaatttcagtgattccaacatgcttggcaaaggaggttttggtaaggtttataaggggaagttggaaggaggcaaagaagttgctgtcaaaagactcggtacaggttccacacagggggtagagcattttacaaatgaagtggttcttattgccaaattgcagcacaaaaatctagtcaggcttcttggttgctgcattcatggagaagagaagcttcttatttatgaatacttaccaaacagaagcctggattacttcctttttgatgattcaaaaaagtctatgcttgattggcgaacacggttcaacataatcaaaggagtagctagaggacttgtttatctccaccaagactcaaggatgacaataattcacagagatctcaaagccagcaacattttattggatgaggagatgagccccaaaatatcagattttggtatggcgagaatctttggtagcaaccagcatcaagcaaacactaagcatgtagtcgggacatatggttacatgtcacctgaatatgcgatggaaggcatcttctctgtcaagtctgacacctacagctttggtgttttagtcttggagcttataagtggctctaagatcagctcacctcatctgacaatggattttccaaaccttatagcccgtgcctggagcttgtggaaagatggaaatgcagaggattttgtggactcaattattctggaaagctatgcaattagcgagtttttgctctgtatccacttaggactgttatgtgtccaggaagacccaagtgctagaccattcatgtcatcagttgtggccatgttagagaatgagaccacagcacgtcctactccaaagcaacctgcatatttcgtgccaaggaattatatggccgaagggacgagacaggacgccaacaaatctgtaaacagcatgagccttaccacactacaggggcgtta

SEQ ID NO: 3166 - DNA, 783 bp, Oryza sativa
atggggaggtcgccgtgctgcgagaaggcgcacacgaacaagggggcgtggacgaaggaggaggaccagcggctcatcgcgtacatcagggcgcatggcgaaggctgctggcgctcgctgcccaaggcggcgggcctccttcgctgcggcaagagctgccgcctccggtggatgaactacctccgccccgacctcaagcgcggcaacttcaccgacgacgaggacgagctcatcatccgcctccacagcctcctcggcaacaagtggtctctgatcgccgggcagctgccggggaggacggacaacgagatcaagaactactggaacacgcacatcaagcgcaagctcctcgcccgcggcatcgacccgcagacgcaccgcccgctgctcagcggcggtgacggcatcgcggcgagcaacaaggcggcaccaccgccgccgcatcccatatccgtcccggcgaaggcggcggccgcggcgatcttcgccgtggcgaagccgcagccgccgccgcgcccggtcgactcctcggacgacggctgccgcagcagcagcggcacaacgagcacgggggagccgcggtgccccgacctcaacctcgagctctcggtcgggccgacgccgagctcgccgccggcggagacgcccaccagcgcgcggccggtctgcctctgctaccacctcggcttccgcggcggggaggcgtgcagctgtcaggctgacagcaagggcccacacgagtttagatatttcaggccgttggaacaaggccagtacatatga

SEQ ID NO: 3167 - DNA, 1887 bp, Oryza sativa
atggcggcggcgggggacgtgcagatggcggagaaggagacgttcgcgttccaggcagagatcaaccagctgctctccctcatcatcaacaccttctactccaacaaggagatcttcctccgcgagctcatctccaactcttctgatgcgcttgacaagatccgcttcgagagcctcaccgacaagagcaagctggacgcccagccggagctcttcatccgcctcgtcccctacaagccctccaagactctctccatcatcgacagcggcgtcggcatgaccaagtccgacctcgtgaacaatttgggcaccatcgcgcgctccggcaccaaggagttcatggaggcgctgcaggcgggcgccgacgtgagcatgatcgggcagttcggcgtcggcttctactccgcctacctcgtcgccgagaaggtggtggtcaccaccaagcacaacgacgacgagcagtacgtgtgggagtcgcaggccggcggctccttcaccgtcaccctcgacaccgccggcgagcgcctcggccgcggcaccaagatcaccctcttcctcaaggacgaccagctcgagtacctggaggagcgccgcctcaaggacctcgtcaagaagcactccgagttcatcagctaccccatctacctctggtccgagaagaccaccgagaaggagatcagcgacgacgaggacgacgacattgacgactccaaaggcaaggagaaggaaggcgacatcgaggaggtcaaagataagaagaagaagaagaaggtgaacgaggggcagctggagttcaaggccatcctcttcgtgccccgccgcgcgcccttcgacctgttcgacacccgcaagaagatgaacaacatcaagctctacgtgcgccgcgtcttcatcatggacaactgcgaggagctcatcccggagtggctcggcttcgtcaagggcgtcgtcgactccgacgacctcccgctcaacatctcccgcgagatgctgcagcagaacaagatcctcaaggtcatccgcaagaacctcgtcaagaaatgcatcgagatgttcttcgagatcgccgacaacaaggaggattacgccaagttctacgaggccttctccaagaacctcaagctggggatccacgaggactcgcagaaccgcggcaagctcgccgacctgctccggtaccactccaccaagtccggcaacgagctcaccagcctcaaggactatgtgacccggatgaaggaagggcagaaggaggtctactacatcaccggcgagagccgcaaggccgtggagaactcgccgttcctggagaagctgaagaagaaggggtacgaggtgctgttcatggtggacgccatcgacgagtacgccgtcgggcagctcaaggagtacgacggcaagaagctggtgtccgccaccaaggaagggctcaagctggacgacgacgacgacgccaaggagaggaagaggtcgttcgagccgctctgcaaggtgatcaaggacattctgggcgatcgcgtggagaaggtggtggtctcggaccggatcgtggactcgccgtgctgcctggtcaccggcgagtacggctggaccggcgaacatggagcggatcatgaaggcgcaggcgctgcgggacagcagcatgggcgcgtacatgtcgagcaagaagacgatggagatcaacccggagaacgggatcatggaggagctccggaagcgcgccgaagcctcgacgacccaaacaccttcgccgccaggatccaccgcatgctcaagctcggcctcaacattgacgacgacgacgccgccgcggccgacgacgacgctgacatgcccgcgctcgatgacgccgccgccgaggagagcaagatggaggaggtggactga

SEQ ID NO: 3168 - DNA, 1089 bp, Oryza sativa
atggcgccagctcgagtccacagcaatggccgcctcctcatgcttctcctcctgctcgccgtcgccggctttgcggcggcgcagccgagccaggacaatcctccggcgggctactacgcgaccaacttcagcccgtccatggccatcgtcatcgtcgtcctcatcgccgccttcttcttcctcggcttcttctccatctacgtccgccactgctacggcggccgcggcgactactcgaccaccccgctgccccggtccggcgccgcgcggtcgcggcggcagcgcgggctcgaccagtccgtgctcgcgacgttcccgaccatggcgtacgccgacgtgaaggcgcacaagtccgtcaagggcgcgctcgagtgcgccgtctgcatcagcgagttcgacgacgacgagacgctgcggctgctgcccaagtgctcccacgtcttccaccaggactgcatcgacacgtggctcgcgtcgcacgccacctgcccggcgcgacgccgtccgaggcagcagcgccagggggggaaggcsccggcggcggcggcggcggcggcggtggtgatcgacctggaggagaccgaggaagagaggatcataagagaggaagcggccgagctaacgcgcatcggcagcctgaarcgcgcgctgcgctcgaagtccggccgcgcgcccgccgcgcgtttcccgcgctcgcattcgacggggcactcgctctcctcctccgccgcggcgagcgccggcgccgagaggttcacgctgcggctgcccgagcacgtgctccgggaggtcatcgcggcggggcagctccagcgaacgacgagcctcgtggcgttccgcgccggccgccaggggagcacgcgccgtggcctcaggtcgggaggcggcggcggcggcggtgaaggcagcagccgcgccgggagaagcgtccggctcggccagtctggacggtggccgtcgttcctgccgcggacgttctcggcgaggctgccggcgtggggatcaaggtcgacgcggaggggcgacggcgacgggtccagcaagggcggcaggactgccggctccggcgccggcgccggcggcaagtaa

SEQ ID NO: 3169 - DNA, 1527 bp, Oryza sativa
atggcggcggtggtggacttcctggacctgcgggcggcggcgccgttcgtggtggccgcgctggcgttctacttcctggtcgagcagctgtcctaccaccgcaagaagggcccgctgcctggcccgccgctcgtcgtgccgttcgtcggcagcgtcgcgcatatgatccgcgacccgaccgggttctgggacgcgcaggcggcgcgcgccaggaagtccggcgcggggctcgccgccgacttcctgatcggccggttcgtcgttttcatccgcgactccgagctgtcccaccgggtcttcgccaacgttcgccccgacgcgttccacctcatcggccacccgttcggcaagaagctcttcggcgaccacaacctcatctacatgttcggcgaggaccacaaggacctccgccgccggatcgcgcccaacttcacgccgcgcgcgctctccacctacgccgccatccagcagcgcgtcatcctctcccacctccggcggtggctcgaccggagcgccgccaacggcggcaaggccgagccgattcgggtgccctgccgcgacatgaatctcgagacctcgcagacggtgttcgcggggccgtacctcaccaaggaggcgagggagaagttcgagagggactacaatttcttcaatgtcggcctcatggccctccccgttgacctgccggggttcgcattccggagcgcgaggctgggcgtggcgcggctggtgcgcacgctcggcgagtgcgcgcgggcgagcaaggcgcggatgcgcgccggcggcgaaccagagtgcctcgtcgacttctggatgcaggagacggtgcgggagatcgacgaggccaaggcagcggggaagccgcctccggcgcacaccgacgacgaggagctcgggggcttcctgttcgacttcctcttcgcggcgcaggacgcgtccacctcctccctctgctgggccgtgtccgcgctggactcccacccggacgtgctcgcaggcgtgcgcgccgaggtggcctccctctggtccccggagtccggcgagcccatcaccgccgagaagatcgcggagatgaagtacactcaggccgtagctcgcgaggtggtccggcaccggccaccggcgacgctggtgccgcacatcgccggcgaggagttccagctgacggagtggtacacgatccccaagggcaccatcgtgttcccgtcggtgtacgagtcgtcgttccaggggttccccgagccggacacgttcgacccggagcgcttcttctcggaggcacggagggaggacgtggtgtacaagcgcaacttcctcgcgttcggcgccgggccgcaccagtgcgtcgggcagcggtacgcgctcaaccacctcgtcctattcatggcgctcttcgtctccgtcgtggacttccggcgagaccggacggagggctgcgacgagccggtgtacatgccgaccatcgtgccgagggacagctgcaccgtgtacctcaagcagcgatgcgccaagttcccatctttctga

SEQ ID NO: 3170 - DNA, 450 bp, Oryza sativa
atggcggcgacggcgcagaactcggcgcaggactacgtggacgcgcacaacgcggcgaggtccgacgtcggggtggggccggtgagctgggacgacacggtggcggcgtacgcggagagctacgcggcgcagcggcagggcgactgcgcgctggagcactcggactccggcgggaagtacggcgagaacatcttctggggctccgccggcggggactggacggcggcgagcgcggtgtcgtcgtgggtggcggagaagcagtggtacgaccacgacagcaacagctgctcggcgccggcggggagctcgtgcgggcactacacgcaggtggtgtggagcaactcgacggcgatcggctgcgcccgcgtcgtctgcgacaacagcctcggcgtcttcatcacctgcaactactcgccgccgggcaacgtcgacggcgaatctccctactag

SEQ ID NO: 3171 - DNA, 1284 bp, Oryza sativa
atggggaggcattcttgctgctacaagcagaaattgaggaaggggctctggtcccctgaggaggatgagaagctcatgaatcacataaccaagcatggccatggctgctggagttctgttcctaaacttgcagggctccaaagatgcggcaagagctgcaggctgaggtggataaactatctgaggcctgacctcaagagaggtgcattctctcaggaggaagaagacctcatcattgagctccatgctgtccttgggaacaggtggtctcagattgcagctcagctgcctgggaggactgacaacgagatcaagaatctctggaattcttgcatcaagaagaagctccggcagaaaggcattgatcccaacacccacaagcccctcaccgaggctgatcgcaggggagcagcacccacagtcagcaccgagaggacctcagggtccagcgacgtcaacccgtcaagtgctggtgctctagggaacttgagccacctcctcagcgagacagcacaatcatcaatgctgctgccggtgtatgataagaatcaccctgaaactgcaagcttgccacgccctaaggtgccaccaaaggagttgtttcttgaccagcttactgccggtcacgagagcccatcaagttgccgctcatcaggtccaaccctgtattttcctttccagcaaccattaggctacagtaatgaatgtggcactggggatggtgcgagtatgaattcactctggttcaaccagaatgatttcaactgcagcacaatctccaccgtgatgccaccagtttcaccatcagccctctcaacatcaatggggctgaatcttcccccagaaaatcctcgtcacggaggcactggcattggcaacaccccgttctactgggatggttccaatcctagcagcagcggcagtactgggagcagcggaagcaacagtatgggattcgagccacagagcacaacctcaattttggagaacagtgtattcccatggacagatatcggacaagagaaagataccagagttcacttagtggaggaactcaagtggcctgatttgctccatggaacctttgctgaggcgacgacagccatgcagaaccagagccaatcattatacgatgatgtgatcaaggcagagagccaattcaacatggaagggatatgtgcctcttggttccagaatcagcaaccacaacaacagctgcaagcagcatcagacatgtatgataaagacttgcaaagattgcccttgtcttttgaacatatctag

SEQ ID NO: 3172 - DNA, 2988 bp, Oryza sativa
atggcaagggatttgtatgacatcatatctgatagaagacaagattttgatccaccctttcggcgagaggggagtgatgatgcctttctacagcttgttattcaacccatctacagtgttatgaagcaggaagctgcaatgaataaacgtggtaggacaagccactcaaagtggagaaactatgatgacctgaatgaatacttttggtcaaagagatgcttcaaacagcttaaatggccgatggattcagcagctgacttttttgcggttcctctgaaaattaaaactgaagagcatcatgatcgtgtgattaccagacggagaatacccaaaacaaattttgttgaagttcgtacatttttgcacctattcagaagttttgatcgaatgtgggctttctttatattagccttccagaaatgttttgacaatattcataacggctgcatttctgaacttcctgcaaggaaaaggagggcagatatccaaacactcaagtatcaaaaagtgattcaaccaaacaaaattatcattaccaccctcataatcccaaatagttccttagccacgcttgagataattcttaactggaaagcttggaggagtctggagtgctcgcagatgatacgatatatcctgaaatttgttgtagctgttgcttggttgataattcttcctacaacgtatatgagttctattcaaaattccacgggccttatcaagttcttcagcagctggattggaaatctgcagagtgaatcgatatataattttgccgttgctctttacatgttaccaaacatattcagtgctttgtttttcatatttctaccatttcgaagggtattggagcgttcaaattctcgcattattagattttttttgtggtggacacagccaaagctatatgttgcccgaggcatgtatgaggatacatgttcacttctaaagtatacattattctggatactattgctcatatgcaagctcgccttcagtttctatgttgagatttatcctctcgttggaccaacgaggacaattatgttcttgggacgagggcaatacgcatggcatgagttctttccatacttgcagcataatttaggtgttgtaattactgtatgggcaccaattgtcatggtatacttcatggacacacaaatatggtatgccattttttcaacaatatgtggtggagtgaatggtgccttcagccgcttgggtgagatccggacccttggaatgttaagatcacgattcgaggcaattccaatagcatttggcaaacatcttgtgcctggacatgatagtcaaccaaagagacacgagcatgaggaagacaaaattaacaagttctctgacatatggaatgcatttattcactctttgagagaagaagacttaataagcaatagggagagaaatttactgattgttccatcatctatgggtgatactactgtttttcagtggcctcctttccttctcgctagtaagattccaattgcacttgacatggctaatagtgtcaaaaaaagggatgaagaattgagaaagaggataaatcaggatccatatacctattatgctgtagtagaatgctaccagacattgtttagtattctagacagccttattgtggaacaaagtgataagaaagttgttgatagaatacatgataggattgaagatagcataagacgtcagtcacttgtaaaagagttccgattggatgaacttcctcagctaagtgctaagtttgataagctgctaaatctattgttgagaactgatgaagacattgaaccgataaagacacaaattgccaatttgttacaagatataatggaaatcatcacacaggatattatgaagaatggacatattttgaaggatgaaaacagaaacaatcaattgtttgcaaatataaatctggattcagtaaaagataaaacttggaaggagaaggcttcaactattatgacaacgaaagratctgcaatatatgtacctacaacttggatgctcgtcgcagratcacttycttgcaaactcacttttcatgaaaaatgccaaaggctccacagtgttttaactccctacttcaaagaggaggtgctcttttcagcagaagacctttataaaaagaatgaggatggaatatccatactgttctatctacggaaaatatatccagatgaatggaagaattttcttgagaggatagaatttcaaccaacggatgaagaatcactgaaaacaaagatggatgaaatccggccctgggcatcttatagggggcaaacactcaccagaactgttaaactggaacatcgtagaacagtagagtcttctcaacaggggtgggccagtttcgatatggcacgggcaattgctgatatcaaatttacctatgttgtctcttgtcaagtctatggaatgcaaaagacatccaaggatcccaaagacaaagcttgctatttaaacatccttaatctcatgttaatgtacccatcgttacgtgttgcttatattgatgaagtagaagctccagctggtaatgggacaacagagaagacttattattctgttcttgtcaaaggaggtgaaaagtatgatgaggaaatttatcgcatcaagcttcctggcaaacctacagatattggagagggaaaacctgaaaatcaaaaccatgccattgttttcaccaggggagaggcactccaggccattgatatgaatcaggataattacctcgaagaggcatttaaaatgagaaatgtgctggaggagtttgagagtgaaaagtatggaaagagaaaacccactatattaggcctccgtgagcacatttttactgggagtgtttcatcacttgcttggtttatgtccaaccaagagaccagttttgttaccattgggcaacgagtcttggctaatcctctcaatttttatggcccttcattcattgatagacaccactaa

SEQ ID NO: 3173 - DNA, 1760 bp, Oryza sativa
atggatggccggatctggcaccccggtgtccagatccagcgtgctctcgacggattcgctgaggctggcatcgacggcgaggggtggctgcagcggcggcgacggggtggctgcagtggtggcgacggggcggtggaagcaaggtggaggggaggggggaggatgtggtcgtcgagccaggcgagcacgaggggcgtgattgaggtggggagggtggaggcggggccttcccatttccccaagaggcccgcgccgcggaattcctccagggtcaatctgtcaaggacatatgcaattaaatcttgttcagtgagtagccgtacagggctttgccttggacaatgttatcataagaagtcttctgcttgcaaatgcaagttgggatggtcttctcaaccactgtctagcttgaggcatcacttaagagtacattcatcagcatcggaggcggttcttacttcccaatctgatttcacaaaacttcttgttgggaatgaaaaaattggtgttctcttgctgaatcttggaggtccagagacccttgatgatgtgcagcctttcttgtttaatctatttgctgatccggacattatccgtcttcctagattgtttcgctttcttcagaagccattagcacaatttatatctgttgtaagagcaccaaagagcaaggaaggctatgcatccatcggtggtggttctcctcttcgtcaaattactgatgcacagataattggagtaaatatggctgaagcactgaggaaagcattatgtgataaagatattcctgccaaggtgtatgttggaatgcgttactggcatccattcactgaggaagctatagaacaaataaaacgggatggcatcacaaaacttgttgtacttcctctgtacccccagttctccatatcaactagtggttcaagtctccgtttactggagggcatattcagagaggatgagtatctggtgaatatgcagcatacagttataccttcctggtatcagagggagggatatatcaaggctatggcaactttgattgagaaggaactgcgaacattttcagaaccccaaaaggttatgatatttttcagtgcccatggagttcctctggcatatgtagaagaagctggtgatccatacaaagcagagatggaagagtgtgtggatcttatcatggaggaactcgaaaaaagaggaataacaaactcatgcacacttgcctatcagagccgagtggggccagttgaatggctgaggccctacactgatgagacaattatcgagttggggcagaaaggggtgaagagccttctagctgttcccatcagttttgtcagtgaacatattgaaactttggaagaaatcgatgtagaatacaaggagttggctttagaatccggcatcaagcactggggacgagttcctgcattaggttgtgaacccacgttcataacagatcttgccgatgctgttattgaaagcttgccttatgttggtgctatggcagtttcaaaccttgaagctcgacagccactggtgccacttgggagtgtggaagaactgctagcggcgtacgactcgaaacgcgacgagctgccccctccagtgactgtatgggagtggggctggacgaagagcgcggagacctggaatggacgggctgctatgctggccgtgctggctctcctagtgctggaggtgacaaccggagaagggttcttgcaccagtggggcatcctgcctttgttccactg

SEQ ID NO: 3174 - DNA, 1830 bp, Oryza sativa
atggcggcctcgacgatgaagcacctcgtgcaggtcggggaggcgcgggaggcggcggaggaggacggaggggcgccctcggccgggccggcgtaccgctgcgcctacggcgggggcgccgcttcgccgcccgccgtgccggggctcgagtgctgctgggacatattccggatgacggtggagaggtgcccggacaacaagatgttgggccgccgagaaatcgtcgacggcaaggctggcaagtacacgtggataacttacaaggaagcgtacgacaccgtgatcaaggtgggcgcgtccatccggagccttggagtcggcaagggtggacgctgtggtatttacggagccaactgccctgagtgggttatcagtatgcaggcctgcaatgcccatggcatatactgtgttccgttgtatgacacgctaggtgctggggctgtagaatttatactgtgccatgctgaggtagaaattgcttttatagaggaaaagaagataggagaggtgctcaagacatttccaaatgcaacaaagtatttgaagacaattgtgagctttggaaaggtcaatcctgaacaaaaggaaaaggttgaacaaaacggagtgtccatctactcgtgggaagagtttttgcagttgcttcgtgaagatgatgtttacatttcttatcttcctcttgcccatatctttgaccgtgtacttgaggaagtgttcattcaccatggtgcatcaattggattttggcgtggagatgtcaaactcttggttgaagacattggagaactcaagccaacaattttctgcgctgttccacgtgtactagacagaatttatggaggactgcaagataaagtttcgactggtggtttcctgaagaagacactgtttaatgttgcttacaaatacaaacaagggaatatggtgaaaggaagcaagcatgaagaagctgctgccatgttcgataaactagtcttcaccaaggttaaacgaggattaggtggcagagtacgacttattttgtctggtgcagctcccctgtctaatcatgttgaagagtacctgcgtgtggtaacttgctcccttgttcttcagggctatggtcttactgagacctgtgctgggtccttcgtttcccttccaaacaacatgtcgatgctgggaactgtaggccctccagtcccctatgtcgaagtacacctcgagtctgttcctgaaatgggatatgatgcattgtcaaaagaatcacctcgtggggagatttgcatcagaggggacaccttgttctcagggtaccacaaacgagaagacctcaccaaggaagttttagtcgatggatggtttcacacaggagacattggtgagtggcagtctgatggaagcatgaagatcattgatcgcaagaagaacatcttcaagctctcccaaggagaatatgtcgctgtggagaatttggagaacatattcggtcaagctcctggtgttgattcgatttgggtgtacgggaatagcttcgaatcatgcttggttgcagtggtcaacccgaacaagcaagctctggaacgatgggcagagtcaaacggggtaactggagactttgctaccatgtgtgaagatcctaaagcaaaagaatttatcttgggagaattaaccaagactggtaaagaaaagaagctcaaaggctttgagctcatcagggctgttcatctggagccagtgccattcgatatggatcgtgacctaattaccccaacttacaagaagaagcggccacagctgctcaaatattaccagaacgtcatcgacagcatgtataagaacatgaagtag

SEQ ID NO: 3175 - DNA, 723 bp, Oryza sativa
atggtgatgcggaagcacctgtcaatggtggcctttaacaacatcacgcggctgaccttcgggaagcggttcatagatgccgctggcgagttggacgagcaagggagcgagctgaaggcgatcgtgaacaacgggatcaagatcggcgcgtcactgaccatcgcagagcacatccgggtgctgcggtggctgaacccggtggacgaggagctctataacgcccacagcgcaaggcgagaccgcttcaccaggcggatcatggacgagcatgcccgtgagctcgagcgtcacggtgccaaacagcacttcgtcgacgccctgttcaccctcagggacaagtacgacctcagcgacgacaccgtcatcggcctcctctgcgatatgattgccgccggcacggacacgacggtgataacggtggagtgggcgatggcggagctggtgaggaatccaagggtgcagatgaaggcgcaagaggagctggaccgcgtcatcggccgcggtcgcgtcatgttggaggcagacatcccgaacttgccctacctgcaggccgtcgtgaaggagtcgttccggctgcacccaccgacgccgctgatgctcccgcacaaggccagcaccagcgtcaagatcgccggctacgatgtcccaaaggacgccagcgtcgtcgtcaacgtgtgggccgtagcacgtgaccccggtgtctgggacaacccgctcgagtag

SEQ ID NO: 3176 - DNA, 1190 bp, Oryza sativa
atgaaggttgatgatggtcctggcgtcaatggcagtagttgtawttacatcccaatagttgaggctgcacgatactttgaggattctatcaacaacttttggacaaagttgaaaggcaaggatgttgcggacctggagcagtctgctgatctggagagcataaatcttctccatggaagtgaacaagagggcaatacagcctcaccaacaaggttgcctgaagacatattggcttcagaagcagtcttccctgtccaggccgagctgaatgtagcagatggcagcaaagggttggatgcaaaagggcgctggacacgtgctcgtgtggctagagtcagcatggtagtctgccctttctggtttctcgctcagcttacattcaacctgtctctaagatacaccactgttacatcaaatacgatattgagcagcacgtctagcctcttcactttcttggttgcactagtatttcttggagaaacattcacgtggttgaaactaatcagtgtacttctctgcatgggaggaacgataattgttagcctagctgattcaggtagtacagcgaataccattgccacaaatcctctacttggagatgtcctttctattgtttcagctggattgtatgctgtgtatatcaccttgatacggaaaaagctgcctgatgagaaagaaggtcaaggcgaagtgagcatggctcagtttcttggattccttggactgtttaacatgttatttttctttccttttgcattgttcttgaatttcaccaagctggagccattccacaggctgacatgggagcaagttggtcttattgttggaaaaggtttgttagataatgttttgagtgactacttgtgggcaaaagcaatccttctcacaacaacaacagtagccacggctggtctcacgatccaagttccaattgctgccattgtggatacactaacaggtcatgctcctcatctattggactacatcggagctgctgctgtgttggtcggttttgctggcatcaacatacctgtaggcactccacagggttctcagcaagagcaggaaactcctatcgtcagtatggttgatgatccagtccatttaccaagtgatagaaatgctactagcatggttgatgatccagtctatttaccaagtgatagaaatgctactggtgctgttcaata

SEQ ID NO: 3177 - DNA, 783 bp, Oryza sativa
atggcgttcggcgaagggtacgacaacctgtggggcgggcagcaccagacgctgtcggcggaccagacggcgctgacggtgtggatggaccggagctccggcagcggcttcaagtccaagcgctcctaccgcaacggctacttcggcgcctccatcaaggtcccctccggctacaccgccggcgtcaacaccgccttctacctgtcgaacaacgagctgtacccggggcagcacgacgagatcgacatagagctgctggggacggtgccgggggarccgtggacgctgcagacgaacgtgtacgtgcacggcaccggcgacggcgccatcatcgggagggagatgcggttccacctctggttcgaccccaacgccgaattccaccattacgccatcctctggaaccccgaccacatcgtcttcctcgtcgacgacgtccccgtccgccgttacccgsgcgccgccggcaacacattccccgaccgccagatgtgggcctacggctccatctgggacgcctccgactgggccaccgacggcggccgctacaagtccgactaccgctaccagcccttcgtctcgcgctaccgagacctcaagatcgccggctgcgaggccgccgcgccggcgagctgccagcccgtgccggcgtcgccgtcgggcgccaccggcgagctcagcgcgcagcagaaggcggccatgaggtgggcgcagcagaggtccatggtctactactactgccaggactactccaggaatcacgccaactaccccgagtgctag

SEQ ID NO: 3178 - DNA, 1545 bp, Oryza sativa
atgcggcggtggcgggagaagatccgcacgtcgacgccgctccacgtggtggggctcgccgagatcctcgccatctgcggcctcgtcgcctcgctcatctacctcctcagcttcttcggcatcgcgttcgtgcagtccgtcgtctccaacagcgacgatgaggaggaggaggaggacttcctgatcgactcccgcgccgcgggccccgtcgccgcgcaggctacccctccgccggcgccggcgccgttctcgctgctggggagcgcctgcgccgccccgaagaaaatgccggaggaggacgaggaaatcgtggccgaggtcgtggcggggaagatcccgtcgtacgtgctggagaccaggctgggcgactgccgccgcgccgccgggatccggcgcgaggcgctgcggcggaccacggggagggagatcaggggcctccccctcgacggcttcgactacgcctccatcctcggccagtgctgcgagctccccgtgggctacgtgcagctgccggtgggcgtcgccggcccgctcgtgctcgacggcgagcggttctacgtcccgatggccaccaccgagggctgcctcgtcgccagcacgaaccgcgggtgcaaggccatcgccgagtctggcggtgccaccagcgtcgtgctccaggacgggatgacgcgcgcccccgtcgcccgcttcccctccgcgcgccgcgccgccgagctcaagggcttcttggagaacccggccaacttcgatactcttgccatggtcttcaatagatcgagcagattcgctaggctgcagagagtgaagtgcgcggtggccgggaggaacctctacatgcggttcagctgcagcacaggggatgccatggggatgaacatggtgtccaagggcgtccagaacgtgctggactaccttcaggatgacttccctgacatggatgtcatcagcatatcaggtaacttctgttctgacaaaaagtcagctgctgtaaattggattgagggacgtggaaagtctgtggtttgtgaggcagtaatcaaagaggaagttgtgaaaaaggttctcaagaccaacgttcagtcactagtagaattgaacgtcatcaagaaccttgctggttcagctgttgctggagctttgggtggcttcaatgcccatgctagcaacattgtaacagccatctttattgccaccggtcaggatcctgcacagaatgtggaaagctcccagtgcatcacaatgttggaagctgtaaatgatggcaaagatcttcatatctctgttactatgccatcaattgaggtgggcacggttggtggaggcacacagctggcctcacagtctgcttgcttggacctacttggcgtgaagggcgcaaacagggaatccccaggatcaaatgcgaggctcctggccgccgttgtggctggcgctgtccttgctggggagttgtccctcatctctgctcaagctgcaggccatttggtccagagccacatgaaatacaacagatccagcaaagatatgtccaaggtcgcctcttga

SEQ ID NO: 3179 - DNA, 1197 bp, Oryza sativa
atgtgttgctttctgctggtctctgtactgctagccaccactctcaccgacgtagccagtgcacagagatggaggcagacgagcggcggcggcaaggacaggtgggacggcctcctcgacccactcgacgccgacctccggcgcgacatcatccgctacggcgagctggcgcaggcgacgtcggacgcgctcatcggcgacccggcgtcgccgttcgccggcgcgtcgcggttcgtctacgcgacgtcgagcgtccgcctccccgacgcgttcatgccgaggcccgcgccgtcggcgggcgcggcgtggagcggggagtccaactggatggggtacgtggccgtggccgccgacggmgtcgccgcgaagcccgggaggcgggacatcgtggtggcttggcgcgggacgaagcgcgcggtggagtgggccaacgacctggacatcacgctggtgccggcggacggcgtcgtcggtccgggcccgggctggacgcagccgtcggtgcacagggggttcctgtccgtctacacgtccaagagtttctcgtcgccgttcaacaaacttagcgcgcgagagcaggtgctagctgaaataactagacttctgcgcgcgtacaagaacgagaactgcagcatcaccataacgggccacagcctgggcgccgcgctctccacgctcaacgccatcgacatcgtcgccaacggctacaacgtccgcggctcgtcccgcgtcccggtccccgtcacggcaatcgccctcgccagcccgcgcgtcggcgacgatcagttcaagagggccttcgactcgacgtccaacctgagcctgctccgcgtccgcaacgcgccggacatcgtgccgaccatcctgccgtcggccttcttcaaggacgtcggcgcggagctgctcgtggacacgcgccggtcgccgtacctgaagaacccggcgggcccggcccagtggcacaacctcgagtgctacctgcacgccgtcgcgggcacgcagggcgccggcgacggcgcggggttcagccttgtggtggaccgtgacctggcgctggtgaacaaggaagtggacgcgctcagggacgagtaccaggtgccggcggcgtggtgggtggagaagaacaagggcatggtgcagaacgcgagcgggcgctgggtcttgcaagatcacgaggagggcaaccttgcaatgtga

SEQ ID NO: 3180 - DNA, 1785 bp, Oryza sativa
atggccagcctcgtgctctccctgsgcatcgcgccgtycacgccgccgctggggctgggcggggggcgatccgcggccgacgaggggccgtcgcctgccgcgccgccacgttccagcagctcgacgccgtcggtgagtctccgtatcaaatgtgggggggcatgtcttggtttgcggattggtgcggtgagggaggaggagtccaagttcaaggcgggggcggcggagggttgcaacatcctgccgctcaagcgatgcatcttctccgaccacctcacgccggtgctcgcgtaccgctgcctcgtcagggaggacgaccgcgaggcgcccagcttcctgtttgagtccgtcgagcagggatccgagggcaccaatgtggggaggtacagtgtggttggggcacagcctgcgatggagatcgtagccaaggccaaccatgtgactgtcatggatcataagatgaagtctaggagggagcaatttgcgcctgacccgatgaagataccaaggagcattatggaacagtggaacccacagattgttgaaggcctccctgatgcattttgtggaggatgggttggattcttctcttacgacacagtgcgttatgttgaaacaaagaagcttccattttctaacgcgccagaggatgataggaaccttcctgacatccatttaggcctctacaatgacatagttgtgtttgatcatgttgaaaagaaaacacatgttatacattgggtgagggtagattgccatgagtcagttgacgaagcatatgaggacgggaagaatcagctggaagctttgttatcaagattacatagtgttaatgtgccaactcttactgctggttctgtaaaacttaacgttgggcaatttgggtcagcactacagaaatcatcaatgtcaagggaggactataagaaagctgttgttcaagcaaaagagcacattctagctggtgacatttttcaagtagtcttaagccagcgttttgagaggcggacatttgctgacccctttgaggtgtaccgtgcattgcgtattgtcaatcctagtccttatatggcctatctacaggctcgtggttgtattctggtagcatcaagtcctgaaattcttacccgggtggaaaagaggacaattgttaacaggccacttgctggaacaattagaagaggaaaatcgaaagcagaagacaaagttttagaacaactgctgttgagtgatggaaagcagtgtgctgagcatattatgttagtagatcttggacggaatgatgttggaaaggtgtccaaaccaggttcagtaaaggtggagaaactgatgaacgttgaacgatattcacatgtcatgcacattagctcaacagttactggagagttgcgtgatgatctgacttgttgggatgctcttcgagcagcattgcccgttggaacagttagtggtgcaccaaaggtgagagcgatggagctgattgaccagatggaagggaagatgcgtgggccgtacagtggtggctttggaggggtttctttccgtggagacatggacatcgcacttgctctccgtaccatcgtcttccccacgggatctcgcttcgacaccatgtactcctacactgacaagaatgctcgtcaggagtgggtggctcaccttcaggctggagctgggatcgtcgctgacagcaagcctgacgatgagcatcaggagtgcttgaacaaggctgctggccttgctcgtgccatcgatcttgccgagtctacattcgtagatgagtag

SEQ ID NO: 3181 - DNA, 7065 bp, Oryza sativa
atggatcaatcaacaattgatcgaagttggatgtatgccaaaaatttgaaacgtcattctacggagtaccgaaagggcataataaattttatgaacgccgcggaggaggatcggataagaagaaacagtgattacatgtgttgtccatgtgcagattgcaagaacgagaatatgtttgatagtggagaggacgtacacggtcatctgatacaacgaggattcatggagggctatacatgttgggtgaagcatggagagcaagaatcaggaagtggagtagcagcagacagaagtggtgcgcataatcaggaagatgaaaatgagcatgacatgtttataccttctctattgggcggtgaaatagttgatgtggatcacgatctactgcaaaacatgttacgtgacgttgaggacccagcccagaatgagagagatggaatgaaattcagcaggttggtaagtgattccgagacgcctttgtacgctggatgcaaagcaaaacacactaagttgtcagttaccttgaacctaatgaagctgaaggcaagtagtggatggacagacaagagtttcacagatcttttaggaattttgaaggctatgcttcctattgagaacacattgcccgagacgacatacgaagcaaagcaggttctgtgtccactggggttagagatccgtagaattcacgcttgtcccaacgactgcatattgtaccacaagcaatatgcggacttggatgcttgtcctgtctgcaaggcttctcgatacaagcgaaagaaaagtgctgacgaaggaaataagtcaaagaggggtggtccggcaaaggttgtgtggtatctacctatcattgatcgtttcaagagaatctttgccaacccgaacgaagcgaagttagtccaaggcaacccggcaatgatatcgatgtattcctggagcytgttatcgacgatctggagattctttggaaagaaggagaacttcaagctaagagttctattrttctgcaccattaatgactaccytgcactcggtaatctttccggacaaactataaaaggaaagaaggcatgctccgattgcaaggaacatacacgaagccggtggctgaagaaatcaygaaagatggtatacatgggtcaccggaggtggctcccgctacgtcacacatttagaagaaagaagaaaatttttaatggtaagagagaacttcagcctgctcccaaagatttgtccggagatgaggtccacaatatggtcaaggacataagcaatgagtttgggaagaaaagaaaacgtagcaagacaaaggagaaggaaaagaatgtgtgtgagagtttggttggcctgatgttgaatattcccgggaagacaaaggacgggttgaacgcgcgccttgatctacaggacatgaatattcgcagcgaactccagcccatacgagatgcagagacagttgctatcagaggcattctaccaccsaaagtgcgtcacacgatccaacgtctgtgcgccttcttcaatgcaatyggacagaaggttatagatccagaagatctagatgggctgcagaccgatattgtgaataccctctatcacmtggagatgtttttcccactgtctttctttgatataatggttcatctccctgttcatctggtgaagcaaacaaaactatgtggcmcrgcttttctaagggaaatgtggccgtttgaaaggggagcatcattgaaggttacaygaccgaggaggctattgagttctgtgtcaattacatgtccgatgccgatcctatcggagttccagcgtctcgtcactgagggaaggttgtcaggtgttggcacaattggaaggaaaagaattaggcccgatcaagcatcgtacgcgcaggctcattacgctgtgctccaacatatggcagaagttggcccatactttgaggagcacttagcaaaaatccgagatgagaacttagggcgatctgatgcatggattaacagagaacataattcttggttcaacgaatggttcaagaatcatgtgacaatgtccacggatgtcccaaatgagacagtacagttgttggggatgggaccgggactgtcttggaccatagacacatggcaaggatacgatataaatggatacacattttacaccgtcaaacaagatgacaaaagcacagtgcaaaacagcggtgtccgtatagatgcattccaggatcaagttgggtcaaacacatactacggccgcattgaggagatctgggagctaaactacgtcaagttcaaggttcctttgttccgctgccgttgggtgaatctacgcactggtgtcaaagccgacaaggaaggtttcactttagtagatctatctaaggtgggatacgccgatgaaccatttgtacttgcgaaacaggtcgagcagatattctacataaaagacccttcaaacaagaagatgcacatcgtgagggatggaaagcgccgaattgtaggagttgacaacgtcgtcgatgaagaagaatacaaccataatcttcatctcgtgccgaccgcagagaagggcattgcttggctaacgttcaaggagagctttgattatcctgcggagcatgaagaccgtctcaggcgggttgctttcaaggttatgggcactgcttggaagaacttcaagactaagctagtcggcgagttcgtctacagcccggcaaatccagatccaagagagaaatttccttggatcacggaacaggtctgggaggaattccatgcgaagaagtcgacccccgagtctagagctagaagcgaggcatatcgcttgctccagaccaggaaccagcatccgcaccagcttggtgccaccggatatgccgaagatcaacgagtatacgaagctatacctcgcaagaggcctgctctcaaagacgcgaaggacgacctcctcataaaagcgttgggcaacaaggaacaccgtggacggacacggggcgttgggtcttctgttccctggaagtatggatttccagactacgcgtggcagtacaagaagcggacttccaacaaggcggagaaagatgcacgccttgaagccaagatccgggagtcgatacgagctgagctgacatctgaattcgacgaaaagctcgagtcgatgagggccaagattaggcaagagatccgagaagagcaacagatcccccaggccaccgctgctgctgcgcacaaagagttaggaagtcccaccgaaaaacgcagcagttgcgcatcaactgagttggcggaaaatccaacatcagtcgatagcgccgtcgaccacataacggaaccaacgagctgcaccctcacagttagggtgatgccgaccttcactgttccagcagccgagggacttgcgtacaagccgaccccagagacaagagtgcatggagcgcaactcagggccgactgtgcaaaagttcaagtcgactcggtgaagcccgaatacgagctgttccctctgaagtatccaccgaacgacgaggtcctctcactaggaaatgcccgtggtatcttcatccaatggcccaaggacctcattgagatcaggttgcagtacgacacggattttggggaggaccgaacggaggccgacagcaaggcgattcatgaacccccaccgatgaagaagagcagaaaggcacactcttcccctcagagaattactctcaataaacccgaagcaaaggggagaggaaggggaggaaaggtgcaggcctcgcttctagctccaagaaagctagatctgggcaagggccaggaagagactaagggcaaagaggtcaagaagaaatacgtcgctccacaggagttccaactaggcatgccattggttggagatgacgtgcttgccgcaatgggcaccgcttgcaaggaccttcacttatactacatggagaaatctaacgtcaggaagccaagtaaagctaccgatatccttggacagcacgatggaaagccattccttggtccaacaaattatatcgtggtcgacttcaaggatcttttcgacctctacaggctccgagcggtggacacaagcctccttaagtgctactccttgttaagttggcaatggtgtcagaagcatgcaccggaagttgccttcctttatccacaagtggtcactgtcacaaatctccagaatgaccgtcaaggaatggtcaactacatctacgacaccttgtggtcccgccgagacaaggagtacattatgtgtgcctataatcaatatgcccattggatccttctggtcataacacctaaatggagtacatgtcattacctgaactccagaattgataagaacgcatatgattggaccccaattcaactagcgatagatgaagcgtgggcccaatacgtgcaaagaggaggcctcaggaagacaggacatgacaccctcatccacaaaaaagacttcccggtgaagcaacaaataggtgaccagtgcggattccatgtgtgccacaatatgcgacttctgtatagagaaaaggtgaagactttggctgagtttgagggcacaataatcaagtctctgactaccagctttgaggaggtgaggggtattgaagtaataaaatttctcgatttgcatattagtggcagatgtcaccatccaattgttatggacaaaagctttgatgggacaaatcaaaatggtgtcataaatcactttcaagagatcatcttgtacctcaagattataacattctatatgttgagggggaaaaaagaagggaaagagatgattggtgcattttgggaacaggataacttaaattttggattaacaacaagaggaagtggatcaaccagacaagaggaaaacgtgcaaacaagacaggcttgcaacatcaccttgagtccaaagccaagaaagatggggctgtcaatctcatacccaccagacgactacctgccagcaatggaggacaacatgggcaggctgttcatccggtccctcagcttcgacgacgacatggaggccgccgccgatgactcgccgtcgacatcaccgatgccatcaccgtcggcgacattgctgccggcattcggctccggggggaagctgatcatagagggctccctgagcttcaagagaagagaggctgacccggttcagatggagaccatgatatccatcaggagtcccaagtctgacaaggagagctgcagcagcaagccaaatgctactgctggtgcatcgagatttgcgcttgccggagaccagacaccggaggattctccggtgatcgccggagttgccagccccaagcaccaggcagcggctgtcaggctgcagaaggtgtacaagagcttcaggacaagaaggcagctcgcagattgcgccgttcttgtcgagcagagctggtggaaattgctcgatttcgcactgctcaagcggaattcggtgtcgttcttcgacattgagaagcccgaaacggccatctcgagatggtctcgggcaagaatgagggctgccaaggttggcaaaggtctgtccaaagatgagaaggcccagaaacttgctctacagcattggcttgaggcgatcgatcctcgacatcggtatgggcacaatctgcactactactaccaccgttggctccattgtgagatcaaccagccattcttctactggttggatgttggtgaagggaaagatgtcaacttggaagagcattgccctagatggaagctgcataagcaatgcatcaagtaccttggccctaaagagagggaatcctatgaagtgatcgtcgaggattcgaggctgatatacaaactgagccgtcagatcgtcaacacgaccaaaagccgaaagggctcaaaatggatctttgtgctgagcacatgcaagactctgtatattggtcagaaacagaagggcacattccagcactccagcttccttgcagggggagctacatcagctgcagggagactgattgtagaggatggaattttgaaggcagtctggcctcacagtgggcattaccggccaacagagcagaactttcaggagttcatgaatttcctgaaggagagaaatgtggatctgactgatgttatgttgaacccttcggaaggtgaagatgatgccgaattcagcctcaagagcagccattctaggcaggacttgaccgaactctgtgaacctgacatgcaagaacatgaggaacaagtcacacaacaccatggcgctgacgaaaccaagaccagcagtgatgcacccaccatgacatccaccgaaaccatggcgagcacaccggcaatcaggaaatccacctcagccaacaagctgcaagggaagcggcctccgaggctgctgatcagttccaacaacacagaactacccgcaacacattgcaacggaaggccatcaccggttcacaaggacatcgacgaggattccaccatgttcggagagtgcctcgccttctgcaagaagaacctgtttgcagaggaaggcaatgaagaagatgagctggtggaagtaccagaggagatgatcatgaaccgtatcaactgcaagaaggccacgaagtcataccagctggggaagcaactgtccttccaatggagcactggagcaggtcctcggatcgggtgcgttcgcgactacccatcggagctccagttccgagcattggaggaggaaccacgaaataacacaaccgccacagcttcagcgcagcctcctggcctccctctcagactcgagcagggtgaggatgtcgccctcacggaccgggcccttgacgttcctcatgatgagacggttctggtcgtcgaggaacttcactctgacctgggtcacctgacccctggagccggtgcggcccatcaccttcaccacgacggcaagtttgacctgggtatccatgctgcacaagcaggaagcatatacagtcaggcaaaactgatgttctatacaaaccagcagcagatcagatttcaatattgctttcaaaggataaaaatgttcaggcagtttatctacaactcaaaattacagtaa

SEQ ID NO: 3182 - DNA, 1053 bp, Oryza sativa
atgggcgccatctccaagccattgctccttgccatcctctgctgcatcgtctgcctctacagcagcagcggcggcgccattgtcgcggcggcgcgtgagctcggcggcgacgcagccatggcggcgaggcacgagaggtggatggcgcagcacggccgtgtgtacaaggacgccgcggagaaggcgcggcggctcgaggtgttcaaggccaacgtcgcgttcatcgagtcgttcaacgccggtggcaagaacaggtactggctcggcgtcaaccagttcgccgatctcaccagcgaggagttcaaggcgaccatgaccaacagcaaggggttcagtactcctaataatggtgttagggtatcaactgggttcaagtatgagaatgttagtgccgatgctttgcctgcgtccgtggactggaggaccaaaggtgccgtcactcgcatcaaggaccaaggccaatgtggttgctgctgggcgttctcggccgtggcagcgatggagggcttcgtcaagctgagcaccggcaagctcatctcgctgtcggagcaggagctggtcgactgcgacgtcgacggcaacgaccagggctgcgagggcggcgagattgacggcgcgttccagttcatcctcagcaacggcggcctcacagccgaggcaaactacccgtacacggcggaggacggccggtgcaagaccacggcggcggcggacgtcgccgcgtccatcaggggctacgaggacgtgccggccaacgacgagcccagcctcatgaaggccgtcgccggccagccggtgtcggtggccgtcgacgcgtccaagttccagttctacggcggcggcgtgatggccggcgaatgcggcaccagcctagaccacggcgtcaccgtgatcggctatggcgcggcgagcgatggcaccaagtattggctggtgaagaactcgtggggcacgacgtggggcgaggccgggtacctgaggatggagaaggacattgatgacaagaggggtatgtgtggccttgccatgcagccttcctaccctactgagtag

SEQ ID NO: 3183 - DNA, 1035 bp, Oryza sativa
atgtcggacgcgctgatcaacggcgtcgccggcgccggcggcgggatcatcgcccagctcctcacctacccgctccaaaccgtgaacgcgcggcagcagacggagcgcgacccctccaagccggcgttcaaggacggcgccgtccgccagatgtgcctggtggtgaagcatgaagggtgggagcggctgtacggcggcctcatgccctcgcttgttggcactgcggcctcccagggtgtctactattacttctaccagatattccggagcagggcggaggccgcggctctccagcgatccaggagaggaatcggcgatggatccgtcgggatgctccaatccctcactgtcgctgcgctttctggatgtgttaatgtacttctcacaaacccaatttgggtaattgttacacgaatgcaaactcaccggaaggcaaacaaacagcagagtcctctggatttgacgtgtgttcttgacaaggccctacaagctcccgctgttgaaaacatacctcacaagactatccatgttattcaggacctttacaaagaagctggatttttgggcttctggaaaggtgtagttccagctcttattatggttagcaaccctgcaatccaattcatgttgtacgagactcttttgaagaagttgaaaaagagacgtgcctctaatttgaagggagctgatggactgactgctcttgaaattttccttcttggtgctgttgccaaactgggtgcgactgttgttacatatcctcttctagttgtgaaggcaagacttcaggtgaagcaaataattgatgatgacaagaggcaccgctacaaaggcacatttgatgcgatcacaaagatgatacgttatgaaggtttgtcagggctttataaaggaatgagcacaaaaatcgtacaaagtgtttttgcttctgctctcctttttatgattaaggaggaactggtgaagggcgctcgattattggtaaccggcaacaccagccttgttaagaagttaccatcgaagccattaagatga

SEQ ID NO: 3184 - DNA, 903 bp, Oryza sativa
atgaccaccgcgcggttcgtctccccctccctctcgcgcgtgtccccctcgccggccggccgagtctccgggtcgtcgtggttgtccagggctggggtcgccytccccgctcggccgcacggtctctcgctccacctgaggccgcctgctatggcctccgccgccgccgccgggaacggctctccttccgcgccggaggactccacagcgttgtccaggataggagaagtcaagagggtgaccaaggagacgaatgtgcatgtgaagatcaacctggatggcactggtgttgccgattgcagcacagggatacctttcttggatcacatgctcgatcaactggcatctcatgggctctttgacgtatgtgttaaggcaaagggtgacactcacatcgatgaccatcactcaaacgaagacatcgctttggcaattggaacggcactacttgaagcacttggagatcgaaaaggaattaatcggtttgggcattttacagcaccacttgatgaggcagcggttgaggttatactggatctatctggtcgtcctcatttgagttgcggcttaagtattccgactgagagagttggcacatacgatactcagctagttgagcactttttccaatctcttgtgaatacatctgggatgacacttcacatccgtcagcttgctggaaaaaactcacaccatattattgaggcaactttcaaagcatttgctagagcccttcgacaagcaacagaatatgacttgcgccgacgcggcactgtccccagctcaaaagattgcaatattcaaaggaaacaaatggaatggcctctacagctcctcgagtcctacttaccctgggaatctccgttggttgcgataacagaacatgaagccattgctaactag

SEQ ID NO: 3185 - DNA, 765 bp, Oryza sativa
atggcttctcgtgcatttgctgcagtgtttgcagcagtagcacttgtagtgtgttcttcagtcttgcctcgtgctctggcctctgacccgagccagctccaagatttctgcgttgctgacaaactcagtgctgtgttcgtgaatggtttcgtgtgcaagaacccaaagcaggtgacggcgaacgacttcttcctccctaaagccctcggcgttccaggcaacaccgtgaacgcacagggctccgcggtaacccctgtgacggtgaacgagctgccgggcctcaacacgctcggcatctcgttcgcccgcatcgactttgcccccaacgggcaaaacccgccgcamacccaccctcgtgccaccgagatcctcaccgtcctccagggcaccctcctcgtcggcttcgtcacatccaaccagccgggcggtggcaacttgcagttcaccaagctgctcggccccggagatgtcttcgtcttcccgcagggtctcatccacttccagctcaataatggcgccgtcccggccgtcgccatcgccgcgctcagcagccagaaccctggggtgatcaccattgctaatgccgtgtttggatccaccccgcccatcctcgacgacgtcctcgccaaggcgttcatgattgataaggatcaggtcgactggatccaggccaagttcgccgcgccaccggctgcctctggtggtggcggtggcttcattggcggcggcggtggtggcggcttccccggcggcggcgcgccatag

SEQ ID NO: 3186 - DNA, 2574 bp, Oryza sativa
atgtcgagagccgtggcgcgccgatcgttgccgccgttcttgaggctgcgctccgcggtgtgcgacgacggatactggatcggtaggttggaccacaaggattggctttcccccaacgaattgctcaagatcttcgcgaacatcagggatcctagccttattaccagttccttcaagagagcttgtgatagaagggattacaagcccaatgaggcactctatagcatgatgatcgacaggctagcatcctgcaggaggttcagtgatgtggaggagttgctggccagggcaagagctgagaggttcaggttttctgatgagttcttctacaggctgatcaagatgtacggcaatgtggcgaaccatcccgagaaagcaatcgagactctctttgcgatgcccgggtataactgttggccgtcgaccaagacttttaactatgttcttcacatgcttgtgtgtaagaggcagtacgaagttgtccatgaggtctacttgagcgcgtcaaggttgggagtgacattggacacctgctgcttcaatattcttgtcaagggcttgtgtcagttcggcaaatttggcgatgcgatttcgctgttgtatgagatgccgaagcaaggttgcgtgcctaatgtgacgacctactctacattgatgaatttcctctgtcaacatggtcaggtggacaaagcattcgagctttgtgagagaatgcagaaggaggatattgttgcagatgcagttgtctacaatattttgatcgctggtctttgcagagaacaaagggtaacagaggcattcaatttgtttaagtcaatggttcctaagggatgctatcccaattcagggacatatcaggtacttcttgatggtcttttgagctcaggaaagtttgtagaggcaaagggccttgttagcatgatgagggcagaacgtatgaggcccggtttctcatcattcaagttactgatagatggactctgtagtgtaaactgtttagacgacgcgcatcttgtcttgaagcaaatggtggagcaagcttggtactattggggtcttataatggccaagaccttttcactagggcttacacctatcttcctgccttcctgggtttcactgacatctgagaccctcacagtcttgttgaactatgtccagactccacagatccctgggcttatgcagactgcagagaagctgggacatgtgtccatgctgatgaactggtgctcagtttgcaaatgccaacaagaacagccgagagacctgtgtttattggaggcagcaccacacataattgcactgacgaatcggtcggcaagtacagagttggaggcaggaaattctgaatttacacccgaatttgccggtatggacttcggtgattctagacgcaagcctaatgtcgtcgggaagttcaccgtagctgttgcactcacggtcatgtgcatcattgtgttgaaacagtcgcctggttttaccagtacaagtgtgttctctcgccatgaaattggtgtgactcatgtgttggtgactggaggagctggatacattgggtcacatgctactcttcgtctacttagggacaactaccgagttaccattgtggataacctttctagagggaacatgggagctgtcagagtccttcaacgtttgtttccagagcctgggaggcttcagtttatttatgctgatttaggcgatgcgaaagctgtatcctttttctctacaatccaggttaacaaaatattttcagaaaatgcattcgatgctgttatgcactttgctgccgttgcttacgttggtgagagcacgttggagccactgaggtactaccacaacataacatcaaatacattgacagtgcttgaggcaatggcagcatataatgtaaaaactctgatatactcaagtacttgtgcaacatatggtgaacctgacacaatgcctatcacagaagcaacccctcagaatcctatcaatccatatgggaaggcaaaaaagatggcagaggacatcattttagatttctctaagagatcagaaatggcagtcatgatcttaagatacttcaacgtcattggatcagacccaggggggcggttaggggaagctccacgaccagagctgcgtgagcatggacggatttctggtgcttgctttgatgcagcactgggaatcattccaggtttgaaggttcggggaactgattaccctacagctgatggaacttgcataagggactatattgatgtcacggatctcgttgatgctcatgtgaaagctcttgataaagctcagcctggcaaagttggaatctacaatgttggcacaggacatggtagatcagtgaaggagtttgtagaagcatgtaagagcgcaacaggagctagcatcaaggtttcattccttacccggagaccaggagactatgctgaagtttacagtgacccatccaaaatccatgacgagctgaactggacagcccgttacattgatcttcgcgaaagcctttcaactgcatggaaatggcagaaagcacacccgaatgggtatggatcggcctga

SEQ ID NO: 3187 - DNA, 2085 bp, Oryza sativa
atgacggcacgcggggcgctccgccgcctcatccctagccacctccaacccgtcagccgccgcgccccgccgccgccgccatcggcggccgacgaggggcccttcccggacccctacgctctccttgtcyacgaccccatcgatctcctttcctctctgtggcgccgcgccttcgctcacccgctcccggcgcccttccccaacttctccggcgagcctgcgcccacgccacgggctccttcccgccacgccacgccgtccagctccccaccctccactccctcctccgcctcgggscgccgccctccgccgccaccccgccttcccctggggcgcctccamgcacctcctcatccgctccccggccgaccccccttccaccgtcacatytcccgccgcaagctcgaagcccgcctcgcmaacgsgccgcccccgttccaggaccgcgtcgtccaggagctcctcctcctgctcctcgagcccgtcttcgagccccgtttctctccgaagtcccacgccttccgccccggccgcgggccccacaccgccatccgctccgtccgctcccacttcgccgcctacctctggttcatctccgcggacctcaccggggtggtcgacgcactctcgccttataccatactctcctgcgtccagaaggccgtctctgaccgcaaggtcttatctttgctgaagtcggcgctcaatgcccctgtccggcctgggtctgtgccaccacgggagaaggagcttgatggcctagctaagaagaggctgaagaggaaggttctcaggaaaagcaggaagaagaaggtgctcaatgagaacgagcccaagcctgatccgtattggttgaggttattcttcgggtttgccccagaacaggcgtgccatgcaccgaattatgggcattgtgggatacttagccctttgcttgccaatgtgtgccttaacgaactggattggtggctcgaggagagaattcatgagtacttccgcccgtcaagccatgattcgatttggaaggaggcgggtgatgaaggatgccataatcctgcctggcctgagtttgtcccatcaagtgggaaggagaagacaaggaagatggattaccttagatttggctcccatgttcttattgggatcaggggaccaagggaggacgcagttgagataaggagacaactgatggagttctgcgagagcacgtttggtttgaggcctgagaattcgatggtagagattgagcacatcacaagagggattgagttcttggatcatgtgatcacccgccgggtcatctacccaaccttaagatataccgctagtggagggaacattgtgagtgagaaaggtattgggacattattatcagtaacagcaagccttcagaggtgcataaggcatttcaggaagcttgaacttgtaaagggggatcgggatcctgagccattgccatgttcaccaatgctgtactctgggcaggcgcacactaactctcagatgaacaaatttcttgagaccatggctgattggtacagatatgcagacaaccggaagaagattgtagggttctgtgcatatgtcattaggagttccttggcaaagctttatgcggcaaggtatagactcaagtctcgagctaaagtttacaagattgcctcacgtgaccttagccgcccattgagagagagcacaaggaatgatgcaccagaatactctgatctcttgagaatgggactagttgatattattgagggtgtacaatttgcacgcatgtcatcaattccatcgtgtgactacacacctttccctagaaactgggtgcctcaccacgagcttgtattgcgtgagtatattaaactgcaagatccaaaattcttctgtgaacttcataagacaatcaaaaggaaggagataaattcaccgcaggatgatgtatcaaggatggtgtggtattataaagtttatggtgtttatgatgctaaaaggtccctacaaaaactaaatgattggaagaatactgatgaagctgccaataaggagaatcagattctgttgggcagtgtatcaatggtacattag

SEQ ID NO: 3188 - DNA, 1728 bp, Oryza sativa
atggcgtgctcaggggaagaaagcatgaggctatggtttctcatacctcttcttctctgtttccctacattgattcgatccgaggattactcggatgtgaccatcgtcgttcggggtgctgagacgatcgcttcgaccagcaacgagttcatttgcgccaccattgattggtggcctccagagaagtgcaattatgaccagtgtccatgggggcaagcttctatcttaaatttggacttgactaatcctttgctagctaaagctatccaagcctttagccctctacgtatcagacttggaggttccttacaagatcaggtggtgtatggcacgccgaatttaggatctccatgcaccccattttcaaagagttcaagtggcctgtttggattttctcaaggatgcataaccatggaaagatgggatgctattaataagatctttatggatacaggtgcagttgttacattcggccttaacgcgcttcaagggcgacagcagatgggcagaggtgtttggggaggtgcttggaattccagtaatgctcgggagttcatggagtacactgtttcgatgaactaccctatagactcatgggaatttggtaatgagttgagtggaagtggaattggtgcaagtgttggagctgaacaatatggaaaagatataattgagctcaagaacatcatcagccagttatatggaaactctaggaaaccattggtggttgccccaggaggattctatgaccaaaaatggtatgctcagcttcttgatatctctggtccaaatgttctcgacacaatgactcatcatatttacaatcttggtgctggtaacgatccgcaagttgcaaataggatcttgaatccgcagtatttgagccagagctctgatacattcagagatctccaaatgacgatacagcggcatggaccatggtctgctccctgggttggggaagctggtggtgcatataacagtggcagccgaaaagtgtctaatactttcctgaatagcttctggtatcttgatcagcttggtcagtcagcaaagtatgacacaaaggtttactgcagacagactttgattggaggcaactatggccttcttgataccgaaacttttgttccaaaccctgattactacaggcaagtattcctatactttgctctgccacaatcatgctttactaccctatataccttttgtactaaaccgcggtatatgttcagtgccttgctgtggcatcggctcatggggaagggagttatttccttagacaccagcggttcttcgtacttgcgtgcctatgcgcattgcggaaagcaaaagggcggcgtcgcgctcctcatgctcaacctgaacaagaacatgggattcatggtctcagtcagaaatgacctcaacattaatttcagagaaatggcagggataaagagggacaactcctttgtccatggcctgaagaggacagtctcctgggttgggagcaaagcctcggatgggctggagaagagggaggagtaccatctgactccacaggatggcaacccttttgccaggacagtgctgctcaatggagctcctcttcagctcactggagatggtgacatcccttcactgccaccagtgatggtctcagtcaattccccaatctatgtcgccccgctgtcgatcgcgttcgtcgtcttcccagatttcgaggctgaaggttgcgaacgatga

SEQ ID NO: 3189 - DNA, 1584 bp, Oryza sativa
atggcgacgctgctctccaagctcctagctctgcctcaacaatggcagctcctcctactcctcctcctcctcccaatcgcctccctcctgttggtaattggcaggaacaccggcggccgtcgtcgccggcggcatcttagactgcctccgggcccagcgcggctgccggtcctgggcaacctgctccagctgggcgcgctgccgcaccggagcctgcgggatctggcgcggcggcacgggccggtgatgatgctgcggctgggcgcggtgccggcggtggtggtgtcctcgccggaggcggcgcaggaggtgctgaggacgcacgacgccgactgctgcagccggccgtcctcgccggggccgatgcggctgtcgtacgggtacaaggacgtggcgttcgcgccgtacgacgcctacggccgcgcggcgcgccggctgttcgtcgccgagctcttcagcgcgccgcgcgtccaggccgcatggcgcgcgcgccaggaccaggtggagaagctgatcgggaagctgacacggccggagccggagccggtggagctgaacgatcacatcttcgccctgaccgacggcatcatcggcgcggtggcgttcggcagcatctacggcacggagcggttcgccggcggcggcaggaagcgcttccaccacctgctcgacgacgtcatggacatgctcgccagcttctccgccgaggacttcttccccaacgccgccgccgcccgcctcttcgaccacctcaccggcctcgtcgcccaccgcgagcgcgtcttccaacagctcgacgccttcttcgagatggtcatcgagcagcatcttgactctgacagcagcaacgccggcggcggcggcggcaacctcgtcggcgccctgatcggcctgtggaagcaggggaagcagtacggcgatcgccggttcaccagggagaacgtcaaggccatcatcttcgacgcgttcatcggtgggatcgggacgagctcggtgacgatcctgtgggcgatggcggagctgatgcggtcgccgcgggtgatgcggaaggtgcaagccgagatcagggccaccgtcggcgaccgagatggcggcggcatggtgcagccggacgacctgccgaggctcgcctacctcaagatggtggtgaaggagacgctgcggctgcacccgccggcgacgctgctgatgccgcgggagacgatgcgcgacgtgaggatcggcgggtacgaggtggcggcgaggacgcgggtgatggtgaacgcgtgggcgatcgggagggacgcggcgaggtgggaggaggcggaggtgttcgacccggacaggttcgaggcgaagcgggtggagttcaacggcgggcacttcgagctcctgccgttcgggtcggggcggcggatctgccccggcatcgccatgggcgccgccaacgtggagttcacgctggccaacctgctgcactgcttcgactgggcgctgccggtggggatggcgccggaggagctgagcatggaggagtccggcggcctcgtgctccacaggaaggcgcccctcgtgctcgtgcccactagatacatacaactatag

SEQ ID NO: 3190 - DNA, 1070 bp, Oryza sativa
atggccgccccgccgccttcctccccgtcgccgccgccggcggcggcggctgcggcgacgcagcagacgcagccgcacccgcagacgccgttctacgagctcgtcaagggaaactccggcatcgaaaaggtccttctccgcggcacgcgcggtttctccgctgaggtatccgatccgttctcccccgccaatcccaacccaaccctcgcctctgtgcctctgtctctccttccgtttgtggtctatctttatggagctcaagtaacctcatggaagaatgaccatgcggaggagttgctttttgtcagcagtaaggctattttcaaacctccaaaagccattcgtggtgggatacccatttgcttcccccaatttggaacacatggaaatcttgaacaacatggatttgcaaggaaccgattatggactattgatgataatccaccacctttaccagtaaaccctgctattaaatcttttgttgatctgattctgaggccttctgacgaggatttaaagatctggcctcacagttttgagttccgcttgagagttgctcttggtcctaatggggatttgagtctcacttctcgaattaggaataccaacactgatggaagatctttctcttacacatttgcatatcacacatacttctcggtctctgacatcagtgaagtgcgtgttgaagggctggaaacaatggactaccttgacaatttgaagggaaaggagcgttttacagagcaaggggatgctattgtatttgaatcagagattgataaggtataccttgctgcaccttcaaaaattgcaattattgatcatgaaaagaaaaggacatttgtcttgacaaaagaaggacttccagatgctgttgtttggaacccttgggacaagaaggcaaaagctatgcaagattttggagatggagaatacaaacacatgctttgtgtggagcctgcagctgttgagaagcctattactctgaagccaggtgaagagtggaaaggaagacttgcactctcagctgttccttccagttactgtagtgggcagttagatccatg

SEQ ID NO: 3191 - DNA, 4647 bp, Oryza sativa
atggtggacttttacaaggagatggagaatgcgataatccgtggttgtttgaatgagccagaggaggccgtaatggtgaggttggtgagatatctcaaagggtttcggcaagatgagctaccggaaggggttgaaggtgtgggtggaggagaaaggggaggggtgggtggaggcggaggtggtggaggtgaggaccgggccgtcttcgtgctcacaagccagcggaagaagattacagttttggcagagaagttgctgcctagggacacagatgaagatctaggtggggggcatgtcgatgacatgaccaaactaacttatcttaatgaaccaggtgttctatacaatttgaagagaagatatgcattgaatgagatatatacatacactggaagcatcttgattgctgttaatccattcacgaggcttcctcacctgtacaatgagtacatgatggagcaatacaagggtgtccggctaggggagttgagtccacatgtttttgcagtggctgatgcatcatacagggctatggtgaatgattcccggagccagtcaatcctggttagtggtgaaagtggtgctggcaagactgagacaacgaagcttatcatgcagtatcttacgtacgttggtggtagagctgccattgacgatcgaactgttgaacagcaggttcttgaatctaaccctcttctggaggcatttggcaatgcaaaaacagttagaaatgacaactcaagccggtttggcaaatttgttgagatacaatttgatgcaaatggtagaatatctggagctgctattaggacctatcttttggaaaggtcccgtgttgtgcagattaatgatcctgaaagaaattttcattgcttttatcagttatgtgcgtctggaaaggatgcagaactgtacaagcttggtcacccaaggagtttccattacttgaataaaagtaagacatatgaattggaaggaacaaataatgaagacgagtactggaagacgaaaagggcaatggatattgtcggaattagcagaaatgatcaggatgctatatttcggatactggcagccattcttcatcttggcaacattgagttttctcctggaaaggaaattgattcttcaaaaattaaggatccaacatcaaattttcaccttcgaatggcagccaaactattcatgtgtgatccagatctgttgatctcaactctatgtacccgctccattaacactctcgaaggagcaattataaaagcattggactgttctgcagcagcagctaatcgtgatgctctagcaaagactgtatatgcaagactatttgactggcttgtcgagaatattaacaaatctattggtcaagatgttgattccaaagtacaaattggtgtcttggatatttatggttttgagagctttaaaaacaacagttttgagcagttctgcatcaacttcgccaatgaaaagcttcagcaacatttcaatgagcatgtattcaagatggagcaggaggagtacaaaagcgaaaaaatcgattggagctacattgaatttatkgataatcaagatgttttggatttgatcgaaaagaaaccgattggaattattgcactgctggatgaagcttgtatgttcccaaaatctactcatgagaccttcgcaacaaagatgttcagaaatttctcttctcatcataggcttgagaagacaaaattctcagagacagattttgttatctcccattatgctgggaaggtgacgtatcaaacagaatcgtttctggagaagaatcgagattatattgttgcagagcactgcaatcttttatcttcatcaagatgccctttagtttctggactttttggttcattaccagaagaatctttgagatcgtcatacaagttctcatcagttgcttccagatttaaggtagtgatgaatagtgtggcagatgtaaggaaaggaacaaaaagaaaaatctctctccactatcccacctttgcaagggattttcatggtgttttagaggctgttcgcatcagtcttgctggctatcctaccagaagaacttacgctgaatttgttgaccggtttggcgttctagttcccgagttgatgcttggaagttatgatgagagggcattgacaaagggaattcttgaaaagatgaagcttgaaaattttcaacttggtagcactaaggttttccttagagctggtcaaatcgcaatattagatatgcgtcgtgctgaagttttggagaatgctgcacgccacattcaaggtcgtttcagaacattcattacacgcaaagagtttgttaaaacaagggaggcttcaatttctatacaagcatattgcagaggctgtttggcaaggaagatgtatatggtgaaaagagaaacggcggctgctataattgttcagaagtatgtccggagatggcggcttcatcggacttaccagcaagctcattcagcagctcttcttattcagtcctgtattcgaggatttatcgctcgccgttatttctcagttatcagagagcagaaagctgctttggtgatacagtcattgtggagaaaacggaaggttataattcttttccaacaatacaggcaagccactgtgaaaattcagtgtgcttggagacagaaacttgcaagaagagaactaaggagactcaaaatggctgcaaacgaagcaggtgcactgcgtgaggcgaagaataaacttgagaaaaagttggatgaccttactctgagactaactctagaaaggcgactgcgtgctgctggtgaggaagcaaagtcagtagaaatattaaagcgcgacaaaatgatagaatcattaagtgccgaatgtgctgcagccaagtcagatgctcaaagtgaacatgacaaaaatcggctactccagaggcaattggatgattcgttgagagagataactatgttgcagggtagcaagattatgacagcagaagcagaaaaggagaactccaatctgaagaacttagttgagtcattatcaaagaggaattcgtcactggaatatgaactcacctcagctcgtaaaggtagtgatgatacgatgaagaaattgaaagatgttgagggaaaatgcaaccatctccagcaaaatttggacaaattgcaggagaaacttacaaacttggaaaatgaaaatcatgttcttaggcaaaaggcattaaacatgtctccgttgaacaatatgtccatggctacaaaggcttttcctcagaaattcgctacaccgattgggcttccaaacggcgagcagaagcacggatatgaaacaccaccagcagcaaaatatctcgcttcacttccacagagtttaactggatcaaggagaaccaggatgcctgttgaaaggcaggaggaaaatcatgaaatcttattacgatgcataaaggaaaatctaggattcaaggatggtaaaccagtcgccgcatgcatcatctacagttgccttttacactggcgtgcttttgaatctgagaggactgctatttttgatcatgtcattgaagccataaataatgttctcaagggggaagaggctgacggtagattaccttattggttgtccaatacctctgcattgctatgccttctgcagaagaatttacggtcaaatggattatttgctacaccatccggccggtctggtggacctctagggataggtgacaagatagtgcaaacactcagatctccttcgaagcttatgggacgcattgatactcttggacaagtggatgctcggtatccagccatattattcaaacagcaactaactgcatgtgttgaaaagatttttgggcaactcagggataatctgaaaaaggaaatatcaccacttcttagtgtctgcattcaggctccaaaatcatcacgtgcacagcctggaaaagcatccaaaccacctggggttggtgcccaaccaccatcaaactcccattgggacaatattgtcaattttctggacttgcttatgtccacgttgcatgcaaattatgtgccatcattctttatacgtaaacttatcactcagctattctcttttataaatatacagctttttaacagccttcttcttcggcgcgaatgctgtactttctccaatggggaatatgtcaaagccgggctgtcattgctggagaaatggatttctgatgccacggatgagtttgcaggaacatcttggcatgagctaaattatatcagacaagctgttggttttttggtcatacatcaaaaaaggragaagacgcttgaggagattaggcaagatctttgcccgaacttgagtgtacgccaaatatacaggatatgctcaatgtactgggacgacaaatacaatacccaaggaatatcgaatgaggttgtttctgcaatgagggaggaagtaaacaaatatactcagaatctcgtatcaaattcctttttattagatgatgaatttaagctttctttcagtataccgttctctacagaggatttgtcaatggccatccctgctatagattatgcagatgtagaatttccagaatcgcttcatcactatccatcagtacagctcctagtcaagcatcatgatccacagcctgtctaa

SEQ ID NO: 3192 - DNA, 1392 bp, Oryza sativa
atgaggaggatgttgcgttgcttcttcggcggcggtggcgacgagacgggaggtgacgaggagaagaaggcgtcggcggcggcggtggtgaagaacaagaaggcggtgaggcggatgcggagcgcgacggggcggctccggtcgctgtcgctggaggacctgtcgcggacgctggcgcagtccgggctgcaggccttcacgctggcggagctcaaggccgccacgcgcagcttctccggcagcaacttcatcggcgagggcggattcggccccgtctacaagggcttcatcgacgccaagctccgccccggcctcctccaaccccagcacgtcgccgtcaagtacctcgacggcgaaggcgaccagggccaccgcgaatggctggcggaggtggtgtacctggggatgttgagccatccgcatctggtgaagctcatcggctactgctgccaagacgaccaccggatgctcgtctacgagtacatggccaggggcagcctcgagcaccacctcttcaagaatttgctgtcgagcttgccgtgggcgacgcggctgaagatcgcggtgggcgcggccaaggggctcgcgttcctgcacgacgccgacactccggtgatctaccgagacttcaaggcatccaacatcctgctcgactcggattacacggcgaagctctcggacttcgggctggccaaggagggcccgcagggggacgcgacacacgtcacgacccgcgtcatggggacccacgggtacgcggcgccggagtacatcctgacggggcacctgacggcgaagagcgacgtgtacagcttcggggtggtgctgctggagctgctgacggggcggcggagcgtggacaagcggcggcgcgggcgggagcagaacctcgtggactgggcgcggccgtacctccggcggccggagcggctgcaccgggtgatggaccccagcctggagggcggctactcggacaaggcggcggggaaggccgccatggtggcgtaccactgcctccacagcgtcaatgtccagggtgcatgcgcgatgcgactctcgcgggtcgagccgctgctgcagacgtcytgcggcgacgtgctcgccgggcccttcgtctacaccgtcccgtccgctgccgccgttgttgttgctgccaaggacgacgggaagaaggcggccgcggccgcgggtgaggacggcgaggaggaggtggcggcggcggccaaggcgaagaggaggtacgtggcgtcggcggtgcacgcggagggcgcgatgcggaagggggagcaccggtacgcgagctccgtgtccggctcgccgaggcagagcagggacagggcgctagctcaagatttcaacggtgatgcaaagtgcgaccgcggcagggcgtga

SEQ ID NO: 3193 - DNA, 1215 bp, Oryza sativa
atgggcaccgcattgttgtctcgcgccgccggcgtgcttgtcctcgtcgtcgttgttgcggcggcggcggcagcgccacggtgcgacctgttccaggggaggtgggcggcggacgagtcgtacccgctgtacgacgcgtcgcggtgcccgttcgtcccggacgtcttcgactgccgccgcaacggccgccccgacgccgcctacctcaacctccgctggttcccctcctcctgccgcctcccacggtttgatggggtggagttgctgcggaggtggcgagggaagacggtgctgttcgtgggtgactcgctgagcatgaaccagtgggcgtcgctggcgtgcatgctccacgccgccgtgccggcggacggccgcgtgtcgttcacctccggcgagccggtgtcgtccgtgcggttcctcgactacggcgtgtcggtggtgctctactacagcaggttcctcgtcgacgtcgtcgacgacgagcccggcctgggccgcgtcctcaagctggactccatgcgcgacgccgccgcatggctcggcgccgacgtgctcgtcttcaacacctggcactggtggacctacaggggagccagccaagtgtacgtggatcgaagacgcgcacgcacatacaccactacgcacgatgtatcgtttttaggcaccgacacggtctctcatgtatacatatatgtgatgtgtaggtgggattacgtgcaggaggggaacaagacgtaccgagacatggacaggctgaccgccttctccaaggggctctccacgtgggcacgttgggtggacgccaacatcgacgcgtcgcggaccaaggtgttctaccagggcatctccccgagccactactacacctcctcctcgtcatcatccaacgacgacggagacggcgaggtggcggcggcggacgggggttgctaccgtcagacgcggccgctgcaggagtcgacgacggcggatggcggcggcggcgcgctgctgccggagcaggtggtggtaagaggggtggtggggtcgatggcgacggcggtgtcgctgctggacgtcacgcggatgtcgcagctgaggatcgacgcgcacccgtcggtgtacggggggccggggcgggaggggatggactgcacgcactggtgcatcgccggcctccccgacgcctggaaccacatcatgtacgccatgctgctcacgcaacaacggacatag

SEQ ID NO: 3194 - DNA, 1506 bp, Oryza sativa
atgggctcggcggctgacgggagcctcgccaacgagaaggcgccggccgagacggtcggcgtcggccgttacgtcgaaatggagcaggacggcggcggacccagcaccgcaaagtcccggctctccggccttctctggcacggcggctcagcctacgacgcctggttcagctgcgcgtccaaccaggtgaccacattttctgatcgacgctatgcttgcttccattttcttgcgaaatgcatgcaatctaagctggggatgctcagcggcatactgttccagstcttctacgggctgttgggcagctggacggcgtatctcatcagcatcctgtacgtggagtacaggaccaggaaggagagggagaaggtggacttcaggaaccatgtcatccagtggttcgaggtgctggacggcctgctggggaggcattggagaaacgtcggcctggccttcaactgcaccttcctactcttcggctccgtcatccagctcatcgcctgcgctagcaacatctactacatcaacgacaagctggacaagaggacgtggacctacatcttcggcgcgtgctgcgcgacgacggtgttcatcccgtcgttccacaactaccggatctggtcattcctcggcctcgtcatgaccacctacacggcctggtacctcgccgtcgcctccctcatccatggccaggtcgatggagtgaagcactcgggccctacaaagatggtcctctacttcaccggggccacaaacattctctacaccttcggtgggcacgctgttactgtggagatcatgcacgcgatgtggaggccgcagaagttcaaggcgatctacctgatggcgacgctgtacgtgctgacgctgacgctgccgtcggcggcgagcgtgtactgggcgttcggggacgagctgctcacgcactcgaatgcgctggcgctgctgccgcgcacggcgttccgggacgccgccgtggtgctcatgctcatccaccagttcatcaccttcggcttcgcctgcacgccgctctacttcgtctgggagaagctcatcggactccacgactgccgcagcctcttcaagcgcgccgccgcgaggctccccgtcgtcgtgcccatctggttcctcgccatcatcttccccttcttcgggcccatcaactccgccgtcggctccctcctcgtcagcttcaccgtctacatcatccccgccctcgcgcacatgatcaccttccgctccgcgcacgctcgtgagaacgccgtggagccgccgccgcggttcgtggggcgatggacgggcacgttcatcatcaacgcgttcgtggtggcgtgggtgctggtggtcggcttcgggttcggcggctgggccagcatgaccaacttcgtccgccagatcgacacgttcgggctcttcaccaagtgctaccagtgcccgcsgccccctctgccgccggcgggcgccgttccgaacgccactggccgccgttcccggcaacgcstttaa

SEQ ID NO: 3195 - DNA, 1692 bp, Oryza sativa
atggagagagagaattcatggctgaggagaaccaagttctcccacaccgtgtacacaaggttggatcaccaacgggcgcctattgctccccttggcagggatgtggagcagaaactgcagagatttattagtatggggaagtctgtgtcgatgcctgttaaccgggacgaggatgcagtggctgcgttcaagcactctgtgagcttgccaacagcccgctcctcgcttcagattgataaggaaaaggccaacaagcagaaggcagattttgatatcccttcaagccctccggtgaactctgttaattcgaagggcctgaaggcaaggagcctggtcaagagcccaagctcagcgatgcttctcagctacttgaacaaggcacacccgaatcgagattcaaacctcaagaagactgacagacctcagcacaagctgagatcaaagtcccctcttccgaatgtagcgccttctgatgtgttcagagaagcacgtgcaagtagcaggaggtttacaagccctcccccaaagcgaaggggatctgaaagaagcatttacggcaaatcgtttgatagacaactgtctgatatgagccaaagccctgatttgtgttcaaccccagtgtcctctgataagcacaagtctctaaaggatagctcatggactaggagatattttgataatggtggaaggaggagggttagtgcagtggacgctactgaagttcggaggaaccgcggggttagtatggctcaggcagttcaaactacagttgattggacacttgatccatctaagctgctcgtggggcataagtttgcatctggggcatatagccggctctacaaaggactctatgatgataaaccagttgccattaaatttattcggcaacctgatgatgacgacaatgggaagatggctgcaaaacttgaaaaacagtataacagtgaggtcaatgctctatctcacctctatcacaagaatgtgatcaagctagtagcagcctataaatgcccaccagttttttacataattactgagttcctccctggaggttccctgaggtcatatctaaatagcacagagcatcaccccatccctctggagaagatcatatccattgctctcgatgttgcctgtgggttggagtacattcactctcaaggggtcgtgcaccgtgacattaagccagagaacattctctttgatgagaacttctgtgtaaagattgctgattttgggattgcctgtgaggagtcaatgtgtgatgtgctggtggaagacgaaggcacttaccggtggatggcccccgagatgatcaagcgtaaggcatacaaccggaaggtcgacgtctatagctttggactactcctatgggaaatgatctctggaagaattcctttcgatgacttaacccctctccaggcggcttatgctgttgcaactaggcatgcgcgaccagtaattcctccagaatgtccaatggctctgagaccgttgatcgaacagtgttgctcattgcagcccgaaaagaggcctgatttctggcagattgttaaaatcctggaggaatttcattctgttctctcccaaggtggctgcctcgactcactgaagagcagcaacagccaggatcagaaaaagcgacttctgcattggattcaaaagctgaaaccctcacatagcacctga

SEQ ID NO: 3196 - DNA, 2892 bp, Oryza sativa
atgtcgttcatccggaagaagtcgatggagttcttgaagagcttcgaggtgccggcgaagaacccgtcggaggaggcgcagcgccggtggcgggatgccgtcggcacgctcgtcaagaaccgccgccgccgcttccggatggtacccgacctcgacaagcgctcgcaggccgagacccagcgccgcaagatccaggagaagcttcgtgttgcactcttcgttcagaaagctgcacttcagttcatcgatgccgtccgcaagacggagcacccgttgccggagctcgcccggcaatgcggcttctccgtcagcgccgaggagctcgcctccatcgtgcgcggccacgacaccaagagcctgagattccacaatggcgtcgacggcatcgcccggaaggtggccgtgtccctcgccgacggcgtcaagtccgacgacgccggcctccgcgccgaggtctacggcgccaaccagtacacggagaagccgccaagaacgttctggatgtttctgtgggacgccagccaggacatgacgctgttgctgctcgccttctgcgccgccgtctccgtcgccatcggccttgccaccgaggggtggccgagcggcatgtacgacggcgtcggcatcatgctcaccatcctcctcgtcgtcatgatcaccgcggcgagcgactacaagcagtcgctgcagttcagggacctggacaaggagaagaagaagatcgacgtgcaggtcacccgcgacggctaccggcagaaggtgtccatctacgacatcgtcgtcggcgacatcgtgcatctgtccatcggcgaccaggtccccgccgacgggttgttcattgatggatactcgttcgtcgtcgacgagtcgaacctctccggcgagagcgagccggtgcacgtgtcgacggcgaaccggttcttgctcggagggaccaaggtgcaggacgggtcggcgaggatgctggtgacggcggtggggatgcggacggagtgggggaacctgatggagacgctgagccagggcggcgaggacgagacgccgctgcaggtgaagctcaacggcgtggccaccatcatcggcaagatcgggctggcgttcgcggtgctcacgttcacggtgctcatggcgaggttcctgctcggcaaggcgggcgcgccgggcgggctgctgcggtggcggatggtggacgcgctcgcggtgctcaacttcttcgccgtcgccgtcaccatcatcgtcgtggccgtgccggaggggctcccgctcgccgtcacgctcagcctcgcgttcgccatgaagaagctgatgcaggagcgcgcgctcgtgcgccacctctcagcgtgcgagacgatggggtcggcgagctgcatctgcacggacaagaccggcacgctcaccaccaaccacatggtcgtcgagaagatctgggcgtccggcgccgcgcagacgatgagcaacgccaagggattcgaccagctcacctcgtcgatgtccgagaccttcgccaaggtgctcctcgagggcgtcttccattgctccggctccgaggtcgtccgtggcaaggacggcaggcacaccatcatgggcacgcccaccgagacggccatcctcgagttcgggctcgcggtggagaagcgcgccaggatcgagcacaccggcgccgggaagctcaaggtggagccgttcaactcggtgaagaagacgatggccgtggtgatcgcgtccccgagcgccggcggccgcccccgcgcgttcctcaagggcgcctccgaggtcgtcctgagccggtgcagcctcgtcctcgacggcaccgggaacgtcgagaagctcacggacgccaaggcgaagcgggtggcgagcgccatcgacgcgttcgcgtgcgaggcgctgcgcacgctctgcctcgcctaccaggacgtcgacggcggcggcggcgacatccccggcgaaagggtgatggcgaggtcgctgccgttggacaagcacacgctggtgacgaacctgaggggcatgttcaacgaggtggtggcggtgaccggcgacggcaccaacgacgcgccggcgctgcacgaggccgacatcggcctcgccatgggcatcgctggaacagaggttgccaaggagaacgccgatgtgatcatcatggacgacaacttctcgaccatcatcaacgttgccaaatggggtcgctccgtctacatcaacatccagaagttcgtccagttccagctcaccgtcaatgtggtcgccctgatggtgaacttcatctctgcgtccttcacagggagtgcgccgctgacgattgtgcagctgctgtgggtgaacctgatcatggacacactgggggcgctggcgctggcgacagagccgccgaacgacgcgatgatgaagaggccgccggtgggtcgcggcgacaacttcatcaccaaggtgatgtggaggaacatcgtcgggcagagcatctaccagctggtcgtgctcggcgtcctcctcctcagagggaagagcctcctccagatcaatggccctcaagctgacagcctactcaacaccttcgtcttcaacacctttgtcttctgccaggttttcaacgaggtgaacagcagggagatggagaagatcaacgttttcagcggcatcttcagcagctggatcttctcggcggtggtcggcgtcacggcggggttccaggtgatcatggtggagctccttgggactttcgccaacacggtgcatctcagcgggaagctgtggctgacgagcgtgctgatcgggtcggtcggcttggtcatcggcgccatcttgaagtgcatcccggtcgaatccggcagcgacgcttctgatcgtcacgacggataccggccgatccccaccggcccgagtgcggtttga

SEQ ID NO: 3197 - DNA, 2529 bp, Oryza sativa
atgacgatgaccggagggcaccaccatgacgcgcaccacgaggacttccagctgaaggacacgaacccgctgctgggggagcaatggccgaagggcgcggcggggccggcgcggccggccgtcggcggcggcatcgccggttggctggggttggagaagccgtcgagcacctacgacctcgtcgagcagatgttcttcctgtacgtgcgcgtcgtcaaggcgaaggacctcccgcccaaccccatcaccgggtcccccatggatccgtacgtcgaggtcaagctcgggaactacaagggcacgacgaagcactacgaccggcgagccaacccggagtgggaccaggtgttcgccttctccaagtcgagggtgcagtccaacgtcctcgaggtgtacctcaaggacaaggagatgctcggccgcgacgactatgtcggccgcgtggtgttcgacctcgccgaggtgcccaccagggtgccccccgacagccccctcgcgccgcagtggtaccgcctcgaggagcggcgcgttggcggcggcggcgacggcggcgggttgaaggtgaggggggagctgatgctcgccgtgtggattggtacccaggccgacgaggcgttcccggaggcgtggcactccgacgccgccaccgtccgcggcgagggcgtggcgagcgtgcggtccaaggcgtacgtgtcgcccaagctgtggtacctccgcgtcaacgtgatcgaggcgcaggacgtgcagccgcaggcgcgcgggcgcgcgccggaggtgttcgtcaaggcgcaggtcgggaaccagatcctcaagacgtcggtggtggcggcgccgacgctgaacccgcggtggaacgaggacctggtgttcgtcgtcgccgagccgttcgaggagcagctgttgctgacggtggaggaccgggtgacgccgcgcaaggacgacctcctcggccgcgccgcgctgccgctcgcgctgttcgagaagcggctggaccaccggccgttcgtccagtcgcggtggttcgacctcgagaagttcgggatcggcggcgccatcgagggggagacgcggcgggagctccggttcgcgarccgcgtgcacgtcagggcgtgcctggagggcgcctaccacgtcatggacgagtccaccatgtacattagcgacacccgccccacggcgaggcagctctggaagccgcccgtcggcgtgctcgaggtcggcatcctcggcgccgccggcctccagccgatgaagaatcgcgacggccgtggcaccaccgacgcctactgcgtcgccaagtacggccagaagtgggtccgcacgcgcaccatgctcggcaccttcagcccgacctggaacgagcagtacacctgggaggtgttcgacccgtgcaccgtcatcaccatcggcgtcttcgacaacaaccacctcggcaacggcaacggcaacggcaacaacgccggcggcggcggaggaggaagcccgccggcgagggacgcccgcgtcggcaagatccgcatccgcctctcgacgctggagaccgaccgcgtgtacacgcacgcgtacccgctgatcgtgctgcagccgtcgggggtgaagaagatgggcgagctccgcctcgccgtgcggttcacctgtctgtcgctgatgaacatggtgcacctgtacacgcagccactgctgccgcggatgcactacctccacccgttcacggtgacgcagctggacgcgctccggtaccaggcgatggggatcgtggcggcgaggctggggcgcgcggagccgccgctgcggcgcraggtggtggagtacatgctcgacgtggagtcccacatgtggagcatgcggcggagcaaggccaacttcttccgcgccgtctcgctcttctcgggggccgccgcggcggcgcggtggttcgccgacgtgtgccactggaagaacgttgcgacgacggcgctggtgcacgtcctcctcctcatcctcgtgtggtacccggagctgatcctccccacggtgttcctctacatgttcatgatcgggctgtggaactaccggcggcggccgcgccacccgccgcacatggacacgaagatgtcgtgggcggaggcggtgcaccccgacgagctggacgaggagttcgacacgttcccgacgtcgaggcagcaggacgtggtgtacatgaggtacgaccggctgaggagcgtcgccgggaggatacagacggtggtcggcgacatggcgacgcagggggagaggctgcagtcgctgctggggtggcgggacccgagggcgacgtgcctcttcgtcgtcttctgcctcgttggccgccgtcgtgctctacgtgacgccgttcagggtggtggcgctcgtcgccggcctctacctgctccgccacccgcggttccgcagccgcctgccggcggtgcccagcaacttcttccgccgcctgccgtcgcgggcggacagcatgctctgagcaagacgacgtacggcttcaaaatgtttgaaattttcagtccaaaaagatga

SEQ ID NO: 3198 - DNA, 1179 bp, Oryza sativa
atggcgccaagacagcggctgtcattccgccgcctcgtcctcctcctcgtcgcctccaccgccctcgcgtgctcggtgctcgcgggcggcgccgtggcgagcgtggtcgagacgctcggcgtccggcgtcacttcggcagcccgaagcgcaacaccacggggcagcacggggccggccggcgccgcggcggcggctccgcccggagcggtctggcgtcgtgcaacatgttccagggaagctgggtgtacgacgactcgctgccgatgtacgacacggcgggctgccccttcgtggaggcggagttcgactgccagaagtacggccgccccgacaagctctacctcaagtaccggtggcgtcccagctcgtgcgagctcccgaggttcaacgggctggatttcctcagcaaatggagggggaagaagatactgttcgtgggggattccatcagcctgaaccagtgggagtcgctggcgtgcatgctgcacgcggccgcgccgtcctccaggaccacctacagcaggggcaccccgttctccaccgtcacgttccaggactacggggtgtcggtggcgtactaccggagcacctacctggtggacatcgtcgacgagtccatcggccgcgtgctgaagctcgactccatctccggcgacgcgtggctcggcgccgacatgctcatcttcaacacctggcactggtggacccacaccggcagagaccagccatgggactttgtgcaagatggaggccaggtgatgaaggacatggaccggctctcggccttctccaaggggatgtctacatgggccagatgggtcgattcgaacgtggacacatccaagaccagggtctacttccagggcatctctccaacccactacaacggagcggactggggggaggggtcgaggagctgcgcgcagcagacgcagccggtggcggggtcggcgtacccggcggggccggtgccggcgcagagcgcggtgaggagcgcgatcgccggcatgtcgaagccggtgttcctgctcgacatcacgctgctgtcgcagctgaggagggacgggcacccgtcggggtacagcggcggccacccgggcaacgactgcagccactggtgcctcgccggcgtgccggacgcatggaaccagatcctgtacgcctcgctccttgcatag

SEQ ID NO: 3199 - DNA, 1554 bp, Oryza sativa
atgcagggcgccaacatgctcctggacgagcccgtccgcctcacctccgtcctcacccccgtcaagcccaaagtattcccatcactcaccaagattgttgggacccttgggcccaactcacactccgtcgaggttattcaagaatgcctcactgctgggatggcagtcgcacggtttgatttctcatggatggatgcttcatatcatcaggagacccttaacaatctgaggaaagctgcacaaaatgtcaataagctgtgccctgtaatgctggatacactgggtccagaaattcaggttcacaattcaactggtggaccaattgagttgaaagctggaaatcatgtcaccataacaccagatctttctaaagctccctcttctgaaatcttgccaattaagtttggtggtcttgcaaaagctgtcaagaagggtgatactctttttattggtcaatatctcttcacaggaagtgaaacaacatcttcgtggcttgaggttgtggaaacttctggagaaaatgttgaatgtcttgtgaccaatacagctacacttgcaggccccatgttcactttgcatgtttcaaaagcccatgtcagtttaccaactttgagtgattatgataaagaggtcatttcaacttggggattacataacagtgttgatattatatcactttcccatacccgctctgccgaggatgtcagggagcttagatcttttcttcaatctcatggccttcaggacacacagatatatgccaaggttgaaaatactgagggtttggatcattttgatgaaattctccaagaagctgatggcgtcattatttcacggggagacctgggaattgaccttccaccagaagatgtgttcatatcccaaaaaacagctattaagaaatgcaatcttgctggcaaacctgtgatcatcactagagttgtggacagcatgattgacaatctacgcccaacacgtgcagaggccactgatgttgcaaatgctgtcctagatggaacggatggcattttgcttggtgcggagactcatcgaggcccttatccagttgatgcagctgagtctgtgtataaccagttggttcacttcaagaaattagtgaagcatgtaggtgatccaatgccccatgaagaatctgtggcatcttcagcggttcgcactgcaatgaaggtaaaagctgctgcaatcgttgtgttcactttctcaggaagagctgccaggttagttgccaagtacaagccaccaatgccagtgttggccgttgtcttcccacgtgagggctctgatccaacaaagtggcgttcttacggcacaactcaggcaaggcaatgttttgctgcaagaggtgtctaccctttgatggcgagtactgaggaggctgaaactggtgggctcaccagggaagagtacgggataaaacttgcacagaactatggtcgctcggttggtatgctaaagccctatgacaggttgatcattttccagaagatcggcgattcatctgttgtcaagatcatcgagtgtgacagttcgtaa

SEQ ID NO: 3200 - DNA, 2217 bp, Oryza sativa
atgttggacctccgcatcaggtttgggggtgggagtgagggcgccgggtcggtcgcgttctggatgtggatcccgccgccgcactcgctggcgtcggaggtgatctcgtggaggagcatatggcgtggtggaaatacagtttaccgtcccttgagcatggagctctgcacctcttctgtatcaggttcggtacaatggtctcgtatatcagcatttgactgtcgaactcggtcccatggatacgcgagttcaagttcctgggtttgtcaaaggaggagaaaaacatccttttatgtcatgaatgctgcgtcgactggtgctctgccccctacaaagaagctaatcccacgaactaatgtcagaaacatatccggtgataagcccagcagtgcactggagcaacttgatatagaacgtggcgtctgtatccctttccggaagtacactccagagatggtattgaacacttcaaatggttatatttacagggtcagaaatagagtcttgggatcaagaggttctgtgctgtccctcgctagtcgaggcgtggagataatttggaaacttggcctttactggtcagctctaatgtatgacttcttggttgggcgagatgaagagattgttccattccgtgcccgccagctccgcaatcttctgtgtgatttgggcccttcattcattaaagcaggacaggttttagccaacaggcctgatattattcgagaggattatatgaatgaactctgtatcttgcaagatgatgttcctccatttcctaaccaggtagctttttccataattgaggaggaacttggacagccattagagagattgttcagcagaatctcatcacggacaatagcagctgcaagcttaggccaagtttaccgtgctacacttagagaaactggcgaggatgttgctattaaggttcagaggccaggaattgagcccatcatatatcgagatcttttcctgttccgaactctcgcatcctttttgaatggaattagccttcaaaaactaggctgcaatgcagagcttattgtggatgaattcggtgaaaaacttttggaagaacttgattacacccttgaagctacaaacatcgaggacttcttggaaaatttcaaggatgatccaactgtcaagatccctcaagtatataagcagtattcaggttctcgtgttttagtaatggaatggatagatggaatcagatgcactgacccacaggctataaaagaagcaggtattgatgtggagggctttctcacagttggagtaagtgctgcattgcgtcagttgcttgaatttggccttttccatggagatccacatcctggaaatatctttgcgatgcgtgatggtcgtattgcttatgttgactttggcaatgtggctgtcctaagtcagcaaaacaaacaaatcctaatcgatgctgttgttcatgctgtaaatgaagactatgctgaaatggcaaatgacttcacaaggcttggctttcttgctagtggaacagatgtgtccccaattgtcccagctctggaagctatttggcaaaactcagccgggaaaggcttagcagacttcaatttccggagtgtaaccgggaagtttaatcagcttgtgtacaattaccccatccgcatcccagaaaggttttctttggttattcgttcattgttgacacaagaagggatttgcttcactctgcagcctgattttaagtttcttgaggttgcatatccatatgtagcaaagcgtctcttgacagatccaaaccctgctctccgtgaacggctgatacaggtattattcaaagatggtctgttccaatggaaacggctagaaaaccttatagttcttgccaaggaaaacgtgtccaagatgagcagcaatcctgcactaaaaaagaatagctcgcaaattgagagaaatcgacaaatggagaagaaattagatctcaccgacacaataaaagacggagcacgtttgttccttatcgacgctggcatcaggagacaacttattatggctttcacggaggactccaagttgcatgtagaagagcttgttgatgtgtacagactggtcgaagatcaaatcgacattccatcagttgctctcgaggttatccaagatttaccatccgtcgcgcgcgatttcatgctttcttggagcgattccatcctgtcagatcggcaatactga

SEQ ID NO: 3201 - DNA, 483 bp, Oryza sativa
atgggaggcaccatggattacctgtctgatcttctcggcggcggcgggagcagcagccgtcggaggtacaagaagaggaagcagttccagacggtggagctcaaggtgaggatggactgcgacggctgcgagctcaaagtcaggaacgccctctccagcatgaaaggggtgcagtcggtggagataaacaggaagcagtacaaggtgacggtgcaggggttcgtggagccgcacaaggtggtgaagcgggtgcaggcgacggggaagaaggcggagatctggccctacgtgccctacaccctcgtcgcccacccctacgccgccccggcctacgacaagagggctccccccggccacgtccgccgcgtcgacgccgtcatgcccgtcgccagctacggctccgccgccgctgccgccgcgccggaggagcgcctcaccaccatgttcagcgacgagaaccccaacgcctgctccatcatgtga

SEQ ID NO: 3202 - DNA, 3123 bp, Oryza sativa
atgggagatggcgacaacgacagcgtggactacgccgcggagatggaggcggacgccgccgggaacggctcggcggcggcggcggcgtacgcggcgcgggccggcgtctacgacggcgtcgacccgttcgaggggatggagttcgacgacgaggaggacgcgtggaccttctacaatgtctacgcccaccgcgtcggtttcagcaccaggatcagcgtcatgcaccgctcgcggagggacggctccatcatgtcgcgccagttcgtctgcgccaaggagggcttccgcacctaccgcgggaagaacgaggtctccccagtcgccgccggcagcggcaaggacagcggraggggccgccggactcgggctgtcacgagggttgggtgcaaggcaatgatccgggtgaagaagcaggacaatggccggtgggcggtcaccaagcttgagaccgcgcataaccatcctctggtccctcccaaccaggcacactgcctgcgccctcacaagccactctcagagtgcgggaaacagcgtcaatttgggattcctcgaaatggtggtatgcttctcgctattgagcctccgccaccacccatttcaccgcccatgccgcagacaagcgttcttcaagtggttccccattatactagggatggtattggagatcatgcacgagtaattctggattatgtcaagcgcatgcaagctgaagacccagctttcttttatgccatgcaatttattgatgggcatccagtaggtaatatcttttgggctgatgcaagagcaaggatggcgtacaaacactttggggatgccgtattcttggatgactactgcaaaaggaacaagtatcagctcccacttgttgcattcaccggagttaatcaccactgccagcccgtcctatttggttgtgcgatcattggggataactcggaggcttcctttgtttggttatttgagacacttctcttggcaatgtctggtcaccatcctgattctcttaccacggagcatgatagtgccatacaattggctgcccttaaggtccttccccgaactaggcaccgtttctgcaggtggcacatcttgaatgaaacacacgataagttatcacacttatctgatgaatttccgtccttacatgaggagcttgtcaattgtatcaacatgcctgagacaattgatgagtttgaagtaaactttaaggcattaatttctaaggttggcccaggaaatagcgagtggctctattcagtgtataattgccgtcaacattgggtccccgtgtacttgagggatacattttttggtgacgagtcatcaaaggaggagtgtgcaagcaggagttcatttttcgatggttatatcagtgcaaaaactgatccacagtcattcatccagcagtatgaaaaggctctggactgttgttatgagaaggaggtgaaggaagaatttgagacaaagtactcacttccagaaatcaagacatcatctcctattgagaaacaaggcgcagacttatacacgaggtcaatgtttttgaaattccaacaggaacttgttgatgcctctgtttcctctctggaagtaatgaaggaggatggcaaatctcgcatatataaagtgaccaaatctgcaggaagtgagaagcctcatatggttgaattcaattcttttggaagttctgcaacatgtagctgtcagatgtttgaacatttaggtattgtctgtaggcacatacttactgtctttggcacacaaggtgtatcttcacttccttcccagtacattgtaaaaaggtggactaaatatgccatggaaagaagtccagacaagaaaattgatgaagttagcaaagtcaatgagcccaaggaggagcaaaaaagtggtgccgaagatggtgagcaatctcagacatggcgctacaacagtttatgtcgcgaagcacttagatatgctgaagaaggagcatcatcagtagaggtttatattgtagcaatgcaggctcttcaagaggctgcaaacaaggtcaatatggcaaaaagaggtatcggacaggtagcaccaaatgcaccattggcagtgatgccaattgcagcccaactaccagctgaaggcttcagaaatgtcccggagattagttttaatcagagaaagaagagaaaaaggaattcaaacaacaaaacaacagagaattcatcaaatcaacttatgtatctacaacagcctgtcaatttttggtttgttgctcctggtacatcaagtggtccacaagggccttctcaaatagttgctgcagttcctgtttcttcgagtgcgccacacggtcagacgtctagtgcaaaccacccaagtgatggaaataccacatcctgttctgtagctgctcaaaaaaattccgacttgtccaactacagtggatcagcaccttctttgggaaatgttgtgccagaaggagaaattaaatcttcagggtttgcttcacaaataaaagagagtcatgaattgtcccaaggtaatggcaacaagggaaacaacgtgaacatggcaagttctacatcctcgccacagcttgtgacagtcccggttggactgtgcttgccttcaatggacagctcgaagatatctgcagatgcgattaattctacgaactctggcagcatgattagcaatggcaatgtgtcattcggtctttgtcaatctcaatctaccaatgctgatcctcggtcaactcccgagggttcttctattagggcagcagccatcgcagcaggtgcacgcattgcatctccatctgatgccgcttcaatcataaaagcggcacagtcaaaaggtgctatccacattaggcctggagaaggcgtcccaaattatctgaaaccattagccccacaaccgctctcctcgctaccaccaggcagcatacccaattcagtgcatccttcctcaagccatgcacaaccaggacagtgcagctttggtgattctgcagcagcaaaggatgcaatttttggttccacagacagcagtgatgacgatgagtatgatgaagatgatgacactgacgataacgatgaagatgaggggataaccggtgacgaggtggagcaagaataa

SEQ ID NO: 3203 - DNA, 1464 bp, Oryza sativa
atgtccccatttccattggaccagccgggcagtgataatgagacagagcgcacttgcttgactgatgttggattaactagtcttgccaggggttgcaaagggctcgaaaaactaagtctggtatggtgttcttccataacttcgacaggcttagtaagaatatcagagaattgtaagaacttgagttcgttggatcttcaggcttgctatattggagatccaggacttattgctattggtgaaggctgcaagttacttcgtaatttgaacttgcgttttgttgaaggcacttcagatgaaggcttgattggactaataaagaactgtggacaatcacttgtctctcttggcgttgccacttgtgcttggatgactgatgcatccttgcatgctgttggatcacactgccctaacctggaattcctgtcactggaatcagatcatattaaaaatgagggagtagtatccgttgctaaaggatgccgcttgttgaaaactttgaagctgcaatgcatgggtgctggtgatgaggccctagacgctattggtttattttgttcattcttagagagtctgtcactcaacaacttcgaaaaattcacggacaggagcctttcttctattgcaaaagggtgcaagaatctcacagatcttattctcaatgactgccatttactaactgatagaagccttgaatttgtagctcgtagctgcaaaaaattagcacgcctgaagatcaatggttgtcagaatatggaaactgctgcactggagcacattggacgttggtgcccgggtcttttggaattatctctaatttattgtccaaggatccaggacagtgcatttctggaggttggtagaggttgctcccttctcaggtctctttatttggtcgactgttccagaataagtgatgatgccttgtgctacatagctcaaggttgcaagaacttgactgaactttctattcggcgtggttatgagataggagacaaagcattgatatcttttgctgagaactgtaaatcgcttagagagttaacactccaattttgtgagagggtatctgatgcagggctgactgcaattgctgaaggctgtcctcttcgaaagttaaacttgtgtggatgccaactaatcactgataatgggctcactgcaattgcaagaggatgccctgatctggtctacttggatataagtgttctccggtccataggagacatggcgcttgcggagatcggtgaaggttgctcgcagcttaaagatatcgcgctgtcccactgtccagaggtcactgatgttggtctaggccaccttgtcaggggctgcctgccgctgcagtcatgccagatggtgtactgcaggcgagtgagcagcacaggaatagcgactatcgtctcgggctgccccaagttgaagaagctcctcgttgaggagtggaagaaatcgtgctcatga

SEQ ID NO: 3204 - DNA, 447 bp, Oryza sativa
atggcgatgagaagggtggtgctggtggcggcggtgctgtgcgcggtggtcgccatggtcacagcgcaggaggcatccaacgtgcgcgccacgtatcactactatcgccccgcgcagaacaactgggacttaggagccccagccgtgagcgcgtattgtgctacgtgggacgctaacaagccactgtcgtggcgtcagaagtatggctggactgccttttgcgggcccgttggtcctaggggtcaggctgcatgtggcaagtgccttctggtgacgaacacggcgacgggggcgcagatcacggcgaggatcgtggaccagtgcgccaatggcggccttgacctggactgggacaccgtcttcaccaagatcgacaccgacggccagggctaccagaagggccacctcatcgtcaactacaagttcgtcgactgcggcgacaactga

SEQ ID NO: 3205 - DNA, 440 bp, Oryza sativa
atggcggggatcaccggatctcgagcactcatggtggtggcgctcctctgcgctgccgcggccatgactgctgcacaagaagcatccaacgtgcgagccacgtatcattattacaacccacaacagaacaactgggacctgaacaaagtgagcgcatattgtgccacatgggatgccaacaaaccgttgtcttggcgccagaagtatggatggaccgccttctgtggacctgctggtcctaggggccgagactcgtgtggcaagtgtatccaggtgaagaaccggggaacaggtgcgacaataattgcgaggattgttgaccaatgcagcaatggtgggttggatctggactacgagaccatcttcaagaagatcgacacagatggtcgtggctaccagatgggtcacctccaggtcgattacaagttcgtcaattgttg

SEQ ID NO: 3206 - DNA, 1614 bp, Oryza sativa
atggacgccgcgggatcgctgcagggggakcgggagttccacaacgagctctcgctggcgtcccatctccttggctgcggccacggccacggctcgccgtccatcctcctgccgttcgcctactcgctctccgcgcagccgcggcgccgccggatgatgctcgtgtacgagctcatgccgaacgggtcgctgcaggacgcgctgctcgggaagaggtgccccgagctggtgtccgagtggccgcggcggctcgcggtggcgcgtgacgtggccgccgcgctccattacctccattccgtcgcgcaaccaccagtgatccatggagacgtgaagcccagcaatgtgttgctggatggtgagctccgtgctcgcctctcagattttggcctcgcgcagataaagtcggaggagagggatgaattagagagtgctgcaattgagggcaatggaaatgagagtagcaatccttgtggcggatgtgatgatgacatgtctgttgctgatgaaaatgctactgctgttgctgtcaatggggaagacaatgctgccaagtcaccggaagatgatgaggggtttaccatggcttctcctgcagaggcagcatccacttcaggatgtgataagactagtgtcagtagcggattgaatggccgaagctgcaatggtggaggtgctgcagcatcaggagctgggaatgactggtggtggcgtcaggacaatggtggtggttctggtggtgtcaaggactatgtgatggaatggattaggtcggagatcaagaaggagcggccgaagaatgattggattgcaggagcatctgcaaccacccctgccacctcaacagagagaaagaaaacaaagcgcagggcgagagaatggtggcgtgaggagtatgctgatgagctaaccaagaagcaaaaaaggcgagcacttgctaagtcaaggagtgagattggtccaatggctagcatgcagtggtgggagagggactgtgacttagaggagaagggacgatcaaggtggagaatgatgaaaagctggagtcgtaggagcagcaatggcaatggcagcattgattggtggattgacggtgtgagaaggagcagcagggattgggctagtggggaattcgtgcccaagagtggtggagcagtgagcagcacaccaagcatgcgtggcacagtctgctatgttgcacctgaatatggtggtggtggacctctatcagagaaatgtgacatttacagctttggcgttttgttgttagttcttatttctggacgccgcccactccaagtgacggcctcacccatgtcagagtttgagaaggcaagtcttatttcatgggcaagacatcttgcccgtgttggccgcttgcttgatcttgtagaccctgcgctgcgggatgttaaccgtgaccaggcgctgcgatgcattactgttgcactcttgtgcatccagagatcgccaagtcgccgtccatcaagtgaggaggtgcttgaaatgctctctggtgagggtgaaccaccgaatctcccagtggagttctcaccgtcgcctcctggtgggttccgtttcaggtcccgcaagaaagatcttgatggggaaaagtga

SEQ ID NO: 3207 - DNA, 650 bp, Oryza sativa
atggcgagggtacagctctgggtggccgccgcgtgcgccgtcgtgctcgcgctcgccgcgccctcgctcgccggcgaccccgacatgctccaggacgtctgcgtcgccgacttggcgtccccggtgaagctgaacgggttcccgtgcaaggcgaacgtgacggcggacgacttcttcttcgcggggctgaagaaccccggcaacaccaacaacccggcggggtcgaacgtgacggcggcgaacgtgcagtcgttcccgggggtgaacacgctgggcgtgtctatggcgaggatcgactacgcgccggggggacagaacccgccgcacacgcacccgcgcgccaccgagatcatcttcgtcctcgagggcgtcctcgaggtgggcttcatcaccactgccaacaagctcttcaccaagactgtcaccgccggcgaggtcttcgtcttcccgcgcggcctcgtccacttccagcagaaccgcggccacggccccgccgccgtcatcgccgccttcaacagccagctccagggcacccaggccatcgccgccacgctcttcgccgccgcgccgcccgtgccgtccgacgtcctcgccaaggccttccgcgtcgacgtcccgcaggtggacgccatcaaggccaagttcaagtg

SEQ ID NO: 3208 - DNA, 1125 bp, Oryza sativa
atgggggtgtacctgagcacgcccaagacggagaagtactccggcgaggscggaaacgaccgcctycgctacggcctcgcatcggattcccggatgcagatggcggacgaccatgaggacgcgacccggaattcgcaactgttttttaggtcaggattgtctctcgtatttgattgcttgttattgcacactgccctgccacgcctggacgaatgcacatccttttttggtgtctatgatggccatggagggaaggcagtatctaagttttgtgcgaaacatctacacttgcaagtactgaaaaatgaggcttattcatctggtgatttggctacttctgtcttaaagtcatttttcagaatggatgagatgatgaaagggcaaagggggtggagggaactggctgaattgggggacaagggacaaaagtttactggcatgttagaaggcataatatggtccccgaaacctggagagtcagataaacctgaggacacttggactgaggagggtcctcattctcattttcctgggccaacatctggaagcactgcttgtgtggctatcataagaaatgatgaactcattgttgcaaatgctggtgattcccggtgtgtgctctcaaggaagggtcgagcttatgacctgtcaaaagatcacaagccagatcttgatgcagaaaaggagaggatactgaatgctggtggtttcattgttgctgggcgggtcaatggaagtttgaacttggcaagggcaataggggatatggaattgaagcagaatgaatttctcccagccgagagacagattgtcactgctgaacctgaattaaacacagttaaactttctgaggatgatgagttcatcgttttagcatgtgatggcatatgggattgcatgtcaagtcaagaagtggtggactttgttcacaaagaaatgaacactgaggatagcctatctgctgtctgcgagaagttgcttgaccattgcttggcacctgtatccggtggtgatggctgtgataatatgacagtgatcatagtcaagttcaagaagccaagcaagtcagctgctacttcaagcacaaatcaatctgtctcttcagaagagatgcgaccaaagtga

SEQ ID NO: 3209 - DNA, 2196 bp, Oryza sativa
atggatgtggagggcggcggcgcggcggcgcggaggaagggggggtggtggtggtggcgggaggaggcggtgctggcgtaccagagcctcggggtggtgtacggcgaggtggcggcggcgccgctgtacgtgtacaggagcgcgttcgccggcggcgacatcgagcactcggcggggaacgaggagatctacggcgccctctcgctcgtgttctggacgctcaccctcgtcccgctcgccaagtacgtcctcctcgtgctccgcgccgacgacgccggcgagggcggcaccttcgcgctctactccctcatctgccgccgcgtccgcgccggcctcctccccccctgcgccgccgccgctgccggcgaggagcttgacgctgcgggcgccgcggcggcgcccgtgtcggccgtgcgcgccgcgctggagcggcaccgtgtcctgcaaaggctgctgctgctgctcgcgctgctcgggacgtgcatggtcatcggcgacggcttgctcacccctgctgtctccgtgttctcagcggtttccgggctggagttgtccatggacaaggaccaacacaaatatatattgcttccaataacatgcgtgatactggtgtgcttattcgccttgcaacactacggcacacacagggttgggtttcttttcgcacctattgtttgcttatggcttctctgcatcagcatcataggggtgtacaacatcatccattggaacccccatgtgtatcaagccctttcaccatactacatgtataaatttctccgaaagactcaaacaggaggttggatgtcgcttggtggaatccttttatgcgtaaccggctctgaagctatgtatgcagaccttggacatttcacacagaactcaataaagatggctttmacactattggtttacccagcgcttgtactggcctatatgggtcaagctgcttacatttcacgccatcacaattttgaggatggcagtcatattggattctacgtatcagtgccagaaaaaatcagatggcctgttctggggattgcaatactggcatctgtagttggcagccaagcaattatcactgggactttctcaattatcaagcagtgttcgtccttaaactgcttccctagggtgaagattgtgcatacatcctctacagtgcatggtcagatatacataccagagatcaattggatattaatgatactatgcctttctgtaactataggcttcagagacacaargcacttgacaaacgcacaagggcttgcagttataactgttatgctcgtcacgacatgtttgatgtcactggttattcttctttgctggaacaagagcattgtctatgctctcagcttccttcttttctttggtgcaatcgaagtaatctacttcgcggcttcacttgtgaagtttcacgaaggggcttgggtacctgtcactctttccttcattttcatgatggtgatgtgtgtgtggcactatggaactaaaaagaagtatgagtttgatgtgcaaaacaaggtctccataagttggctcttgaatattggcccttccttgggaattgttcgtgtacgaggaattggtctgatacacacagagcttatgtcagggattccagccattttctcccactttgtgaccaacttgcctgcgtttcatcaggttctggtgtttctatgcattaaatcagtatccgtaccacacgttcagcctgaggagcgatttttggttggccgcattggcccaaaaaagtataggatatacagagtgattgtccggtatggttaccgtgatgtacagaaggatgatgtagagtttgagaaggatctagtcagcagtattgcagagttcatccgctgtgcggactctaaccaaaacagttttatggacggcgcaagccattcatgtraggggctatctttcatcagtaaaggccttccacttgaggaggaggaaggtgagtttgatggatcagattcaacaggatcatctgctcataaggagataaatccaaacacgacggcaccgaagccaaagagggtgaggtttgcacttccaaaggacacaaagatagaccgggaggtgcgcggcgagctgcaggagctgatggaggcaagggaggcaggcatgtccttcataacgggccgctcccatatgaaggcgaaaagcggtctggtctga

SEQ ID NO: 3210 - DNA, 1398 bp, Oryza sativa
atggcgcgccagcacttcctcgtcgtcgcgtaccctggccagggccacatcaacccggcccgagccctcgccgcgcgcctcgcccgcgccaccggcgcgcacgtcaccctgtccgtcgccgtgtcggcgcaccggcgcatgttcccgtccctcgccgcccccgacgaggaggtccacgacgccgacgccggcggcggcgggatctcctacgtcccgtactccgacggctacgacgaagggttccggctgttcgccagcgacggcraggcggcttggcggcactcggagacgttcgggcgcgtcggccgcgaggckttcgccggcgtggtggaccgcctcgccgcgcgcggccgccccgcgacgtgcgtcgtgtacgcgttcctgatgtggtgggcggccgacgtcgcgcgcgagcgcggcatcccgcgggtgctctactggatccagccggcgaccatgctcgccgtgtactaccactacctccacgggctcgaggagctcgtgacggagcacgccggcgagccggagttcacggtggacatgccgagcctcccgccgatggcgatccgcgacctccccagcttcttcaccgacctcgccgacaccaggctcgccgccgcgttccacggcgtccggacgacgatcgagcagctggacatcgatcgccggagcagcagcaagccgccgatggtgctcgtcaacaccgtcgaggaactagagctcgacgtcctcgccgcctccttccctgaccttgacatcctacccatcggcccggccgccacctcgctcgacggcgcggcgcagccgccgccgccagagcgtcgcacgacctgtacaggcacgacgagaagggctacatggagtggctcgacgcgaagccggcggggtcggtggcggcagaaggaggagctccggcgaggcctcgccgccaccgcgcggccgtacctgtgggtggtgcgcagcgacgacagggacgacggcgacggcgacggcgacggcggcggcatggtggtggartggtgcgaccaggtgcgcgtgctgtcgcacggcgccgtcgggtgcttcgtgacgcactgcgggtggaactcgacgctggaggccgtggcgtgcggcgcgccgatggtggcggtgccgcagtggtcggaccaggacacgaacgcgcggctcgtcgccgggtggggcgtcggcgtgcgcgccgccaccggcgccgacagggtggtcgaggcgggcgagctcgcgaggtgcgtggagacggtcatggcggacacggaggcggctgccgccgtgcgccggagctcggtggcgtggaaggcgaaggtgcgggaggccgtcgccgagggcggctcgtcggatcgtaatttgaaggctttcttggaccgaattgcaaatgttgcgtag

SEQ ID NO: 3211 - DNA, 1116 bp, Oryza sativa
atgacgaacggggccgggggaggaggaggaggagggggattggggggcacgagggtgccracgtggagggaccgggagaacaaccggcggagggagcggcgscggcgggcgatcgcggccaagatctacgccgggctgcgcgcctacggcaactacaacctccccaagcactgcgacaacaacgaggtgctcaaggcgctctgcaacgaggccggctggaccgtcgagcccgacggcaccacctaccgcaaggtcatagacaaatatgaacataacagagtgccacttacctgcatccagggatgtaaacctcctcaagcagagcgtcctgatccaattggaagatcggcttcgccaagcccttgctcttcatatcaaccaagtccgcgggcttcatacaacccaagtcctgcatcgtcctcctttccaagctctggatcctcctcgcatatcactattggtggaaacagcttgattggtggtgtcgagggaagctccctcattccatggctgaagacacttccgttgagttcatcatatgcctcctcctccaagttcccacagcttcaccatttatatttcaatggaggttccattagtgcaccagtgactcctccatccagctcccctactcgcacacctcgcttaaggactgattgggagaacgcaagtgttcagccaccatgggctagtgcaaattatacatctcttcccaactctacaccaccgagcccaggccacaagattgcaccagacccagcatggctctcaggatttcaaatatcatctgctggtccctcatcgccaacatacaatcttgtttcgccgaatccatttgggattttcaaagaagctattgccagcacttccagggtgtgcacccctggtcagagcggaacatgttccccggtaatgggtggcatgccggctcatcatgatgttcagatggttgatggtgcgccggatgattttgcctttgggagcagcagcaatggcaacaatgaatcacctggactggtgaaggcatgggagggggagcggatacatgaagaatgcgcctccgatgagctggagctcactcttgggagctcaaagactcgtgcggatccctcctga

SEQ ID NO: 3212 - DNA, 1833 bp, Oryza sativa
atgccggaagcaccgaccgccaagacagcaccggcctacggctacgcccccggggcgcacgccgaggcgctcgagttcatcgagcacgtcacggcgaacgccgggcaggtgcagcggcgcgtgctcggcgagatcctggcgcagaacgcgccggccgagtacctgcgccggtacggaatccccgggtcccccgacgttgtcgacgccttccgccgcctcgtcccgctcgtcacatacgagggcctccagccagacatcctccgcatcgccaacggcgamacctcgccgatcttctccgggaagcctatctccgaattcctcacgagctcgggcacgtcgggaagggagaggaagctcatgccgaccatcgccgacgagatgaacaggcggtcgctgctgtacagcctgctgatgccggtgatgagccagtcggtgtccgggctcgacaaaggcaaggcgatgtacctgctcttcgtgaaggcggagtcgcgcacgccgggcgggctcgcggcgcggccggtgctcacaagctactaccggagccggcagttcctcgaccgtccgcgcgacccctacacatcttacacgagccccgacgaggccatcctgtgcgtggactcctaccagagcatgtacgcgcagctgctctgcggcctcgtccaccgcgccgacgtgctgcgcgtgggcgccgtgttcgcctccggcttcctccgcgccatccatttcctcgagaagcactgggcgcgcctctgccacgacatccgcaccggcgagctcgacccggagatcaccgaccgcgtggtgcgcgacgccgtcgggcgggtgctccgcgccgacccggcgctcgccgacgcgatcgaggacgagtgcgctagggcgtcgtgggagggcatcatccggcgcctgtggccacgcaccaagtacatcgacgtgatcgtgaccggcaccatgtcgcagtacatcccgacgctcgagttctacggcggcggcctgccgctgacgtgcaccatgtacgcctcttcggagtgctacttcggcctcaacctgaatcccatgtgcaagcccagcgacgtcgcctacacgctcatccccaccatgtgctactacgagttcctccccgtcaattgcaacaatgccactgccgaggcgagccaccgcgacctcgtcgacctggtcgacgtaaagctcgggcacgagtacgagctcgtggtcaccacgtattccgggttgtatcgttatcgcgtgggcgacgtgctgagggtggcggggttcaagaacaaggccccgatgttcagcttcgtgcggcggcagaacgtggcgctgagcgtcgactcggacaagacggacgagacggagctgcacgcggcggtgagcggcgcggtgcagcacctggcgccgttcggcgcgtcgctggtggagtacacgagctacgcggacgcggccaccatcccgggccactacgtgctgttctgggagctgcgcgccggcagcacggcggtgccggcgtccgtgttcgaggagtgctgcctgtccgtggaggaggcactgaacagcgtctaccggcagggccgcgcgtgcgacaggtccatcggcccgctcgagatacgcgtcgtggcggagggcaccttcgacaagctcatggactacgcgatcagccggggcgcgtccatcaaccagtacaaggcgccgcggtgcgtgcgccctggcccggtcgtcgagctgctcgacgcgagggtgcagggcaagtacttcagtcccaagtgccccaagtggagccccgggaacaagcaatggaacaaaagcaaggatctggtcggcaagggagacgcctaa

SEQ ID NO: 3213 - DNA, 1224 bp, Oryza sativa
atggcggtagtagttggccggaggccgatgcggacagtgggaacaggagtggcgcatcaccatgccggcgcaacgcggagcggcggccgaaggcctgcgtctaggcggaaaggcgacaacgggaggccgactggcgcggcacgttcttcaggtgaaaaccacgttctgattcctcagggcagggtagttctcgcaccactgacaaggcagcgatcctatggtaatgttcctcagcctcatgccattctgtactatcagcagagaacaaccaaaggaggccttttgattgctgaggccactggaatctcggacactgctcaagggtacaaagatactcctggtatttggacaaaggagcaagtggaagcgtggaagccaatcgtagacggcgttcatgccaaaggaggaatatttttctgtcagatttggcacgtaggaagagtctctaataacacttttcagcctaatgggcaggctccaatttcgagcaccaataagtcactaaaacctgcagtaagagccaacggcatagatgtggctactttctcaactcctaggcgattagagactgatgagatcccttttgtcgtgaatgattacagggttgctgctagaaatgcaattgaagcaggatttgatggtgttgaaatccatggagctcatggttatttgatcgatcagtttctaaaagaccaagtcaatgatcgttctgacaaatatggtgggagcttagagaatcgctgccggtttgcgctagaagtggtccaagccgtaactgatgaaattggagctgacaaggttgggataaggctgtcaccctttgccagctattcagaggcagcagactcaaacccagaagctctaggcctatacatggcaaatgcactaaacaagtttggtatcctctattgtcacatggtggagccacggatggtaaagcttggtgaaaagtttgaaaccccccatagtcttcgtccaatcagggatgctttcaagggaacgtttattgctgctggtggctacaataaggaggatggaaataaagcagtctccactggatatactgatttggttgcttatgggcgcttgttttggtctaatcctgatttgcctgagaggtttgaaatagatgctcctctcaacaaatacaacagagagactttctacatctctgatccagttattggatacactgactacccatttcttccatcagatgtctaa

SEQ ID NO: 3214 - DNA, 984 bp, Oryza sativa
atggtgctcgacgtgctgctcaagatcaagaacgagcaggacccgtcgctcaccttccgccgcagctgccgcgaggggatctgcgggagctgcgcgatgaacatcgacggcgacaatggcctcgcctgcctcaccaagatctcgtcggcgtcctcggcctccacgatctcgccgctcccccacatgttcgtcatcaaggacctcgtcgtcgacatgaccaacttctacaaccagtacaagagcgtggagccgtggctcaagcgcaaggacgcgccgccgcagcccgggaaggagatcccgcagaccaaggccgaccgcgccaagctcgacggcatgtacgagtgcatcctctgcgcctgctgctccacctcctgcccctcctactggtggaaccccgaggagtacctcggccccgccgcgctcctccacgccaacaggcttccgctgttggggacgctaatcaaaccaaaacccaacatgttcatgcacatccaagctcgaggatatcacggggtatcggagaagagaaacttgctggatcacaaacgtagattgcttgcagcaaaatatgaactgaaaggaaagctttataaggctgtttgtagggaccctgatcttccagcagatatgcaggaccagtttcgctataagctgtccaagttgccaagaaatagctccatgacacgccttagaaaccgctgtatcttcacgggccgctcgcgcgctgtttacaagaaattccgcatgtctcgtattgtgttccggtcattggctaataagggtgaattgttgggtgttaagaaagcgtcttggtggatacaggacagccgtgaccagttcactaaggagcgcctggattccatcaacgacgagttcaagctgtaccgctgccacaccatcaagaactgcacacacgcctgccccaagggcctcaacccagcgaagcacatcgacacaatcaagaagctccagctcgaggcctga

SEQ ID NO: 3215 - DNA, 1155 bp, Oryza sativa
atggccaggctaatattaatccccctcctcacggtcacggatttttcgtcgtcgcatctcagccatatggcaacggtgtgggtgtttgtgcttagcttaatcggcctcgttcctcttgctgagcgactcagcttcctcaccgagcagattgcattttacaccggtcctactgtgggaggactactgaacgcgacatttgggaacgtgacggaggtgataatcgcgctgttggcgctgcgagaaggaaagattgaggtggtgaaatgctccctgctgggatccatcctctccaacctgctgcttgtcctcggcacctccctcttcctcgccggcatcgccaacctccgcgcccaccagccgtacgacaccaagcaagctcacgtcaacaccgccctcctcatgctcgccgtcctctgccactccctgccgctcatgctcaggtacgccgtcacctccggcgaccacgccatcgtctccggcgacgccgccctccacctgtcgcgtgcctgcagcatcctcatgctcatcgcctacctggcctacctcttcttccaactcaacacgcatcgccagctgtttgagccccaacaggttgaggatgatgacgacgatgatttagtgatcgctcaagatgatgagccagtactgggattctcgagtgccatgatttggctggctctcatgactctcctgactgcgctcttgtcagggtatgttgtgagcacaattgaggcggcctcagaatcatgggaactatcagtgagcttcattagcatcatcttgcttcccatcgttgggaacgcagcagagcatgccggtgccgtcatatttgctctcaagaacaagatggatattactctcggagtgtctttgggctctgccacacagatctccatgtttgtggttccagtgagtgtgattgtagcctggactatgggaatcccaatggatcttgatttcaacctgctggagactggctctctgtttctagcaatattagtgacagccttcaccctccaggagggagaatcacattatctgaagggattgattcttgtcctgtgctacgctgtcatcagcgtgtgctttttcgttataagacggcgttctgcaggagggacggacggtgttcaccatctggatgtgattgtgtag

SEQ ID NO: 3216 - DNA, 3942 bp, Oryza sativa
  misc_feature (1)...(3942): n = A,T,C or G
atggcgctccgatcccccaactcgatgctgtggttagcactactggtgtgggccgcgctgctgtgcggtagctgccatgggaggttcgtggtggagaagaacagcctcaaggtgacgtcgcccagcgacatgaagggcacctacgagtgcgccattggcaacttcggcgtgccccagtacggcggcaccatggtcggcgtcgtcgcctaccccaaggccaacaagaaggcctgcaagagcttcgacgatttcgacatctcctacaaggccaaacccgggtcactccccaccttcctcctcgtcgacaggggagattgctttttcacaaagaaggcatggaatgcacaaaacgctggagcagcagccatccttgttgctgatgacaagacggaacccctgattacaatggacactcctgaagagagtggaaatacagactatttagagaatatcaccattccttctgcgctgataaccaagagctttggggacaaactcaagaaagcaattgataatggtgacatggttaatgtgaatttggattggagggagtccctgcctcaccctgatgagcgtgttgagtatgaattttggactaacagtaatgatgaatgtggccctaaatgtgatagccagattgagtttgtcaagagcttcaaaggagcagcacaggtacttgagaagaagggatacacacagttcactcctcattacattacctggtattgcccagattccttcattctaagcaagcaatgcaagtcccagtgtatcaaccatgggagatattgtgcacctgacccggaacaggatttcagcaaagggtatgatgggaaagatgtggtagtccagaatttacgtcaagtctgtgtttataaagttgctaaggagcatggaaaaccttggctgtggtgggactacgtgacagattttgcaatccggtgcccaatgaaggaaaagaagtacaccaaggaatgcgctgatggagttatcaagtcacttggtcttgatcacaaagccatagataagtgcattggtgatccagatgctgataaagaaaatcctgtgctgaaagctgaacaggatgcacagggctctcgtggtgatgttaccatcttaccgactcttgtaatcaacaatagacaatacagagggaaacttgataaaggagcggttcttaaggcaatttgtgctggttttcgagaaaccactgaaccagctgtttgcttgagtgaagatatacaaacaaatgagtgcttggagaacaatggtggctgttggcaagacaaggctgctaacatctctgcatgcaaggacacttttcgtggaagagtttgtgaatgtccagttgtaaaaggtgttaaatttgttggtgatggctacactcactgtgaagcacatgctaatatgtgccctttaattggttttagcttcgggatctggccgtttgtgaaatttaacaatggagggtgctggaaggattccaggcatggccggacatattctgcctgcacgaatgatggttgtaaatgtccggatgggttcaaaggtgatggagtccacaaatgcgaagatattgatgaatgcaaggaaaggactgcatgccagtgcaaggaatgcaaatgcaagaacacatggggaagctatgaatgcggttgcagtggcggcttgctttatatgaaggagcatgatacatgcataagcaaaaatgcagcaacagaggtaggatggaacttcttgtgggtgatcttctttggcctagtggtagcaggcattgcaggatacgcagtatacaaatacaggatccggttttgcttggttcttgcggaaaaagaaaaatctggcattccaaacataaactggttgcgcgatcgattattcagaagcatccgtcgtcgtcgtcgtcgtggtgctctcgcgccattggcgccaaccttaacaaccgcaatcgcaatgccaagctgcttcaccctcgactccgcctccgatgatggaagaagcactgcccagggccagggatggcccgccggagtcggtggcttcctgtccggcttcttctccgccggcgcggcgcgcgcgracggagggaagccgtcgccggactgggacgcgcasggcctcgcggctagcgcgctgccggtgccgctctccaggctggacggcaagaagaggtacaaggtctcggatctcaccttcctcaaatgccgcacccgggccgccgccgccgccgccgcggaggccccccttttcgacgcgctgcgccccggcggcgtctacaccagggcgcagctgcgcgacgagctcgacgcgctcgccacctccggcatgttcgaccacgtcaccctccaaaccaagcccaagccggacggcacgctcggcctcaccgtctcctacgccgagaccgagtggcccgcggagcgcgagtaccagcagctcgtccgccgcgccaagccgtgcgtactgccggagaagttgcagagggagctgcaagggatggtgaagaggcagaggaaggtgagctccgggctgctcaagaggatggcggggcgcatcgagaggtggtaccacgacgaggggttccattgcgcgcaggtggtcagctaccacggcaacctcgacgccggcgaggtggtgtgcgaggtggtggagggggacatcaccaaggtggagtaccagttcctggacaagctcggcaatgtcgtcgacggcaacaccagcatccctctcattgacagggagcttcctcaacagcttcgtcctgggcatatctacaacaatggggcggggaagcaggctctgaagaatatcgattcgcttggtttgttctccactatagaagtacagcctcgccctgatgagacaaatcaagggggagtaatagttgcaattaagctcaaggaacatgacccaaaatcagctcaggtgatcacagattggagcattgtgcctggctctcaaggaagaccaactctgatcgaatatgtacttaacatgctagacaccattgtgaatatatacattccctcatcactgcaagtcattttgtataacctcacaacttcctcttacagctgcctcttaggcgtcattcaaccaggaggaactgtgtcatttgagcaccgcaacatctgtggtctaaaaaggtctctcattggttctgttacatccagcaacttgctcaaccctgaggatgatctttcgttcaagctggagtatgcccatccttatctggatggtatcgacaaccttagtaggaaccgcaccttcaaaattagctgtttcaactccaggaaattgagtcctatattcgttgctggtcccaatatgtatgaagctccacctatctgggttgatagaattggatttaaagccaatataacagaggaaatgtttcggtacatttgcctcaagagtttcaaaggaatagtgaacaanatggaccaaggtctcggcattggaagcaagaacccgttcttcaaccgtcatcagcttacagtgacgaaattcataaatttgaacaagcaagagaaaggctctcgcaagccaccaccagctgttttggctcttcatggccgttatgctgggtgtgtaggagatttgccaagctatgatgcatttgcacttggaggacctcattcagtaaggggctacggtatgggtgaattgggtgcttccagaaatcttcttgagrttgccactgagctgagcgtgcctatcaccgtgaagaacagacacacgcaggtgtatgcatttgctgagcatggcactgatcttgggagctccaaggatgtggaagggaaccctactgagtttttcagacgtgttggccatggctcatcctatggcgtcggtgtcaagcttggtgcggtaagggcagagtatgctgttgatcacaatgctggcacaggggccttcttcttgagatttggtgagagattctag

SEQ ID NO: 3217 - DNA, 705 bp, Oryza sativa
atgaacgcctttcggttcctcggggacatgacccacctcttctcggtcctcgtcctcctgctcaagatctacgccacgaaatcctgctcaggggtgtcgaggaagacgcaggagctgtacatgctggtgttcgtggcgaggtacatggacctgttcacggactacatctcgctctacaactcggtgatgaaggtggttttcatcaccagctcggcggcgatcgtgtggtgcatgcggcgccacccacaggtgcggcgcacgtacgacaaggatcaggacaccttccgccatgtggtgctcgtcgccgctgccttcgtgctcgcattgctcttcaacgagcggttcaccttccgcgagatctgctgggcattttcgatttacttggaggcagtggcaattctccctcagttagttttgctgcagagaagtagaaatgtggacaacttgactggacaatatgtattcttcctaggggcctaccgtgcattttacatcctaaactggatttaccgttacttcactgagggtcaccacagcagatggatcccttggattgctggtttggtccaaacagctctttatgcggatttcttctactactatttcttaagctctattacacttggtgtaaacaaacagtgtgatttccggtgtcttgtaaaaaccaatgcactccaaactactccgaaataccagaaatattga

SEQ ID NO: 3218 - DNA, 2379 bp, Oryza sativa
atggacgccgccgccgccgccgccggccggggcgggcccggcccttccccgctgcgcccgcgccgagacggattcggaggatgcggtcgcgacgacaagctcgccgcactccgccgaggccgcgggcscggcggaccaggggaacggggccccggccccgttggcggatgccgccgacttcgagggatgaaggagagaaggccactgtacatgctgaaggggccgctggagaatgctcctccggtgagggatttcgttggggtgttgaaggcgtcttttgatcggactggtctgcctgctctgattgcagaggtcaagaaggcttcaccgagccgcggtgtcctgagggaggacttcgagccggttcagatcgcccaaacatatgagaaaaatggagcagcatgcttaagtgttctcacagatgcaaaatactttcagggaagttttgactatttggatgctatacgcaatgctggagtacagtgtcctctgctgtgcaaagagttcattgttgatgcctggcaactttactatgcgcgtttgaagggagcagatgctgttcttctgattgctgctgtcttacctgatcttgatatcaagtatatgttgaaaatatgcaaaatacttggcatggctgctttagttgaggtgcatgatgaaagggaaatggaccgtgtgttagggatagatggtgtccagctcatcggcatcaataaccgtaacctcgagacttttcaagttgatatttcaaacactaaaaatcttcttgagggtgaaagaggacaaactatagctcagaaaggcataattgttgtaggggaatcagggctgttcacaccagaccatatttcattcgttcagaatgctggggttaaagctgttctcgttggggagtctctcatcaagcaggaggatcctggcaaagcaatcgctgggcttttcggcaaagacatctcacctaccacatcgattgacttccttgcaaagtaccagtttgatttcaacacatgcttccgtgaaggaatatattatttatccagaacacaagaagaagaggcacttcagaaattatatacattgcataataatgaaacatctgcatatccaaacacttccgaggaggaagaagatgcgccattaaagagtgctgcggatgttcttttcacagaaagaatgaagatcaaattcaatgagtggcgcaattcaatagtcagcaatcaaagagtcgatgaccataggtcagaaaacttcaaattcgcagaccagttccagactgttttcttcaaaatgcgtcctgctatcatgcttaatggattcacgtcacatcagttaaagttaatccgacagattttaagaacacattttagggaccttgtgtatgtgtgtacatttttggaggatggcgtatcagagaagagagtagtttatacagacaccaatgaagacaagatatccttgatgaaaaatgttcgggaagatctactaaaaagcagggaagcaaaagtcaaatcagcagtagggatccgtcatgtcattgatcttcttgcctcagaaaggaaattgattgttggtcatagttgtttcctaggttatcttgcttcacttcaggtgctaagcatgaagcagctctgtgcttatcatggcattaaatttgagcaactctctcccctggaggacctagcaacaaacattaatctgaagaaacacatcaatctgctgcccccatgctggaacagtggaacagtgcttgatttgagtactggcacggagagaccagatgcaggttataagcgtagatatcctgctgccgtgtatgacaacgtcattcttatctggggattccagtctaaggtgagaccaaaggatataaaggactgcatctgcaaagtgtttggtcgagcttctgttacatcagtcttcccgattgattccactgcggttcttgttcaattcagcaaacaagagtctgtaaacgatttcttggatctgaaggctaccttagagagtgcagatagtgctatttcagtcttgcaccctttgtcaactatactggaaggaggcaaaacacgagcggcaaaatatgatacctacagagatatttgccgctcctctgtatcaaagttctccttcgcggatcaagctgaagcggtttgttcaacttcaaacagcgagtccaagttcaaggagtgcaatgctgctgatggatccggagcatacgggagtgctcttgatggaactgtgcctgcctcggtgcagcagtcaggaggagcgaagtctggctccaagaataaaggcgacgatgatttttcataccaggatatcttagatgcgctacaggatggcaaaacatcagttggcaaacgaatgagtaacgcatga

SEQ ID NO: 3219 - DNA, 1410 bp, Oryza sativa
atgtcgccgacgccgaggccgcacttcctcgtgctcacgttcccgctccagggccacatcgcgccggcgctccgcctcgccaggcgcctgctcgccgccgcccccgacgcgctcgtcaccttctccaccgccgccgccgcgcaccgccgcatgttcgccgagggggagggcggcgacggcgacggcaggctcgagctcctcccgttctccgacggcaccgagaacgggttcgtcaagcgcggcgacgccgcggagctcggcgcgtacatggcgtcgttccacgcctcgggccggcgcagcgtcggggagatggtcgacgcgctcgcggcgcgggggcgccccgtgtcgagcgtcgtctacacgctcctcctgccgtgtgcggccgacgtcgcgcgcgaccgcggcgtgccgtccgcgctctactggatccagcccgtcgccgtgctggccatctactgccactacttccagggcctcggcggcgtcgtcgacgagcaccgccgcgaccattcgttcgtcctggagttcccgggccttccgccgatggcggccggggacctcccgtccttcctcaccgaagccacsgacccctccgactacttccacagcatcttcaccacgttccgcgacctgttcgacgccctcgacagggagacacccaaggccaccgtgctcgtcaacgtgttccaagaactcgaggcggacacgctcgccgccgttggggcgtacgacgtgctccccatcggcccggtgctcccgtccggcgacgacgccgcgctgttcaagcagaacgacgccaagtacatggagtggctcgacaccaagccggccggctcggtggtgtacgtcgcgttcgggagcttaaccgtcatggcgaaagggcaggtcgacgagctgctccatggcctcgaggagagccggargccgtacctctgcgtggtgcggaaggacaacaaggccgccgtggcggagacgggcgacgcgacggcggcggcggcggcgcgcaggaacggcgtggtggtggagtggtgcgaccaggtgcgcstgctgtcgcacgcggcggtggggtgcttcgtcacgcactgcggctggaactcggtgctggagagcatcgcgtcgggcgtgcccatggtgggcgtcccgcggatgtcggaccagcagatgaacgcgcggctcgtcgagcgcgactggcgcgtcggcgtgcgcgcggaggtggacggcggcgacggcgtgctgcgcgcggcggagctgaggcggcgggtcgaggaggtgatgggagacggggaggcggcggaggtgcggcgctcggcggcggcgtggaagcgagcggtggcggaggctctagggaaaggagggtcgtcggatcgtaatctgacggccttcgtggagggtgccagaagtgtcatttga

SEQ ID NO: 3220 - DNA, 2319 bp, Oryza sativa
atgaggatcgcggtgacgggcgcgacggggtacctcggcagccgcctgtgcggtgcgctggccgacgccggccacgccgtgcgcgcgttcgcgctccgctcggcgggcggcggcggcggcggcggcgacgtcgaggccggcctgctcccggcgtccgtcgagctggcgtacggcgacgtcgccgacgtggagtccctcgccgccgcttcgacaggtgcgacgccgtcttccacgtcgccgccgccgtcgaggcgtggctgcccgatccctccatcttcatcacggtacgtgtacaatcttttaaaaagaaaagaggattttaaaaagaaactcgcgaaagtcaatgtgggagggctcgagaatgttttgaaagctgccaggaggacaccaacagtaaagaaaatagtttatacgtcatcattctttgccattggcccaactgatggatatgttgcagatgagacacagatgcatcaaggaaaaacattttgcacggagtatgagaaatcaaaggttcttgcagaccagatcgcattgcaggcagcagcagaggggatgccaatcaccatcgtctatccaggattcatgtatggtcctggaaaacttacagcaggaaatcttgtttctcgcatcttgatcgagaggttcaatgggcgtttacctggttacgtcgggcatggccatgatcgagaatcattctgccatgtcgacgatgttgttgctggacatgtagcagcaatggagaaaggcagagaaggtgaaagatacctcctcaccggagagaacacgtcgctggttcagatcttcgacatggcctccaggatcacgaacacaaaggcgcccagattccacgtacccctctggttgcttgaaatttacgggtggatttcagttcttgtttcaagaatcaccgggaagctcccgttcatcagctaccctgcagtgcgtgttcttaggcatcaatgggcatactcatgtgagaaggccaagaaggagctagggggtactactggacaggctggtggctggcctcgccggaaggcttggaagcccgcgttgactagtggcggttggattggcggcggcggcggcgactcgacgatgggcggcggcatgagggtggtggtgacgggcgcgacgggcgacgcctccgggctcccggcatccgtcgagctggcctacggggacgtcaccgacgaggggtccctcgccaccgccttcgacgggtgcgacgcggtmttccacgtcgcmgcmgcagtcgagccgtggctccccgacccctcggttttcaccaccgtcaatgtgagaggactcgagaatgtgttgaaggctgctaagagaacaccgaccgtaaagaagataatttacacatcttcattctttgcaattggcccaactgatggttatgttgcagatgagacacagagacatcaagagaaaacattttgctcagagtacgagaaatccaaggttcttgcagaccgaattgcattgcaggcagcagcagaaggggtgccaatcaccattctctmccctggagttatctacgggcctggaaaactaactactggaaatattgtttcccgtattttaattgaacggtttaattggcgcctacctggttacataggagatgggtatgatagggaatcgttttgccatgttgacgacgttgttaatgggcacatagcagcaatggagaagggcagaccgggggaaagatatctccttactggagaaaacttatcattcaaacagattttcgatatggctgctaacattacaaatacgaaggcacccctattccatgtacctctctggttgattgaaatatatgggtggatttcagtttttatttctcacatcactggaaatctcccacttatcagttaccctacagtacgtgttcttagacatcaatgggcatattcatgtgataaagccaagagggagctgggctacagtccaagaaacttaactgaaggctgcagttgcataagtagttacagtaaaaaccacgcaatttcaaatttgagaacacgtttaaatggaattttatcgctacctaatgctgggaaggctttgcagaacaacgagggcggttttcatggtttgggcatgaccgccgctggcaagaatcaaggggtagaacacaccttcaactttgtaagctattgtcactatgacctgaaatggcaacaaggcagaaaatttggcagaattaagagctttgatgtagaaatcaatagtcctccacaatataacaagaacttcctgattaatgatagtaaggaattacatgcacatgaatttacttga

SEQ ID NO: 3221 - DNA, 966 bp, Oryza sativa
atggcggcggcggcgatgctggtgctggtcgctatggcgggcggcgccaccgtgtgcgcggcgcagctccggcggaactactacgccggcgtgtgccccaacgtggagtccatcgtccgcggcgctgtggcgaggaaggtccaggagacgttcgccaccgtcggcgccaccgtgcggctcttcttccacgactgcttcgtcgacggctgcgacgcgtcggtggtggtcgcgtcggcggggaacaacacggcggagaaggaccaccccaacaacctctccctcgccggcgacggcttcgacaccgtcatcaaggccaaggccgccgtcgacgccgtgccgggatgccgcgaccgcgtctcctgcgccgacatcctcgccatggccaccagagacgccatcgcgctggccggaggaccgtcgtacgcggtggagcttgggcggctggacgggctgagatcgacggcgagcagcgtcaacgggaggctgccgccgccgacgttcaacctcgaccagctcacggcgctcttcgccgccaacggcctctctcaggccgacatgatcgccctctccgcggggcacacggtggggttcgcacactgcaacacattcttgggtcggatccgtgggtcgtcggtggatccaacgatgagcccaagatacgcagcccagctacagaggtcgtgcccacccaacgtggacccgcggatcgccgtgaccatggacccggtgacgccgcgggccttcgacaaccagtacttcaagaacctgcagaacgggatgggccttctgggctctgaccaggtgctgtactcggacccacggtccaggcccatcgtggattcttgggcccagagcagcgccgccttcaaccaggccttcgtcacggctatgaccaagttgggccgggttggggtcaagaccgggtcgcaaggcaacattcgtcgcaattgtgcagtgctcaattaa

SEQ ID NO: 3222 - DNA, 1275 bp, Oryza sativa
atggccacggtggcgatggacatctccaagccccctcccgcggcgggcggcgacgaggctgcggcggcgaaggggaggggcggcgccggaggaggaggtggggaggggctgcggcagtactacctgcagcacatccacgacctgcagctccagatccggcagaagacgcacaacctcaaccgcctcgaggcccagcgcaacgacctcaactcccgagttagaatgctcagggaagagctgcagttgcttcaagaacctggctcgtatgttggtgaggtggtgaaggtcatgggtaaatcaaaggttctagtgaaggtacatccagaaggcaaatatgtggtggatattgataaaagcattgatattacaaagatcacaccttcaacaagagttgctcttcgaaatgatagctatatgcttcatttgatcctgccaagcaaagttgatccgttggtcaatcttatgaaagttgagaaggttcctgattctacttatgatatgattggaggtcttgatcagcaaatcaaagagatcaaagaggtcattgaacttcctatcaaacatccagagctatttgagagtcttggaattgcccaaccaaagggtgtccttctctatggccctccaggcacaggaaaaacattgttggcacgtgcagttgctcatcacactgactgcaccttcatcagggtgtctggttccgagttagttcagaagtacattggtgagggttctcggatggtccgtgaactctttgttatggccagggaacatgcaccatccattattttcatggatgaaatagactccattggatctgctaggatggagtctggaactggcaacggtgacagtgaagtccagcgaaccatgcttgagcttctgaaccaacttgatggttttgaagcatcaaacaaaataaaggttctgatggcaacaaataggatagacatcttggatcaggcccttctgaggcctggtcgcatagacaggaaaattgaatttcctaatcctaatgaggattcacgctttgatatcttgaagattcattcaagaaaaatgaacttgatgcgtggtattgatctgaaaaagatcgctgaaaagatgaatggggcttcaggagccgagctcaaggcggtctgcacagaagctggaatgtttgctcttcgtgagagaagggtgcatgtaacacaagaggactttgagatggcagtggcgaargtgatgaagaaagacmcggaaaagaacatgtccctacggaagctctggaagtga

SEQ ID NO: 3223 - DNA, 3252 bp, Oryza sativa
atgggggaggcggcggcggtggtggcggtgaacggggagaggtacgaggcggtgggggtggacccgtcgatgacgctgctcgagttcctccgcacgcggacgccattcagaggccccaagctcggctgcggcgaaggaggatgcggggcgtgcgcggtggtggtgtccaagtacgacgccgccgccgacgaggtgacgtcgttctcggcgagctcgtgcctgacgctgctgggcagcctccaccactgcgcggtgaccaccagcgagggcatcggcaactccagggatggcttccaccccgtgcagcgccgcctcgccggcttccacgcctcccagtgcggcttctgcaccccgggcatgtgcgtctccatcttctccgccctcgccaacgccgacagggcggcctccgccgcgccgccgccgccgccgacgccgccggggttctccaggctcaccgccgccgacgccgagcgggccgtctccggcaacctctgccgctgcaccggctaccggcccatcctcgacgcctgcaagagcttcgccgccgacgtcgacctcgaggatctgggtctcaactccttctggaagaaaggcgagcgcgctgacatcaccaagcttccggcctactcctgtactgccgatgttgccaccttcccggagttcctcaagtccgagattaggtcatccggtggtgctccggcggtggcggtcaccggcgacggctgctggttccatcccaggagcatcgaggagttccacaggttgtttgaatgcaacctgttcgacgaaatgtccgtgaagattgtggcgtcgaacaccggctccggggtgtacaaggatcaggacctccatgacaagtacatcaacatctcgcagattcctgagctctcggccatcaacagaagcagcaatggcatcgagatcggagcagccgtgtctatctccaaagccatcgagatactacggtcagatggtggagacgcggtggtgtttcgaaagattgcttatcacctgggcaaggtggcctcaccgttcgtccggaacacggccaccataggaggcaacatcatcatggcgcagaggatgtcgttcccgtcagacatcgcaactgttcttctcgctgcaggatcaactgtcaccatccagcaggtggcttccaagaggatgtgcctcactctggaggaattcttgaagcagcctccatgtgattccaggacattgctaatcagcatctccatcccagattggtgttcatatgatggcatcacttttgagacatttcgtgcggctcctcgtccatttggcaatgctgtctcatatgtgaattctgcattcttggcaaggagttcgttggatgcagcatcaggaagccatcttattgaggatgttcgcttggcattcggcgcttttgggtctgaacatgccatcagagctacagtccggctgcttaaaggagttgtttcaccagcagaaggcaccacacatcctgaatacagagtcagtctagccgtcagttacctgttcaggttcctgtcttcccttgctaatggcttggatgataagcctgaaaatgctaataatgttcccaatggttcatgtactactaatggaaccaccaacggtagcgctgagtcgacggttgacagctttgatttgccaataaaatcaagacaagagatggttttctctgatgaatacaaaccagtcggaaaaccaatcaagaaagtcggggcagagctccaagcttctggggaggcagtgtatgttgatgacatccctgctccaaaggattgcctctatggagcatttatctacagcacacaccctcacgctcacataaaaggtgtaaactttagatcatctttggcttcacagaaggttatcacagttatcactgcaaaggacattccgaccggtggagaaaatgttggatcctgcttcccaatgttaggagatgaagcactttttgctgatccagttgctgaattcgctggtcaaaatatcggcgttgtgattgcggaaacacaaaaatacgcctatatggcagcaaggcaagctgtgattgaatataatactgaaaatcttcagccaccaattctaacagtagaagacgctgtccagcataacagctacttccaagttcccccatttttacaacctaagccaattggtgacttcaaccaagccatgtctgaagccgatcacaagatcatagatggggaggattccccaggtaaccaaactgctttagctttccctgatgaagataactgtataaccgtctactgctcagcgcaaatgcctgaggttactcaagatattgttgcaaggtgcctcggcgttccatttcataatgtccgtattatcacgagaagagttggaggaggtttcggtggaaaggcaatgaaagcaacacatgttgcaactgcttgcgctgtggcagcattcaagctgcggcgcccagttcgaatgtacctcgatcgcaagacggacatgataatggcgggagggcggcatccgatgaaggccaagtactccgtcgggttcaagtccgacggcaagatcacggccctgcacctcgatctcaagatcaacgccgggatatcaccggaattcagcccggcgatcccgtacgccattgtcggggccctgaagaagtacagctggggcgctctcgcgttcgacatcaaggtctgcaagacgaacgtctcgtccaagtcggccatgcgtgctccgggcgacgcgcagggctcgttcatcgccgaggccatcgtcgagcacgttgcgtccacgctctccgtggccacgaacaccatcaggaggaagaacctccatgacttggagagcctcaaggtgttcttcggggacagcgccgccggcgaggcctcgacgtcgtcgtacagcctcgtcatcatcttcgacaggctggcctcgacgccggagtaccagcggagggccgccatggtggagcaattcaacggcagcagcaggtggaagaagcgtggcatttcttgcgtgccgatcacctactcggtgacgctccggccgtctccggggaaggtctccatcttgaacgacggctccatcgccgtcgaggtcggcggcgtcgagatcgggcagggcctgtggaccaaggtgaagcagatgaccgccttcgcgctgggccagctgtgcgatgacggcggcgagggcctcctcgacaatgtccgtgttatccaggctgaaaccctgagcatgatccagggaagatga

SEQ ID NO: 3224 - DNA, 2370 bp, Oryza sativa
atgccactacggacacggtgtcacccggccaaacactggccggcsgtkaacaggcttatctccaacaacagcaagttcgctctcggcttcttcaagatggacagtaagaactcctcctacaccagccgcaactcttacctttgcatatggtacaacaagctccccatgataactccactgtggtccgccaatggcgaaaacccagtggtggaccccgcttcaccggagctaacaatatccggcgacggaaacatggtcatcatggaccaggctaccaagtccatcatatggtctacccgtgttaacaccacaaccaacggcaccgttgttgtgctgttgaacgatggtaatcttgtgctgcagagttcatcaaactcatccatggttttctggcagagctttgactacccaacagatagcctttttgccgatgcgaagatcggctggaacaaggtgactggcctgaaccgccgccttgtttctaggaagaattcaattgaccaggctgctggtttgtactctttggaatttgatatcaatggtgttggtcatttggtatggaactcaactgtaacatattggtccagtggggattggaatgggcaattttttggctcagcaccagagatgtttggtgccaccatacccaatttcacatttgtcaacaatgacagagaggtttacctcacatatactctgaacaatgagaaggcaattacgcatgccgcaatagatgtcaatgggcaaagtttggcaggtgtatggttggacagcttgcaggattggttgatcaattacaggatgcccttacttcattgcgatgtttacgcaatctgtggaccttttacagtctgcaatgacaacaatgatccgttctgcgactgtatgaagggcttctctataagatcacccaaggattgggagatagaagatcgaacaggagggtgtatgaggaatactccattaaattgtggtagtactatgaacaagacaggtttcagcgataagttctactatgtgcaaaacattatattgccccgtaatgccatgcatgtgcaggaagctgcaagtaaagatgaatgctcagatgtttgcttgagcaactgctcctgtactgcatattcctatgggaaaggtggatgctctgtttggcatgatgagctgtataacgtaaggcaacagtctgatgcttctgctgtcggaaatggtgataacttttacattcgccttgctgcaaatgaggtgcatgaggtgcaaagtgcggaaaggaagaaaaagagtggagtcatcattggtgttgccattggtgcaagcactgctgctttctgtttgatgatccttctactgatgttttggaggagaaaagggaaactgtttgctcgcggagcggaaaatgatcaaggcagcattggtattactgcatttcgatatattgatctgcagcgtgcaactaaaaacttttcagaaaagttgggaggaggcagttttggttctgtatttaagggatacctaaatgagtcaactcccattgcagcgaaaaggcttgacggcacatgccaaggggagaaacaattcagagccgaagtggattcaattggaatgatccagcacatcaatttagttaaattgattgggctttgttgtgaaggtgataagaagttacttgtgtatgaatacatgccaaatggctcccttgatgtgcaactatttaaggataatgataaagttttggattggaatcttagataccaaatagctattggagttgctagaggccttgcctacttgcatgatagctgtcgagattgcattatacattgtgatatcaagccagagaacatacttctcaatgaatctttcgttcctaaaattgctgattttggaatggcaaagattttggggagagaatttagtcatgctctgactacaatgagaggaacgattggatatcttgcccctgaatggattagcggaacagttgttacagctaaagttgatgtttacagctatggaatggttttgtttgaaatcttatcaggaaggaggaactcaagtcaagaatatttcaaggatggtgaccattcggcctattttccaatgcaagtcgcccgccagcttatcaatggagggattggaaatctggtggatgcaaaattgcatggtgatgtgaatctcgaggaggctgaaagagtttgcaaaattgcatgttggtgtattcaagacagtgagtttgatcgaccaacaatgggcgaggtggtgcaattcctagagggtgtactagaactcaaaatgccaccattgccaagactactgaatgctatcacaggaggctcacattcaacaccactgtcatctttagatttaccgtaa

SEQ ID NO: 3225 - DNA, 1527 bp, Oryza sativa
atggacttgaagagggttttggaggtggaggaagaggtggtcgacggcgacgaggacgagctcgcctccccggaggccaagcgccggcgaactttcatcaataatagctcgatgcaggaggccattggcgcgcagtacatgcagaggcatctgcccaagctggagccgtttctgcgcagagttgtgcaggaagaggtgcagaatgttcttatccgccacattgattcggcacacaggcttccccttcagctaaagacaagcagtaaacgatacaagctgcagttccagggcaacctgcctctgaccctcttcacaggcaacagagtggaaggggagaacaagcagcctctccgaattgttctcaccgacgctgtcagtaaccagacgatcacctccggcccgctgtcctccatgaaggttgagctcctcgttcttgatggcgatttcaacgctgacgagcgcttggagtacaccgagaaggagttcagcgagagcatagtctttgaaagggaaggcaagaggccactgttatccggcgaggtgatcattgtgcttgagaaaggtgttgcatctatccgcgacatttctttcacggacaactctagctggataaggagcaggaagttcagacttggtgcgaggatctctcgggccagctccatcgaagaaagagtgcaggaagctgtcagcaatccttttctcgtgaaggatcaccgtggggaagtttacaagaagcatcatcctcctgcactagctgatgacgtttggcgtttggagaaaattgggaaagacggcgttttccacaagaagcttgcagactttggaattcacactgttcaagacttcctccggaacttggtgatggatcaatatggactacgtagtttacttggcagtggaatgtcaaacaagatgtgggaagcaaccgttgagcatgcacgggagtgcgttctggacgacaagctttactcctactgcagcgggcatgggataatccttctcttcaactgcatccatgaggttgtcggtgtgatcgttggaagccactgcttcactctgaatgctcttactccaacacagaaggcgctggtggtgaagttgcagcaagacgcctacaagttccccaaccgcatagtggaattcaaggtgcagtcccagtgcaccagccagtcatcaccaaccaccatccagtcccagtccgtgcagatgccggcttcagagaacgcacagattctgaacctacctcaaggtgcccattgctttccatcaggtgagctgccgagctcttcacaggactgcttgctgaatccgctccagtaccagccgctcaacgaggcgctggaagacgtcctccagacagccggcggcagccaccaccaacaccagggtggtagcggcgagctgccatggatagcgtcgtcgttcggagcgggcggcttcgtcgacgcgagggaccctttcgacgtgcagttcagcggctcccagccgtgcgggctgctgctctccagcagcggcgccagattgtga

SEQ ID NO: 3226 - DNA, 2016 bp, Oryza sativa
atggcggggtgtattgttgttgtatttggggttctggtgctggtcgcggggatggcggcggcgcaggggcaggtgccgtcgccgacccccgcggcggcggcggcggcaccggcgcccacgccggactgcaacggcatcctgctcacctacaacttcgagggccgcgccaagatccggccctacgtggcggacaggaacaagcagccctactcgttcagggccaacgccaccgtgctcaactccgggacgcgcccgctcaagtcgtgggcgatgctcgtgacgttcgggtacggggagatcctcgtcggcgtcgatggcgccgtgctcaccggcggcggcgagatgccgtacaacaccacccaggacgccggcaacgcgacgtcgttctccggctacccgcagaccgacctcctmaccccgatcgcmaccgcgggggacatctcgcagatccaggccaaggtcggcatcgtcggcacgctcttcgccgggccagggccgttcgtgccgctccccacggcgctgtcgctcgacgacccggcgtacaggtgcccccaggagaccaatgtttcctccggggtgctctccacctgctgcgtcctmaccccggaggcggaggccaacgccaccgtcatcaacgccaacgccaccgacccgaccaagaacttcctcccccgcggcaccggcgacctcgtcatcacctacgacgtgctccaggcctacccctcgagctacctcgcgctcgtcacgctcgacaacaacgccaagctcggccgcctcgacaactggcggctttcctgggagtggcggcgcggcgagttcatctactcgatgaagggtgcgtacccatcggagaaggacacgaccggctgcatctatggggcggcagggcagtactatcagagccttgatttctcccaggtgctcaactgcgacaagaagccggtgatccttgacctgcctctgtccaggtacaatgacactcagattgggaagattgaccattgctgcaggaatggcacaatcctgccgaagtccatggatgagacgcagtcaaaatcagccttccaattgcaggtgttcaagatgccaccggacctgaaccggacaaagctcttcccaccggccaatttcaagatcgccggtgcatcatcactgaacccagactacacctgtggccagccggtgcccgtcagtcccacagagttccctgatccaagcgggcttgattcaacgactctggcgatcgcgacatggcaggtggtttgcaacattaccacgagtaagggggcgaagccgaagtgctgtgtaaccttctcggcatactacaatgattcagtgatcccctgcaacacctgcgcctgtgggtgtccgtcgaaccagcggggtcctacttgcagcacgactgctcaatccatgctcctgccacccgaggcgctgcttgtgccattcgacaatcgcacacagaaggcattggcatgggccgagttgaagcactacaatgtgcctaagccaatgccttgtggtgattactgtggcgtgagcatcaattggcacatatctacagactacaacaagggctggagcgctcggatgacattgttcaattgggacaatgtcgacttggcaaactggtttgctgctattgtcatggacaaggcttatgatggttttgagaaggcgtactctttcaatagcacatcagttggcaagaacaccatcttcatgcaaggtcttgaggggctcaattacctggtgaagcagaccaacatgagtggatcagactaccttgtgcctgggaagcagcagtcagtgctctcattcaccaagaagctgactcctggcatcaatgttgttgctggagatggtttcccttcaaaggtcttcttcaacggcgacgagtgtgcaatgcctcagaggattccaatgagcaatagtggattcaggacccatctcagcagtgtcctctcactggttttggtcctggctgcttcggccttcgtattgcttcagcaataa

SEQ ID NO: 3227 - DNA, 1107 bp, Oryza sativa
atgctgtgggcggcgcgggtgtccgggttcttctccgccgccatggtgatggtggtgctgtccccgtcgctgcagtccttcccgcccgccgaggccatccggtcgtcgcagtttgacagccacgtccgcttccctggccagatcgcggggggcgccaggggcctcgccttccgtcgcgcccccgcgttccgcaatgccgctgactgcggcaacgccaccggcaatgtctgcgacccatcgctcgtccacatcgcgattacgctggacgaggagtacctcaggggctccgtcgccgcggtccactccgtcgtgcagcacgccacgtgccccgagagcgtcttcttccacttcctcgtctccgacccggcgctcggcgacctcgtccgcgccgtgttcccgcagctccagttcaaggtctactacttcgaccccgaccgcgtccgcggcctcatctccacgtcggtgaggcaggccctggagcagccgctcaactacgcccgcaactatctggccgatctcctcgagccctgcgtgcgccgggtcatctacctcgactccgacctcgtcgtcgtcgacgatgtcgccaagctctggcgcaccgacctcggcggccgcaccgtcggcgcgccggagtactgccacgcgaacttcaccaagtacttcaccgacaggttctggtcggacaagcagttcgccgggacgttcgcggggcgccggccgtgctacttcaacacgggcgtcatggtgctcgacctcgccaggtggcggcggacgggctacacgcggcgcatcgagcggtggatggagatacagaagtcgccggcggggcgcatctacgagctcgggtcgttgccgcccttcctgctggtgttcgcggggcacgtggcgccgatcgagcaccggtggaaccagcacggcctcggcggcgacaacgtgttcggcagctgccgcgacctccacccggggccggtgagcctgctgcattggtccggatccggcaagccgtgggcgcggctcggcgccgggcggccgtgcccgctcgacgcgctctgggcgccgttcgacctgtacggcccggccgactccgccgcggaagggtcccggtaa

SEQ ID NO: 3228 - DNA, 810 bp, Oryza sativa
atgtcgagcgcgtcgtccatggaagcgctccacgccgcggtgctcaaggaggagcagcagcagcacgaggtggaggaggcgacggtcgtgacgagcagcagcgccacgagcggggaggagggcggacacctgccgcaggggtgggcgaagcggaagcggtcgcgccgccagcgatcggaggaggagaacctcgcgctctgcctcctcatgctcgcccgcggcggccaccaccgcgtccaggcgccgcctcsgctctsggcttcggcgcccccgccggcaggtgcggagttcaagtgctccgtctgcggcaagtccttcagctcctaccaggcgctcggcggccacaagacgagccaccgggtcaagctgccgactccgcccgcagttcccgtcttggctccggcccccgtcgccgccttgctgccttccgccgaggaccgcgagccagccacgtcatccaccgccgcgtcctccgacggcatgaccaacagagtccacaggtgttccatctgccagaaggagttccccaccgggcaggcgctcggcgggcacaagaggaagcactacgacggtggcgtaggcgccggcgccggcgcatcttcaaccgagctcctggccacggtggccgccgagtccgaggtgggaagctccggcaacggccagtccgccacccgggcgttcgacctcaacctcccggccgtgccggagttcgtgtggcggccgtgctccaagggcaagaagatgtgggacgaggaggaggaggtccagagccccctcgccttcaagaagccccggcttctcaccgcgtaa

SEQ ID NO: 3229 - DNA, 933 bp, Oryza sativa
atgaacacttttacacttttcagggatgaggtgcagaaagcttcagagaaggttcatcggcatcacgcgaacgacgacgaggccgggttattcctgtcacttgggcttagcctcggatcgtctcctgatgcgtgccagtgccacgccagcaagaaagacgaagcggacgccggcaacggcggcggcgacgggtacctcgccctcgcgctgcgttgcgcccccgccgccggcgagccaatggtgcatcccaagaggcagagggccaccaccaacagcagcagtagcagcagcatctgcggcgaatacgggggcggcgccgccgcggccgccgtgccggcgggccacgacgacgacgaccggtcttgcatgatcacggctgcgtcgacggcgaatcggcctggccgggtcgtactcagaacacgatgcagcgcacccacggtgaaggacggttgtcaatggcgcaagtacgggcagaagacggcgaagggcaacccgtggccgcggggctactaccggtgcaccggcgcgccggggtgccccgtgaagaagcaggtgcagcgctgcaaccacgacacctccgtcctcgtcaccacctacgatggcgtccacaaccaccccatcacgccctacgccgccgcgctccctccgtcgtcgtcgtcctcctcatcggcggcggtagccatgctcgcctcctcctcgtcgtcttcgacgtggtcggagcttcagcgcgcgatgccggcggcgcagtcgtcatggagccagagaaactaccctattcaggcagatgtcgtggcgaaggcgatctgggaccccaagttccaggcgacggtggcggccgccgtcgcgagctacgtccgtgaccgtgagcagagcgcgcgcgttgccggtgggaagggtgccggagagctcttcaacttggctcctccatgctga

SEQ ID NO: 3230 - DNA, 740 bp, Oryza sativa
atgcagatctttgtgaagaccctcaccggcaagaccatcaccctcgaggttgagtcctcggacaccattgacaatgtcaaggccaagatccaggacaaggagggcatccccccggaccagcagcgtctcatcttcgctggcaagcagcttgaggatggccgcaccctggccgactacaacatccagaaggagtctaccctccaccttgtgctcaggctcaggggaggcatgcagatcttcgtcaagaccttgactggcaagaccatcacccttgaggtcgagtcgtctgacaccattgacaatgtcaaggccaagatccaggacaaggagggcatccccccggaccagcagcgtctcatcttcgccggcaagcagctggaggatggccgcacccttgctgactacaacatccagaaggagtccaccctccaccttgtgctcaggctcaggggaggtatgcagatcttcgtcaagaccctgaccggcaagaccatcaccctcgaggtcgagtcctcggacacgatcgacaacgtgaaggccaagatccaggacaaggagggcatccccccggaccagcagcgtctcatcttcgccggcaagcagctggaggacggccgcacccttgccgactacaacatccagaaggaatccaccctccaccttgtgcttaggctcagkgatcaaacccttctgattgcagattgcttggctatggctgatgtgctcactgttcttcttta

SEQ ID NO: 3231 - DNA, 1146 bp, Oryza sativa
atgagggagacgggcgcgacggatgaggggcacgcgtgcgaagttgtagtagccggaggtgacggcaaggccgcggcggcacgccggcgccgacgtctcgagctccggcggctcgggctggcggcggaggatgatgcggcggcgaagagaatccggtcggtgaaggacgggtcgtcgtctgatgactcgtcgacggaggttgttccccggagctggccggcgtgcgtgtcgcacggctcggtgtcggtgatcgggcggcggagggagatggaggacgcggtggccatcgagcggacgttcatggcttcgacgggggatggtgcgggcgctatcaggggcggcggggagggcgaggaggacttcttcgcggtgtacgacggccacggcgggtcgcgggtggcggaggcgtgcaggaagcggatgcacgttgtgctcgcggaggaggtgagcctgcggcggctgcgggggcaaagcgcgtcgggcggcgacgtgcgctggaaggaggcgatgttggccagcttcgcgaggatggacggcgaggtcgtcgggagcgtcgccgccgccgccccccgcgtcgacggcaccgagccgtcggggttcaggacggtgggctccaccgccgtggtcgccgtcgtgggacgccgccgcatcgtcgttgccaactgcggcgactcgcgcgccgtgctctcccgcggtggcgtcgcgctgccactctccactgaccacaagccagatcggcctgacgagttggaacgagtggaagcagctggaggcagagtcatcaactggaacggttaccgtgtccttggtgttttagccacttctagatccataggcgactactacctgaagccgttcgtgagcgcagagccggaggtgagggtggtggagaggacggacaaggacgagttcctgatcctggcgagcgacgggctgtgggacgtggtgtccaacgaggtggcgtgcaagatcgccaggaactgcctcaacggccgcgcggcctccatgttcccggagtccgtctccggcagctcggccgccgacgccgcggcgctcctcgccgagctcgccgtctcgcgcggcagcagggacaacatcagcgtcgtcgtcgtcgagctcaggcggctcaagagcagggcagcttga

SEQ ID NO: 3232 - DNA, 834 bp, Oryza sativa
atggccggaggaggagatgagctgaagctgctggggatgtgggcgagcccgttcgcgctgcgagcgaagctcgcgctcagcttcaagggcctgagctacgactacgtcgaggaggacttcaagaacaagagcgagctgctcctcagctccaacccggtgcacaagaaggttcccgtgctcatccacaacggcaagcccatctgcgagtcgcaggtcatcgtacagtacatcgacgaggtgttccccgacgccggcgtcaccctcctccccgccgacccccacgatcgcgccgtcgctcgcttctgggcctcctacatcgacgaaaagctgttcggtgcgtggattccggtgttcagaggcaagacggaggaggagaaggcggagggggtgaagcaaacgttcgcggtggcggagaaactggagggagcactgagcgagtgctgcaaggggaagcccttcttcggcggcgacaccgtcggctacgtcgacgtcgtgctcggaggcttcgtcgcgtgggtgcacgccatcgaagaggtgttcggcctgaaccagttcgacgccgccaagacgccgctcctggcggcgtggttggagcgcttcgacgagctcgacgccgccaaggaggccatgccggacatcggcaggctggtcgagctcgagaagatgaggcaggcacaggcacaggcggcgtttttggctgtacgcctgtacctcttattgtttctgcaaccgtgtttcatcagttcatgttgccgcaccgtgtatgtttctccatgtgtcgctgaagttgccaactgggtattctacaacgtgttacgtccatattgtttatag

SEQ ID NO: 3233 - DNA, 840 bp, Oryza sativa
atggggcagcagtcgctgatctacgcgttcgtggcgaggggcacggtggtgctcgccgagtacacggagttcaccggcaacttcaccaccatcgcggcgcagtgcctccagaagctccccgcgagcaacaacaagttcacctacaactgcgacggccacaccttcaactacctcgtcgaggacggattcagctctaaccgcatcggcatactggggattcagggattagcatactgtgtagttgctgttgaatcagttgggcgacaaatccccattgctttccttgacagagtcaaggaagatttcaccaaaagatatggtggtgggaaagcagctactgctgcagcaaacagcctcaaccgagaattcggatcaaaacttaaggagcacatgcagtattgtgtggaccaccctgaggaaatcagcaagcttgcaaaggtcaaagcacaagtctcagaggtcaaaggagttatgatggaaaacattgagaaggttcttgaccgtggtgagaagattgaactgcttgtcgacaagactgaaaacctgagatctcagaactcaggaatctttatacaatggattgctatggagaaattactgatacatgttagtgtagatcgcatgagagtatggagtatggtaatgaagtaccgcattatggttccaaaggtgatctggcttactgttgatatggcacaagatttcagacagcagggtacaaaggtgcggcgaaagatgtggttacaaaacatgaagatcaagctgatcgtcctgggcatcatcatcgcgctcatcctcatcatcatcctgtccgtgtgccatggcttcaagtgcaagtga

SEQ ID NO: 3234 - DNA, 710 bp, Oryza sativa
atggcgccgagaacgtcggacaagactatgtcaccggcggccgcggccaccggactcgcgcttggcgtgggcggtgtcgccggagccgccgccgtgggcaccggccagcacttccgtggcgtgaggaagcggccgtggggccgttacgcggcggagatccgcgacccggccaagaagagccgcgtgtggctcggcacgttcgacacggccgaggaggccgcgcgcgcctacgacgccgcggcgcgcgagtaccgcggtgccaaggccaagaccaacttcccctaccctaacggcgcgcccgccgccggtgtgaacagcggcagcagcaacagcagcaccgtcgagtcgttcggcagcgacgtgcaggcgcccatgaaggccatgccgatcccgccgtcgctcgagctcgacctgttccaccgsgccgcagcggccgcggccgccggcgcaggcggcatgcgtttccctttcgagggctaccccgtatcgcacccttactacttctttggacaagcggccgccgccgccgccgcctctggttgccgcatgctcaagattgcgccggcgccggtcaccgtggccgccttggcacagagcgactccgactcctcgtcgatcgtggatctggcaccatcaccgcccgccgcgttggcgaagaaagccatcgcttttgatcttgatctgaactgtccgccgccgatggaggtcta

SEQ ID NO: 3235 - DNA, 1557 bp, Oryza sativa
atggccggcggcgccatgccgctggtcgtgctgctccttgccaccatcccgctcctgttcttcaccatcaagcgctcggcgcagcgtcgtggcggctgcggcggcggcgaggggaggctcccgccggggccgtgggcgctgcctgtcatcggccacctgcaccacctcgccggcgacctcccgcaccgcgccctgagcgccctggcgcggcgccacggcgcgctcatgctgctccgcctcggcgaggtccaggccgtggtcgcctcctccccggacgccgcccgcgatatcatgaggacccacgacgccgcgttcgcgtcgcggccgctgagcccgatgcagcagctcgcgtacggccgggacgccgagggcgtcatcttcgcgccctacggcracgggtggcgccacctccgcaagatctgcaccgccgagctcctcagcgcccgccgcgtccagtccttccgccccgtccgcgaggccgagctcggccgcctcctccgctccgtggccgaagccacctcgtcttcctcctccgcctcgctggtcaacctcaccgagctgatctccgccttcgtcgccgactccacggtgcgcgccatcatcggcagccggttcgagcaccgcgacgcatacctgcggatgctccaggacgggctcaagatcgtccccgggatgacgctgccggacctcttcccgtcctcccgcytcgcgctgttcctcagccgcgttcccggccggatcgagcaccaccgccaagggatgcaacggttcatcgacgccatcatcgtcgagcaccaggagaagcgcgccgccgccgccgccaacgacgacgacgacgaagacgaagacttcctcgacgtgctcttgaagctccaaaaggagatgggctcccaacacccgctcaccacggctaacatcaaaaccgtcatgctggacatgttcggcgccggcagcgagtcgtcggcgacggtgctgcagtggacgatggcggagctgatgcgaaacccaagggtcatgcagaaggcacaagatgaggtccggcgagcactcgccgggcatgacaaggtgacagagccaaacttgaccaacctaccctacctacgactagtcatcaaggagacactccggctacacccacccgcgccattgctactgccacgcaaatgcggaagcacgtgcaagatacttggatttgacgtacctgagggggtcatggtgatcgtgaacgcgtgggcgattggtagggacctgacgtattgggataagcctgaggagttcgtgcctgagaggtttgaacacaacgggagggatttcaagggaatggacttcgagttcataccgtttggagctggacgaaggatatgccctggcatcacattcgggatggcgcatgttgagcttgttctctctgcacttctgtaccactttgactgggagcttccacaagggatggcggcaaaggatctagacatgacagaggattttggagtcacaacacaacggcggtctaacctcttggtgcgtccaatccatcgtgtatcggttccagtagagtaa

SEQ ID NO: 3236 - DNA, 1605 bp, Oryza sativa
atggccaccgagctcactgagtacttgctgctcctgccgcttctcgtcgtaccgctcctctacctcgcggcgtcgtcgtcgcggaggtcggggaggctgcggctgccgccggggccgtgggcgctgccggtgatcggccacctgcaccacctcgccctcgccggcgcgcccacgcaccgcgccatgcgcgacatggcgcggcgccacggcccgctcatgctgctccgcttctgcgagctccccgtggtggtggcctcctcgccggacgccgcccgcgagatcatgaggacgcacgacgtcgcgttcgcgtcgcggccgatcgggccgatgctgcggctcgtgttccagggcgccgagggcgtgatcttcgcgccctacggcgacgggtggaggcagctccgcaagatctgcaccgtcgagctcctcagccaccgccgcgtccactccttccgccccgtccgcgcggacgagctcggccgcctcctccgcgccgtggcggatcaggccgcgtcgtcgtcgtcctcgccggtgaacctcaccgggatgatctccgccttcgtcgcggactccacggtgcgcgccatcatcggcagccggagcaggcaccgcgacacgttcctgcggctagtggaggacgggctcaagatcatgccggggatgagcttgccggacctgttcccctcgtcgcgcctcgccatgctcctcagccgcgtgcccgccaagatcgagcgccgccgccgcggcatgatgggcttcatcgacaccatcatccaggaacaccaggagagcagagccgccgccgaagacgaggaccttctcgacgtgctcttgaggctccagaaagacatggactcccagtatcccctcaccaccatgaacatcaaatccatcttgatcgtaagtttcttccccgaatccggtaatttcccctcgtcaaaaacgaaatctcttcatgtaattcgctcgaatccaggaatkttcggcgcgggcagcaagacgtcagcgacgacgctgcagtgggcgatggcggagctgatgcgtaacccggcggtgatgcgccgggcgcaggacgaggtgcggcgagagctcgccgtcgccggcaacgacagggtaaccgaggacaccctcccgagcctccactacctccggctggtcatcaaggagacgctccggctccacccgccggcgccgctgctcctgccgcgggagtgcggcggcgcgtgcaaggtgttcggctacgacgtgccggccggcacgatggtgctcgtgaacgcgtgggcgatcggccgggacgcggcggcgtggggcgccgcggcggaggagttctcgccggagaggttcgagcggtgcgagagggacttcaggggggcggacttcgagctcatcccgttcggcgccgggaggaggatctgccccggcatggcgttcgggctggcgcacgtcgagctcgcgctcgccgcgctgctgttccacttcgactggaggctgccgggagggatggccgccggcgagatggacatgacggaggcggccgggatcacggtgcgccgccgttcggacctactggtgttcgccgtgccccgtgtccccgtgccagcgcagtag

SEQ ID NO: 3237 - DNA, 1452 bp, Oryza sativa
atggggagcacggggcgcgacgcggaggtgacccgcggcgacttccccgacggcttcgtcttcggcgtcgcmacctccgcttaccagattgaaggggcgagacgggagggaggcaaaggagataacatatgggatgttttcacagaaaacaaagaacgtatcttagatgggagcagtggagaagttgcagttgatcattaccatcgatacaaggaagacattgaactcatggccagtttgggtttccgtgcttatagattttctatatcttggccacgcatatttcctgatggcctggggaaaaatgtcaatgagcaaggagttgccttttataatgaccttataaatttcatgattgagaaaggtattgagccatacgcaactctgtatcattgggatcttccacataatcttcagcagactgtgggtggttggctttctgataagatcgtggagtactttgcactgtatgcagaagcttgctttgcaaattttggagacagagtaaagcattggataacaatcaatgagcctcttcaaactgcagttaatggttacggaattggacattttgcacctggaggatgtgaaggggaaactgctagatgctacttggccgcccactaccaaatcttggctcatgctgctgctgttgatgtttacagaaggaaatttaaggctgtgcaaggtggtgaagtaggcttggttgtcgattgtgaatgggcagagccattttcagagaaaacagaagatcaggttgctgcagaacgaaggcttgactttcagctaggatggtacctggacccaatatatttcggtgattacccagaaagtatgcgtcagcgactgggcgatgatcttccaaccttctcggagaaagataaagaatttatcaggaacaaaattgactttgttggaataaatcattatacttcaagattcattgctcatcatcaggatccagaagatatttatttttaccgagtacaacaagtggagagaatagaaaaatggaacactggtgaaaaaattggtgaaagggccgcatctgagtggcttttcatagttccttggggcctccggaaattacttaattatgcagcaaagagatatggaaatcctgtgatatatgtaactgagaatggcatggatgaggaagatgatcaatcggcaacgcttgaccaagtcttgaatgatacgacgagggttggttacttcaaaggatacctcgcgtcagttgcacaagcaatcaaggatggtgctgatgttcgtgggtacttcgcatggtcgttcctggacaacttcgagtgggctatgggatacaccaagaggtttggcattgtttatgttgattacaaaaatgggctttcccggcatcccaaagcatcggcccggtggttctcgcgcttcttaaagggcgatgacgctgagaacaaagctgacatgaactag

SEQ ID NO: 3238 - DNA, 1269 bp, Oryza sativa
atggtggaaggccccaagttcgccggcatgatgggcggcgtcgtcggcggcgccggcggccatgacgacattggtgggaatttctgcgacatggcgtactaccggaagctcggggagagctccaacatgtcgatcgatagcctcaatagcctgcagaccagcacgcatggcggtggctccgtggcaatgtcggtggataacagcagcgtcgggtctagtgattcccacaccaggatgctcaaccacccgggcctcagggggcatktcgcagccaattactcggttgggcacagcattttccgccccgggcgggtgtcgcatgcgttgaktgaggatgcgcttgcacgggcactgatggacccgaggtacccgactgagacgctcaaggattacgaggagtggacgatcgatttgggtaagctccacatggggatgccctttgcacagggtgcatttgggaagctatacaagggcacctacaatggggaggatgttgccatcaagcttttggagaggccagaggcggatccggagagagccgggctaatggaacaacagtttgtgcaagaagttatgatgcttgcaactttgaggcatcccaacatagttaaatttattggggcatgcaggaagccgatggtttggtgcattgtgacagagtatgcaaagggtggctcagttaggcagtttctgatgaagaggcagaacaggtcagttccattaaagcttgctgtgaagcaagccttggatgttgcaaggggcatggcctacgtccatgctcttgggttcattcatagggacctcaagtcagataatctcttgatttctggcgataaatcgattaagatagcagactttggagttgccaggattgaagtcaaaaccgaggggatgacacctgaaacaggaacctatcgttggatggccccagaaatgattcagcacaggccatatgaccagaaagtagatgtctatagctttggcattgttctatgggagctcattactggcatgctccctttcgctaacatgacagcagtacaagctgcatttgctgtggtgaacaagggtgtccgtccagccataccacaggactgcttgcctgttctcagtgagatcatgacaaggtgctgggatccaaaccctgatgttcgccctccattcaccgaagtagttaggatgctggagcatgctgaggtggtgatcctgagcacagtccgcaaggcccgatttcggtgctgcatctcccaaccgatgacaactgattga

SEQ ID NO: 3239 - DNA, 1644 bp, Oryza sativa
atggcgtccgggagcagcggcggcggctacgcggacgagaaggggccgggggcggcgacgatgcaggcgctggggctgcagcagcagcacggcggcggcggagaggtggaagaggagtcgtcggagatgggggagaagacggcggcgaggacgcggctgtcggggctgctgtggcacggggggtcggcgtacgacgcgtggttcagctgcgcgtcgaaccaggtggcgcaggtgctgctgacgctgccctactcgttcgcgcagctgggcatggccagcggcctcctcttccagctcttctacggcctcctcggcagctggaccgcctacctcatcagcatcctctacctcgagtaccgcacccgcaaggagcgcgacaaggtcgacttccgcaaccacgtcatccagtggtttgaggtgctggatgggctactggggaggcactggaggaatgtgggactggccttcaactgcacgtttttgctgttcgggtcggtgatccaactgatcgggtgtgccagcaacatctactacatcaacgaccatctggacaagcggacatggacgtacatcttcggcgcctgctgcgccaccaccgtcttcatcccgtcattccacaactaccgcatttggtccttcctcggcctcctcatgaccacctacaccgcctggtacatcgccgtcgcctccctcatccacggacaggtggagggtgtggcgcactctgggcccacaagcatcgtgctctacttcacgggggccaccaacatcctctacaccttcgggggccacgctgtcaccgtggagataatgcacgcgatgtggcggccgcagaagttcaaggcgatctacctgctggcgacggtgtacgtgctgacgctgacgctgccgtcggcgtcggcggcgtactgggcgttcggggacgcgctgctgacgcactcgaacgcgctggcgctgctgccgcggacgccgtggcgcgacgccgcggtggtgctcatgctcatccaccagttcatcaccttcggcttcgcctgcaccccgctctacttcgtctgggagaagctcgtcggcctccacggctgcccctccctctgcaagcgcgccgccgcccgcctccccgtcgtcctccccatctggttcctcgccatcatcttccccttcttcggccccatcaaatccgccgtcggctccctcctcgtcagcttcaccgtctacatcatcccctccctcgcctacatggtcaccttccgctccccgcaatcccgccagaacgcggtggagcggccgccgaggttcgccggaggatggacgggggcgtacgtgataaactcgttcgtggtggcgtgggtgctggtggtcggcttcggcttcggcgggtgggcgagcatcaccaacttcgtccaccaggtcgacaccttcggcctcttcgccaagtgctaccagtgcccgcctcaccccgccgccgccgccctctcgccgccgggtgccatcgctccggcgccggcctcgatgctgccgccgttcaactccaccgccgccggcatctttgccgctccggtgccgtctcctgctccggctccggcaccgatgcatttcgtccttggtcaccaccaccatcaccggcaccaccgccacggcctctag

SEQ ID NO: 3240 - DNA, 978 bp, Oryza sativa
atggcggcggcggcgggtggcatgagttcgaggtcgtcgtcattgctggccatggtgttcgtcgccgtcgcggtgctcgcgcgggcgcaggatgagcgcgcggcgacgttcaccatcaccaacaactgcgcctacacggtgtggccggggctgctgtccagcgcggggtcggcgccgctgtccacgacggggttcgcgctcgcgccgggggcgtcgcaggcggtcccggcgccgtcggggtggtcgggccgcatgtgggggcgcacgctctgcgccgccgacggcgccggggcgaagttctcctgcgccaccggcgactgcggctccggcgacgtgcagtgcaacggcggcggcgccgcgccgccggccacgctggccgagttcaccctcgacggcagcggcggcctcgacttcttcgacgtcagcctcgtcgacggctacaaccttcccatgctcgtcacccccagcgccacctccggctccggcaagtgcgcggcgacggggtgcgtggcggagctgaacggcgcgtgcccggccgacctgcgcgtggcgtcggcgtcggggccggcggtggcgtgccggagcgcgtgcgaggcgttcgggtcggcggagtactgctgcagcggcgcgtacgggaacccgaacacgtgccggccgtcggcgtactcggagttcttcaaggcggcgtgccctcgcgcctacagctacgcctacgacgactccacctccaccttcacctgcgccgccggcgccacagactacgccatcaccttctgccccgccgctcccaccagcgtgaagtcgtcggggcagaacccgcaggccgccgggctgcagcagctcaacgacaccatggtctacttcggcggcggcggcggaagcccgcaatccagcggcgcgacgaccacttcggcttactcctccattgccgccgccgtattctcggtcgccgccgtcgctctcgccgctctgctttga

SEQ ID NO: 3241 - DNA, 1770 bp, Oryza sativa
atggggaactgctgccgctcgccggccgccgcggcgcgggaggacgtcaagtcgtctcacttccccgcatcggccgggaagaagaagccccaccaggcgcggaacggcggcgtggggggaggcggcggcgggggcggcggcggcggaggaggaggaggagcggggcagaagcggctccccgtgctcggggaggaagggtgcgagctgatcggagggatcgacgacaagtacgcgctggaccgggagctcgggcggggggagttcggggtgacgtacctgtgcatggatcgggacaccaaggagctgctcgcctgcaagtccatctccaagcggaagctgaggacggcggtcgacgtggaggacgtgcgccgggaggtcgccatcatgcgccacctccccaagagcgccagcatcgtgtcgctgcgggaggcgtgcgaggacgagggcgccgtgcacctcgtcatggagctctgcgaaggcggggagctcttcgaccgcatcgtcgcgcggggccactacacggagcgcgccgccgccaatgtcacccgcaccatcgtggaggtcgtccagctctgccaccgccacggcgttatccaccgggacctcaagcccgagaacttcctcttcgccaacaagaaggagaactcgccgctcaaggccatcgatttcggcctctccatcttcttcaagcccggtgagaagttttctgaaattgtgggaagcccatattacatggctccagaggtattgaagagaaactatggtccggaaatagatatttggagtgcaggagttatcttgtatattttgttatgtggagttcctccattttgggctgagactgagcaaggggtggcacaagccattcttcgtggaaatatcgatttcaaacgcgaaccctggccaaatgtttcagaaaatgctaaagatttggttcgacgcatgttggagcctgatccaaaactcaggttaactgcaaagcaagttcttgaacatccatggcttcaaaatgctaagaaagctccaaatgttcctcttggagatattgtgaagtcaaggctcaaacaattttctagaatgaatagattcaaaagaagagcactaagggtcattgccgatcatttatctgctgaggaagttgaggacataaaggagatgttcaaggctatggacactgataacgatggcattgtatcttatgaagaattaaagagcgggatagcaaaatttggttctcatctggcagaatcggaagtgcagatgcttatcgaagcttgttgcttaggtgtaggagctgaacctgcacttgtagattgtaggactaggaaactagctgcaataggagtggttttacttttcaccatatgtgtatcaagaaacttatgtgtagtggatacaaatggtaaggatgctctagattatggtgaatttttggctgtctctcttcatttgcaaaggatggcaaatgatgagcacctccggcgagccttcctattttttgacaaggatggcaatggctacatagagcctgaagagcttcgagaggctctagtggacgatggagcaggtgacagcatggaagtggtgaacgacatattgcaagaagttgacactgataaggatggcaagattagctatgacgaatttgtagcaatgatgaagacgggcacagattggagaaaggcgtcccggcattactctagaggaagattcaacagccttagcatgaagcttataaaggatgggtccgtaaaactggtcaatgagtga

SEQ ID NO: 3242 - DNA, 2565 bp, Oryza sativa
atggattggccagcttcagcttccacttgcatcgccatccttctcttcgttttcttgatttcatggccgtcactgtgcgcctccgacgaccggcttgccatcggcaagacgctgtctcccggcgcaaccctcgtctccgacggcggcgccttcgccatgggcttcttctcgccgtcgtccaactccactaatgctacctcgtcgggactttacctcggaatatggtacaacaacatccccaagctcaccgtcgtgtgggtcgccgaccaggcggcgcccatcgccgaccatccttcctccccggcctccacgctagccgttgccagcgacggcaacctggtcttgtccgatggcgccaccggccgcgtcctttggaggactaacgtcaccgccggcgtgaactcgtcggcgtcatcgggaggaggagtcggtgctgtggcggtgctcgccaactccggcaacctcgtgctccggctgccggacggcaccgccttgtgggaracgttcgagaaccccggcaacgcgttcctgcccggcatgaagatcggcgtcacctaccggacgcgcggcggcgtgcgactggtctcatggaagggcgccaccgacccgtcgccggggaacttctccttcggcggcgacccggaccggccgctgcaggtggtcatctggaaaggctcgcgcgtttactggcgctccaacccatggaagggctacatggtggtggacagcaactaccagaagggcggcaggtcggcgatctacaccgccgtcgtctccaccgacgaggagatctacgccgcgttcacactgtccgacggcgcgccgccgatgcagtacacgctgggctacgccggcgacctccgcctgcagagctggagcaccgagacgtcgtcgtgggccacgctcgccgagtaccccacccgcgcgtgcagcgcgttcggctcatgcggcccgttcggctactgcggcgacgtcacggccaccgcctcgacgtgctactgcctcccggggttcgagccggcgagcgccgccggctggagccgcggcgacttcacgctggggtgccggcggagggaggcggtgcggtgcggcgacgggttcgtggcggtggcgaacctgaagctgcccgactggtacctgcacgtgggcaaccggagctacgaggagtgcgcggcggagtgccgccggaactgctcctgcgtggcgtacgcctacgccaacctcaccgggagctccacgagggatgcgacgaggtgtttggtttggggcggcgacttggtggacatggagaaggtggtcgggacatggggtgacttcggtgagacgctctacctccggcttgcaggtgcaggtaggaagccaaggactagtgcactgagatttgcacttccaatagttttagcaagtgttcttatacccatatgcattttaatatgtgctcccaagatcaaagaaattatcaagaaaaaatatggggagaataacaagaggcgggccttgcgagttttgagcatttctgatgatcttgggcaggaaatcccagccaaagatcttgagtttccatttgttgaatatgacaagatcctagttgcaacagacaacttttctgaagcatctttgattggaaaaggaggttttggcaaagtttacaagggagtgttagatggccgggaagttgcagtcaaaagacttagcagttggtctgaacaaggaatagtggagttcagaaatgaggtggtcctaattgccaaactacagcacagaaaccttgttcgacttgtcggttgcagcatcgaaggagatgaaaagttgctgatttatgagtatatgcccaacaagagcttagatgcttctcttttcaagggtaaaagaaaatcagtgttggactggtccacacggttcaagatcgtcaaaggggttgcccgaggacttctttacctccatcaagattcaagattaacaattatccatagagatcttaaggcaagcaacattttgttggatgcagagatgaacccaaagatatcggattttggtatggcaaggattttcggcaacaaccagcaaaaggaagtcactaaacgagttgttggaacatatggctatatggctcctgaatatgctatgggaggtatcttttcaatgaagtccgatgtctacagcttcggcgttttacttctagagatagtaagcggttctaagataagctctattgatctcattgaggactccccaaatcttccagtctatgcatggaatctatggaatgaagggaaggcagacattatgatagactcaactatcactgcaaactgcttattggatgaagtcattctctgcatccatgtggccctcctgtgtgttcaggagaatctcaatgacaggccactcatgtcagatgttgtgctcatcttggagaaaggaagcaagtcactcccagctccaaatagaccggcttattttgcacaaaggaacaacaatgaagtagagcaagtaagaaatggtagccagggcgctcagaattctaacaacaacatgactctcacagatctagagggacgatga

SEQ ID NO: 3243 - DNA, 477 bp, Oryza sativa
atggccaccgccgcctcccgctccggccgccgacgcggcggcggagacgacgaagacgaccggacggcggcgatgcgacggctgcgcgtgctgtccctccacctgcaggatccgtccccctcgtcggaggcggggctggcgcccgcggcgtgcgcggcggcggggargcsgcsggcgacggggggagcggacgcggcggcggcgctggcsgcgtacctgagggggaggcaccgggacacgcaggcgcsggtgttcgagttcttcctctcgcggcccgacctccagacgcccgtcgagatgtccaccgccgcgcaccgggagctctgcttccggcagctgtgcgcgctggtgcgggaggccggggtgcgcccgctcagcctcatggcgaacgaccccgccgagtacttcgccgtcatggaggccgccggcggcgccgacatctccctcggcgtcaagctcggcgtccagtacaggtaa

SEQ ID NO: 3244 - DNA, 1440 bp, Oryza sativa
atgctgcggcgcgcggcgagcaacgcctactcgtggtggtgggcgagccacatccgcaccacccagtccaaatggctcgacaacaacgtccaagagatggagataagggtgaaggccatgatcaaactcatagatatagaggctgatacatttgcaaggaaggcagacctatacttcaagagcaggcccgatcttataaaccatgtagaggagacatatagatcttaccaggcgcttgctgatagatatgaccgggtatcaggggagcttcacaagtccaaccacaccatagcaactgcatttccggagcaagtccagctctctctgcaagatgacaatggtgatggtttcccaaaagaggaaccagcgcagctccaaagaggacgcaaacacattaaaaagatcagctctaagatgagtaaagacaaggcacaagaagagattgagaggctacagaagaaaatccytgtcttgcagactgaaaaggaattcttcaagagctcatatgaatcttcgctgaacaagtatttgarcattgaaagacaggcggcagagatgcaagaggaggtatggagcttgcaggagacttttagcaccagcgcagttattgaagacaatgaagctcgagctttaatggctgcacaagcccttatttcttgcgaggataaattggctagcttgcattgtgagcaaaagagatcatatgaagagacaaccatggagattcaaagagtcatagatgcaaagaagaagataacgattttcaagagcgagtgtgggtatcctgatgatcagaaggacctacctaatcaccaagacatagagttcagctctataccttcatctatagaggatagtgatctaattatgaaagactgcaagctcgagctgcaggaattatcacaaaaggtcaaacaaaagtttgagtcgtcctcagaggcgtccgcggtgcatctagccggacaggttgatgaaattgtggataaggtcatcagcctagaaattgcagcttcttcacaaaatgctcaaatcaatagaatgaaaaatgaggcagacgaactacagaagcgcctggatagcttagaggacgagaaggcagctttgattgaggattctagcaagttgtctgaaagattgaagcaagttgaggaggttctgcagacaattcagcggattggaaagtctgtgcacagtgagaatggaaatattcaccagcaactaactgaagtagatgacagtcttaatgattttgtaaagaagttggatgcacattccactgatgaaatagtaaattcatcacaagatgattccggaattgcatgcaaatcaaaagatgaaggattattggatgcattagatgactctagcaaggcacataaggaagagccagatgaaactttagggtggcaacaactagatttgaatgggctagagggataa

SEQ ID NO: 3245 - DNA, 1428 bp, Oryza sativa
atgaagctgtggatggtgcgcgccaccaccacggtgctcctctggacctgcgtcgtgcagctcaccgccgtcggcgacacctggggcccccgcgtgctcaagggctggccctcctgcatcacctcgcccgacgacgacgccgcctccgccacgctcgccgccgcccgcccggagcccgtcgtcgacaaggccgtgctaccgcccaaaagaatttataggaacaatggttatctgatggtctcatgtaatggtggacttaatcaaatgcgagctgcaatatgcgacatggttgtaattgcgagatatttgaatgtcactttggttgtgccagagttggataagacatcattttggaatgatccaagtgagttccaagatatattcgatgttgaacactttataacctctttaagagatgaagttcgcatattgagagaactgcctccaagggtaaaacgaagagttgaacatgggatgtaccactcaatgccaccaataagttggtctgatatctcctattaccataaccagattctccctttgatacggaagtacaaggttctccatttgaacagaactgatgctaggctagcaaacaatggtttacctatggagattcagaaactgcgttgccgagtaaactatgcctccttgagattcacttcgcaaattgaggagttgggaaagagagtaattaggatactccgccaaaatggccctttcttggttcttcacttacgttatgaaatggatatgctggctttctctggctgtacacaaggttgcagtaatgaagaagcagacgacctcacaagaatgaggtacgcttatccatggtggaaggagaaaattataaattcagaattgaaaagaaaggatggtctttgcccattgacgccagaggagactgcccttgtcctcagggcattggacatcgatagaagcatgcaaatatatattgcagctggagaaatatatggtggaaagcgcagaatgtctgctctcacttcagcgtatcctaatgtggtgaggaaagagacacttttggaaccttctgatctaatgttcttccagaaccactcatcacaaatggcagcactagattacttggtttctttggaaagtgacatctttgttcctacatatgatggcaatatggctaaagttgtcgagggtcatcggagatacatggggttcaagaagacaatcttgttagaccgaaaacttattgttgagctagtagatcaatacaacaacagttctttgcgatgggatgagttctctttaatgctcaaggctgcccatgcaaaccggatgggatcagcttcaaagaggacggtgattcttgacagacctaaggaagaggactatttttatgccaatccccaagaatgcctgcaagattctaatctcttacatacatcatga

SEQ ID NO: 3246 - DNA, 860 bp, Oryza sativa
atggcgatggtgcaggccggcatgggcctmacccgcgtcgttgtcctmatcggcgccgggatggccggctccgtcgtcctccgcaacggccgcctctccgagatcctcggcgagctccaggagatactggacaagggggagaaggggaaagacggagaaggggscgggggcgccgacatgacggacgcgctcactagacaggtgcgcaacttggctatggaggttaaacaacttgcttcttcccgtggatctataactgttcttaatggaggttctggtcaaacaggggtgtcaggtttgatagtacctgcagcaactgttggagcactcggttatggttacatgtggtggaagggcatctcctttgcggacctaatgtatgtgactaagcgtaacatggcaaatgctgtttccagtatgactaagcatctggagcaagtgcaaacctctcttgctgctgctaaaaggcatttgactcagcgtattgaaaggttggatgataaattggatcagcaaaaggcgctttctggacaaataagagatgatgttactgatgcacgactgaagcttgagaatattggttcagaaattaagaacatcaaacaattggtttggggtctggatgaaaaaatggattcgatggaagccaaacagaacttttcatgtgctggtgtgatgtacctctgccaatttattgagcaaaatggtggaaagctgccagaacgcctggaaggctcaaaaatggctgggaagcgttttggaagccaaaatctcatacaggggttgcaactggccatagaaacagggaattttgacaaggaaacgttcaatgcacttaagaacaactctgattcaagata

SEQ ID NO: 3247 - DNA, 789 bp, Oryza sativa
atggcgggcgtcgctcgcatgctcgcggccgtggtctgcgcgatcatgccggcggcggcgatggcggccggcggcgtgggcgcgctggagccgagcgggtgggtgagggcgcacgcgacgttctacggcggcgcggacgcgtcgggaaccatgggcggggcgtgcgggtacggcaacctgtacgcgcaggggtacggcacgaggacggcggcgctcagcacggcgctgttcaacgacggcctcgcctgcgggcagtgctacaagctcgtctgcgaccgcaagacggaccggacgtggtgcaagccgggcgtctccgtcaccatcaccgccaccaacttctgcccgcccaactgggacctccccagcgacagcggcggctggtgcaacccgccgcgcccccacttcgacatggcccagcccgcctgggagaagatcggcatctaccgcggcggcatcatccccgtcatctaccaaagggttccttgcatgaagaagggcggggtgcggttcaccatcaacgggcacgactacttccagctggtgctgctgaccaacgtcggggcggccggctcgatcaaggccatggacgtgaagggctccaagtcgccggactggatggccatggcgcacaactggggcgcccagtggcactcgctggcctacctcaccggccagggcctctccttccgggtcaccatcaccgatggccagacgctcgtcttccccaacgtcgttcgccccggatggaggttcggccaaacgttcgcgagcaacatacagttcaagtga

SEQ ID NO: 3248 - DNA, 1005 bp, Oryza sativa
atgtcggtacatgttacatacactacttcctccgtttcacaatattccaagtttactcagcaggagctcccagcttgcaagccgattcttactccaaaatgggtcatttcagttttcgttcttgtcggagtcatttttgtcccaatcgggcttgtttcgttgaaggcttcacgaaaggttgttgagattgttgatcgatacgatgatgcatgtgtcccagctaatacaactgacaagcttgcttacatccagaacccaacaataagcaaaaactgcagaaggactcttaaggttccaaaggatatggatgcaccaatctttgtgtattaccagctggataacttttatcagaatcataggagatatgtcaagagccggagtgatgcacagctaagagatcccaaaaaggcaaatgacacctccacttgtgatcccgagggtacagcaaatggaatggcaattgttccttgtggtctgattgcatggagcatattcaatgatacatatggctttgttcgcaacagtaagaacctgccagtggacaagaaaaacatctcttggaagagtgacagggagcacaaatttggacgtgatgtctttccaaagaacttccagaatggttctcttataggtggaaaaacacttgatccaaataaatcgttgagtaaacaagaagaccttattgtttggatgagaactgctgcacttccaacattcagaaagctgtatggtaggatacacactgacctcaagaaaggtgacaccattacggtgacattggagaacaactacaacacatatagctttagtggcaaaaagaagttggtactttctacctcgacatggctcggtggaaagaatgattttcttggtctagcatatctcagtgttggtggactctgcttcttcctggcatttgcattcaccttgctgtacttgataaaaccaaggaaaatgggtgacaacaactacttgtcatggaacagaaaccctgcaggccgttaa

SEQ ID NO: 3249 - DNA, 663 bp, Oryza sativa
atgacggccgccctgcaagcgctgctcgacccgacggcgctgtccttgggcctgcccacgccggcgatcaacaaggaggagtacctcgccatctgcctcgccgcgctcgcctgcacgcgggcsgggaaggccctggtgggaattggaggccagcagcaggtgcaggcctgcaataagtggctgtgcccagsgcccgcggcgcctgaggagctccgcttccggtgcaccgtctgcgggaaggccttcgcctcgtaccaggcgctcggcggacacaagtccagccaccggaagccgccttccccgggagaccactacggcgccgccgccgcggcgcagcagctggcatccgctggtgactcgaaggaggactcggcgtcgtcagcggccgggagcactggcccgcaccggtgcaccatctgcaggaggagcttcgcgacggggcaggcgctcggcggccacaagcgctgccactactgggacggcacgtcggtgtccgtctccgtctcggcgtccgcgtcggccgcctcgtcggccgtcaggaacttcgacctcaacctgatgccgctgccggagagcacagccgccgccgggatcaagaggtgggcggaggaggaggaggtgcagagtccactgccggtcaagaagctcaggatgtccaactaa

SEQ ID NO: 3250 - DNA, 603 bp, Oryza sativa
atggtgaccaacatgacccacgatgactacgtctccctctgcctcatggcgctcgcccaggcgggcgtcgggggtcagtggccggcgcagaaacagcagatcgacatggcaccgccggcaccggaacgcgagcttcttcggttccggtgctccgtctgcggcaaggccttcccgtcgcaccaagcgctcggcgggcacaaggccagccaccgcaagccgccgacggccgcgttgcccatgcacgtaatcgacgcgccgccgccgccgtcggccgaggacacagcctcgtcgtcgacgacgacaacaacgtcgggcggcggcaggcacaggtgctcggtttgccaccgtaccttcgcgacggggcaggcgctcggagggcacaagaggtgccattactgggacgggctgtcggtggtgtcggtcacggcttcggcgtcaggttccgggtcgtcgagcgtgaggaactttgacctcaacctgaaaccggtgccggagacggtggccgctggcgtcagaaggtggggagaggaggaggaggtgcagagccctttgccgttcaagaagcgccggctgtcaagcccatcattggagcttaatttatag

SEQ ID NO: 3251 - DNA, 753 bp, Oryza sativa
atggcgacggcgaggttgctcctcctcctcacggtggtggcagcggcggcgggctcctgcttctgcagcggccaggaggcgaagccaccgacgccgccgccgccgccgccgtactgcggcagcgtgaggacggcggtggaggcgcacaacatcatcgggtggaagacgcttccggcggattgcgccaaatacgtcgccgactacatcaccggcgaccgctacggccgcgactccgacgtggtgatcaacgaggccgtcgcctacgccgagagcctcaagctctccggcagtggcaaggaggtctgggtgttcgacgtcgacgagaccgcactctccaccgtgccctaccaggctaagcatggctacggagttcagccatacgaccacgcgaacttcctccagtacgtggctggagggagcgcaccggcattgcaggggacgctgcgactctaccaacggctgctccagctcggcatcaagccggtgttcctaaccgaccgcaccgaggaccagatagccatcaccacccacaacctcctctcacagggctactctagctgggagaagctactgctccaaccgattgggctccagacctcaactcaagcattcaagacaagtgagcggaagaagctagtggatgccggctatgtcattatcggcaacatcggtgaccagtggagcgacatcctcagatcaccggagggttgccgcacctttaagtaccccagtcccatgtactacgttgcctag

SEQ ID NO: 3252 - DNA, 1542 bp, Oryza sativa
atggtcgccgccgacgagatcaagccgcacgcggtgtgcctgccgttcccggcgcaggggcacgtcacgccgatgatgaagctggccaaggtgctccactgcaggggcttccacgtcacgttcgtcaacaccgagtacaaccaccgccgcctcatccgctcccgcggcgccgccgccgtggccggggtcccggggttccgcttcgccaccatccccgacggcctcccgccgtccgacgccgacgccacgcaggacccggcgtcgatctgctactccaccatgaccacctgcctcccgcacttcacgaagctgctcgtcgacctcgacggcagccgcgcggccgggatcccgcccgtgacgtgcgtcgtggcggacggcgtcatgagcttcgccgtcgacgccgccaaggagctcggcgtgccgtgcgcgctgttctggacggccagcgcctgcggctacatgggctaccgccaccaccggttcttcctggacgagggcctctcgcctctcaaagatgaagagcagctgacgaacgggttcctggacacggtggcgcggccggcgcgcgggatgagcaagcacatgcgctaccgggactacccgagcttcatctggacgacggaccgcggcgacatcctgctcaacttcctgctccacgaggtggagcgcgcggaccgcgcggacgccgtgatcctcaacacgttcgacgagctggagcagcaggcgctcgacgccatgcgcgccatcctcccgccagtctacaccatcggcccgctcggcagcctcgccgaccgcgtcgtcgcccccgacgccccggccgccgccatccgccccagcctctggaaggaggacaccgcctgcctggcgtggctcgacggcagggagccccggtccgtggtgttcgtcaactacgggagcatcaccaccatgtccaacgacgagcttgtcgaattcgcgtgggggctcgccaactgcggccacggcttcctgtggatcgtccgccccgacctcgtcaggggcgacgccgccgtgctgccgcgggagttcctggaggcggtggcggggaggggcctcctggcgagctggtgcgagcaggaggccgtgctgcggcacggggcggtgggcgcgttcctgacgcactgcggttggaactcgacgatggagagcctcagcgccggggtgccgatgctgtgctggcccttcttcgccgagcagcagaccaacgcgcgctactcgtgcgccgagtggggcgtcgggatggaggtgggcggcggcgtgcggcgggaggcggtggaggcgacgatcagggaggccatgggaggggagaaggggaaggagatgaggcggagggcggcggagtggaaggagctcggtgcgagggcgacgcagcctggcgggaggtcgttggtcaacctggacaatctgatcaaggaagtcttgctcccaaagcttgacaaggacgttgtggcactggagtcgatagagctcaatgaggatgtcagtggtatggaagagcatggagtcagtagcaacatgttataa

SEQ ID NO: 3253 - DNA, 1152 bp, Oryza sativa
atggcacagaaagacaaggctgtggcaggcctgactaaggggattgaaggtctcttcaagaagaacaaagtgacgtatgtcaaaggctttgggaaacttgcttcgccctcagaggtgtctgttgatctgagcgatggtggcagcacagttgtcaaagggaaaaacataatcattgctacagggtctgatgtaaaatcactccctggagtcacaattgatgagaagaaaatcgtctcatctactggggccttgtgcttgtcagagattccaaagaaattggtggttattggagcaggttacattggtctggagatgggttcggtctggaaccgccttggttcagaggtcaccgttgttgaatttgccccagatatagttccatcaatggatggtgaagtcaggaagcagttccagcgcatgttggagaagcagaagatgaagttcatgctcaagacaaaggtagttggggttgatacctccggagatggtgtgaagctaacacttgaacctgcagctggaggtgagcagagtgtcattgaagctgatattgtattggtttctgctggaagagtcccatatactgctggtattgggttggaaagtgttggtgttgagacagacaaagctggcaggatcctcgtggataagcgcttcatgactaacgtcaatggagtctatgcaattggggatgccatccctgggcccatgcttgcccacaaagctgaagaggatggtgttgcctgtgttgagttcattgctggcaaggaggggcacgtcgactatgacacagtgcctggtgtggtctatacacatccagaggtcgcgtctgttggaaagactgaagagcaggtgaaagctttaggaattccctaccgtgttggcaaatttccgctgttggcaaacagccgtgcaaaggccattgacgatgctgagggcttggtgaaggtggtggctgagaaggaaactgacaagattctgggcgtgcatatcatggctcccggtgctggagagataatacatgaggctgtccttgctttgcagtatggagcatcaagtgaggacatagctcgtacatgccacgctcatcccaccgtgagcgaagccttgaaggaggcctgcctgcaaaccttcacaaaggcgattcacatttaa

SEQ ID NO: 3254 - DNA, 1290 bp, Oryza sativa
atggcggcttcttcctcctccaccactcgcctcatccccctcctcctcgtcttgaccttctgcctcgctctcgcctcggcgtcggcgtgggcggcggcggcgggggatgacgacctcctggcggcggcgcgcaarccggggatggccgattggctgcgcggcktgcggcggcggatccaccggcaccccgagctggcgttcgaggaggtccgcaccagcgagctcgtccgcgccgagctcgacgccatcggcgtcccctaccagtggcccgtcgcgcgcaccggcgtcgtcgccacgatcgccggcggcggcggcggcgatggccccgtcgtcgcgctccgggcggacatggacgcgctccccgtgcaggaattggtagattgggaacacaagagccaggaaaacgggaaaatgcatgcttgcggccatgatgctcacactgcaatgcttctgggagcagccaagctacttcagaaacgcaagaacgaactcaagggcactgtaaagctggtgttccagccagcagaggaggggagcgcaggtgcctactatgttcttcaggaaggcgtcctcgacgacgtgtcggcgatgtttgggatgcacgtcgatccggctcttccggtgggcgtggttgcagccaggcctgggccattcgccgcaacgtcaggcaggttcttggcaactatcactggaaagggtggccatgctgcattcccccatgacgccattgatcctgttgtcgctgcatccaatgccatcctcagccttcagcagattgtcgcccgcgaaatcgatcccctccagggcgcggtggtatccatcacctttgtgaaaggaggagaagcttacaatgttattcctcagtctgtggagtttggtggcaccatgaggagcatgactgatgaggatagtggaagggcaggcggcggtgaacggtgcggcggcggcgtggacttcatggaggagtcgatgcggccgtacccggcggtggtgaacgacgaggggatgtacgcgcacgcgcgggcgtcggcggagcggctgctgggcgccggcggcgtccgcgtggcaccgcagctgatgggcgccgaggacttcgggttctacgcggcgcggatgcccagcgccttcttcaccatcggcgtcggcaacgccaccaccagcagcgcccgggcggcgcacaccacgsaatccccgcacttcgtcatcgacgaggccgcamtccccgtcggcgccgcggtccacgccgccgtcgccatcgactacctctccaagcacgcgtcgtccatgtga

SEQ ID NO: 3255 - DNA, 1926 bp, Oryza sativa
atggcatacaattacccatcagaaaaaataagtgtgtacctttccgatgatggaggttcaattcttactttctatgctttatgggaggcctccatatttgcaaagaaatggctaccattctgcaaaagatataacattgagccaaggtcaccagctgcttacttctcagagtcaaaagtgcatcacaatctgtgcatcccaaaagaatgggcactgatcaagaacctgtatgaagaaatgagagagagaattgatacagctaccatgtcaggaaaaattcctgaagaaatgaagctaaagcataaaggatttgatgaatggaactcagattttactttgaaaaatcaccagccaattgttcagattctgatagatgggaaaaaccgaaatgcaattgatgatgatagaaatgtgctaccaacaatggtatacgtggcgcgcgagaagaggcctcagtaccaccataacttcaaagctggggcattgaacgctttgataagggtatcatcagtgataagtgacagccctgttatcttgaacgtggactgtgatatgtattccaacaatagtgattcaatcagagatgcgttatgcttcttcctcgatgaagaaatgggccagaaaattggatttgtgcagtaccctcagatcttcaacaatatgacccaaaatgatatatatggaaactctttcaatgttagctatcatgtggagatgtgtggtttagacagtgttggtggttgtctctacattggcacaggatgcttccacagaagagagatcctttgtggtaggatattcagcaaagactacaaggaaaactggaacagaggaataaaggaaagaggaaaagagaacataaatgagattgaggagaaggcaacatctttagtaacttgcacttatgagcataggacacagtggggtaatgacattggagtgaaatacggtttcccggcagaggatatcattactggattggcaatacattgcagaggatgggagtcagccttcataaatcctaaaagagcagcatttttgggtttagccccatcaacacttgcccagaatatactgcaacataagagatggagtgagggtaatctcacaatttttctttcgaagtactgctccttcttgtttggacatggaaaaatcaagttacaactacagatgggctactgcatatgtggattatgggcagccaactcactgcctacactctattatgttgtgattccatcactaggtcttgttaagggcacccccctattcccacagattatgagtccatgggctacacccttcatatatgtattttgtgtgaagaccctctacggtctttatgaggcattattatctggggatacattgaaaggatggtggaatggacaaaggatgtggatggtgaaaagcattacctcatatctatatggcttcattgacaccatccgaaaatgtgtaggaatgtcaaagatgtcatttgaagttacagcaaaggtaagcggtcacgatgaagcaaagaggtatgagcaagaaatcctagaatttgggtcatcgtctcctgaatatgtgatcatcgcaaccgtcgcattactgaacttcgtctgcctagttggagggttaagtcaaataatggcaggtgtctggaatatgccatggaatgtgtttttaccccaggccatcctctgtggaatgatagtaatcattaatatgccaatttatgaggcaatgttcctaagaaaggacaatgggagaataccaacagcagtcacactagcttcaattggctttgtaatgttggcattcctagtacccaatagtttgaggtccctaaaatgggatttgatgccttataaaacattgggtgtttctgatgatgatcatgaaaataaattgcattgccatttcatgaaattctcttga

SEQ ID NO: 3256 - DNA, 822 bp, Oryza sativa
atggcattggcagccaagctcctcccgtccatcgtcgcgttcgtggctctcgcctgctgcgtcctccgctcatccgtcgcgtccgtcgaccaccaccggaagctctccggctggtccatcggcggcgcgacgtggtatggccctgccaacggctctggaaccgatggtggcgcgtgtgggtaccagggagacgtcgggcagccgcctttcaactccatgatcgccgccggcagcccgtccatctatgagtccggcaagggctgcggctcttgttaccaggtgaagtgcagcggcaacccctcttgctccggcaagcctgtgaccgtcgtcctcaccgacctgtgccccggcggcgcgtgcctcgaagagcccgtccacttcgacctgagcgggacggcgttcggcgccatggcaaaacccggccaggacgatcagctccgcaacgccggcaagctcccagtccaatacgctagggtgccgtgcaaatggcagggggtggacatcgcgttccgggtggacgccggctccaaccagtactacctcgccgtgctggtcgaggacgaggacggcgacggcgacctgtcggcggtggacctcatgcagagcggcggcagcggcggcggcggatcttgggcggcgatgcagcagtcgtggggcgcggtgtggaagtacaactccgggccggcgccgctgcaggcgccgatgtccatccgcctcacgtccggctccggccggacgctcgtcgccagcaacgtcatccccgccgggttgscacccggcggcacstaccggtccatcgtgaacttcaggagggaggattga

SEQ ID NO: 3257 - DNA, 2640 bp, Oryza sativa
atggggatggtgctgggcaagatcacggtggagacgcccaagcacgaggtgctccacaccggcgccggctacgaggtccgcaagtacccgccgtgcgtcgtcgccgaggtcacctacgaccccgcggagatgaaaggcgaccgcgacggcgggttcaccgtcctcggcaactacatcggcgccctcggcaacccgcagaacaccaagccagagaagatcgacatgaccgcgccggtcatcacctccggcgagcccgagagtatcgccatgacggccccggtcatcacctccggtgagcctgagccggtggcgatgaccgcgccggtgatcacggccgaagagcgcagccaggggaagggtcagatgacaatgcagtttctgctgccgtccaagtacagcaaggtggaggaggcgccgcggccgacggacgagcgggtggtgctgcggcaggtgggggagaggaagtacggggtggtgaggttcagcggcctgaccggagacaaggtggtgaaggagaaggcggagtggctcaaggccgcgctggagaaggacgggttcaccgtcaagggccccttcgtgctggcgcggtacaacccgccgtttactctgcctccgctgcgcaccaacgaggctggccgtcgagatcgaatttggcccatattagttagcggtgcagcaccgttccgtttcaatgttgggcctacaaagcgctcagatccatacccgcaaggctgcaacccagtttatggattcgggcgcaacccgacatccttaacggtcgctaaacccttcaacgcgaactggatagagtcgaacaccttcgtcttctaccaggcttcccaccgaaggagagagccggctatggccatggcggcctccccattcctcatcttgccatccttattccccaagcccaccatcctcgccgcgcgcatccaccccagcatcttccgaggccgccatattcgctgctccccgaacggcgccgccgtaccggaatcccctgaacccgccccaccgccgcgggcccaggaagtcccatccccgtcgccgccgaaggcgaagaccacgaggcgcaggaccaagaagaatacgcaggagtctgattcagagggcgaagaggagccgccgaagcggcggggccgtcggacaaggaaatccaagcaagaggccgagcaggaggcggcggagaaggaggatgaggtccgggcggcgagccccggaacggaggattcgaagagagcggtccaagatgaggatggggaggcggaggcgacggggagcgactccgaagacggggaggattcgccgtacgactggccgccgctggtgtgctgcttcggggcgccgcggtgggagttcgtcccgacggtgcgggtgtcggaccggcagatgcacccggacatatactccacgtggctgcatctgcagtgggagcctccggagttcgcgcgcgcgccggggagcgcggcgagcaacgtggccatcgcgctcaccaggctcggcggccgcgccgcggtgctcggcaaggtcggtgacgacgacttcggccgcgagcttgtgtaccgcatgaactgcgagcgagtgcagacgcgcgccatcaggttcgacgacggcgcggccacggccactgcgcgcatgaaggtcgggttccgggaccgtgaggacggcagcggcggaacgaggcttgtggctgagacggtgaagagcgctgccgaggactccctcagcaaggctgagatcaatgtggatgttttgaaagaggctagagtgttccatttcaattcagaggtcctattgactccctcaatggaaagcacactcttcagagcaattgaactgtccaagaaatttggaagtaaaatattctttgatcttaacttgccattgcctttgtggaggtcaagggatgaaacaaaggagttgataaacaaggcatggaatgaggctgatattatagaggtgtcaagggatgagttggaattcctccttgatcacgagtactatcaatataagcgtgccaatccacctcagtattatctggatggttttcatctaacaaggaactggccacagtactaccattacacccccgaagaaattgctcccatttggcatgatgggataaaactcttgcttgtgacatacggaacacttaggatccactactacacacccaagtttcatggctgcgtgattgggacggaggatgcactcataactccatacacaactgaccggacaggttctggagatgctgttgttgctgctgctattagaaaattgacgtcttgtcctgagatgtatgaggaccaggatacattggagaggaatctgagattcgctgttgctgccggaatcatttcgcaatggactattggtgctgtgcgaggattccctactgagagtgctgcccagaacttgaaggagcaaaacaatgctcatgatatacaagtgtatttcatgagtgctgcaacagaggtggtcaagggaaaagttttaccaaaacagcttacaggcttttcagtgttcagttttagttggaaaaatgtgtctgccacttggaggcttccattgctttacagttttgaagagctatgtttacctattgacttccatggtagggatgcaagtgtctaa

SEQ ID NO: 3258 - DNA, 744 bp, Oryza sativa
atgcctgcccttccaccaggcttccgcttccaccccaccgacgaggagctcatcgttcactacctcatgaaccaggccgcctccrtcaagtgccccgtgccaatcatcgccgaggtcaacatctacaagtgcaacccatgggaccttcctggtaaggcgctgttcggcgagaacgaatggtacttcttcagcccgagggaccgcaagtaccccaacggcgcacgccccaaccgcgccgccggctcggggtactggaaggccaccggcaccgacaagtccatcttgtcaactccgacgagcgacaacatcggcgtcaagaaggccctagtcttctacaagggcaagccccccaagggcgtcaagaccgactggatcatgcacgagtatcgcctcacaggcacatcagctaacaacaccaccaccacaaagcagcgtagagcatcatccatgaccatgaggctggacgactgggtgctgtgcagaatccacaagaagagcaacgacttcaattcctctgaccaacacgaccaagaacccgagggatcaaccgtcgatgaacagcttgaagacatccatgacaacaactcttcctctcaacaacctcctgctccacctgacatgaacaaccaacagtcagatttccagcccatgacggcgatgagcatgagcaagtcatgctccctcaccgatctcctcaacaacctcgactgcgccgcgctctcgcagtttctcctcgacggctma

SEQ ID NO: 3259 - DNA, 2124 bp, Oryza sativa
atggcgagccagaccgccgacgccacggggttcgtcgcgagcgacccgctgtcgtggggcaaggcggcgctggagatgacggggagccacctggacgaggtgaagcgcatggtggcgcagtcacgggaggccgtggtgaagatcgaggggtccagcctccgcgtcggccaggtggccgccgtctccgcggccaaggacgcctccggcgtggtggtcgagctggacgaggaggcccgcccccgcgtcaaggccagcagcgagtggatcctcaactgcatcgcccacggcggcgacatctacggcgtcaccaccggcttcggcggcacctcccaccgccgcaccaaggacggccaggccctccaagttgagctgctcaggcatctcaatgccggaatcttcggcaacggctccgatggcaactcgctgccgtcggaggtgtcgcgtgcggcgatgcttgtgcgcatcaacaccctgctccagggctactcgggcatccgcttcgagatcctcgaggcgatcaccaagctgatcaacaccggggtcagcccatgcctgccgctccgaggcaccatcacggcgtccggcgacctcgtgccgctgtcctacattgccggcctcatcaccgggcgccccaacgcgcaggcggtgaccgtcgatggcaagaaggtggacgccgccgaggcgttcaagatcgccggcatccagggcggcttcttcaggctggagcccaaggaaggtctcgccatcgtgaacggcacctccgtgggctcggccctcgctgccatggtgctctacgacgcgaacgtcctcgccgtcctgtccgaggtgctgtccgccgtgttctgcgaggtgatgaacggcaagcccgagtacaccgaccacctgacgcacaagctgaagcaccacccgggctcgatcgaggccgccgccatcatggagcacatcctcgccggcagcgcgttcatgccgcacgcgcagaaggtgaacgaggtggacccgctgctgaagccgaagcaggacaggtacgcgctccgcacgtcgccgcagtggctgggaccccagatcgaggtcatccgcgcggccaccaagtcgatcgagcgcgaggtcaactcggtgaacgacaacccggtcatcgacgtccaccgcggcaaggccctgcacggcggcaacttccagggcacgcccatcggcgtgtccatggacaacacccgcctcgccatcgccaacatcggcaagctcatgttcgcccagttctccgagctggtcaacgagttctacaacaacgggctcacgtcaaacctggccggcagccgcaacccgagcttggactacggcttcaagggcaccgagatcgccatggcctcctactgctcggagctccagttcctcgccaacccggtcaccaaccacgtccagagcgcggagcagcacaaccaggacgtcaactccctcggcctcgtctccgccaggaagaccgccgaggcggtggacatcctcaagctcatgtcctccacctacctggttgcgctctgccaggccgtcgacctgcgccacctggaggagaacctcaagagcgccgtcaagaactgcgtgacgacggtggccaagaaggtgctcaccacgggccccgccggcggcctccacagcgcgcgcttcagcgagaaggccctgctcaccgccatcgaccgcgaggccgtgtacagctacgccgacgacccgtgcagcgccaactacccgctgatgaccaagatccgcgccgtgctcgtcgagcacgccctcgccaacggccccgccgagaaggacgacggctcctccgtgttctccaagatcaccgcgttcgaggaggagctccgcgaggcgctgcccagggagatggaggcggcgcgcgtggcgttcgagaccggcaccgcgccgatcaccaacaggatcaaggagagcaggtcgttcccgctgtaccgcttcgtccgcgaggagctcggctgcgtgtacctcaccggagagaagctcaagtcccccggcgaggagtgcaacaaggtgttcctggccatcagcgagcgcaagctcatcgacccgatgctcgagtgcctcaaggagtggaacggcgagcccctgcccatctgctga

SEQ ID NO: 3260 - DNA, 1236 bp, Oryza sativa
atgaacgcgctagccgccaccagccgcaacttccggcaggcggcgaggctactcggcctcgactccaaactccagaagagccttctgatccctctccgcgagatcaaggttgaatgcaccatccccaaagacgatggcaccttggcgacgtttgttgggttcagagtgcagcatgacaattcccgtggcccgatgaaaggcggcatcaggtatcaccctgaggttgacccagatgaagtgaatgcacttgctcagctgatgacatggaagactgctgttgctgctgtgccttatggtggagcaaagggaggcattgggtgcactcctggtgaactgagtagaagtgaacttgagcgtttaacgcgcgtgtttacccagaaaattcatgacctcattgggatcaatacagatgttccagcccctgacatgggaacaaatgcacagaccatggcatggatactagatgaatactcaaagttccatggccactccccagctgttgtcacgggaaagccaattgatcttggaggatccttaggaagagatgctgcgactggccgcggtgttatgtatgctactgaggctttattgactgaatacagcgagtcaatttcaggatcaacctttgttatccagggtttggggaatgttggttcttgggcagccaagctcatccatcagaaaggtggcaagatagttgcagttggagatgtaacaggtgcaatcagaaataaatccgggatagacatacctgctctcttgaagcacaggagcgagggtggatctttggaggacttctacggtgcagaagttatggacgctgcagagctgcttgtgcatgaatgtgatgttctcgtcccgtgcgccttgggtggtgttctcaacagagaaaatgcagctgaagtgaaggccagattcataattgagggggctaatcatcccactgatacagaagctgatgagatactcgcaaagaagggagtcattgtgctgccagatatctatgcaaattcaggcggcgtggtcgtcagctattttgagtgggttcagaacattcagggcttcatgtgggatgaagagaaggtgaacagggagctccaaaagtacatgaagaacgcttttcagaacatcaaggacatgtgcaaatcccaaaactgcaaccttaggatgggggcattcactttgggggttaaccgggttgcaaaggctactctgttgaggggatgggaggcatga

SEQ ID NO: 3261 - DNA, 1782 bp, Oryza sativa
atgacgccgcggcggcggctggcgctgcccgcgctgctgctgtggtgcctgtgcgcgctcccggccccggcgcggtcacagagcgcggccaagcccgcgccggcgtccaacgaggggttcaactgcacggcgaacgccacgtacccgtgccaggcctacgcgctctaccgcgcgggcttcggcggggtgccgctcgagttagcggccatcggcgacctcttcgcggccagccgattcatggtcgcgcacgccaacaacctgtccacctcggccgtcctggccgcgaggcagccgctgctggtgccgctccagtgcgggtgcccytcccgctcgcccaacgcgtacgcgcccatgcagtaccagatcaacgccggcgacacctactggatcgtctccaccaccaagctgcagaacctgacgcagtaccaggccgtcgagcgggtgaaccccacgctggtgcccaccaacctcgacatcggccagatcgtcacgttccccatcttctgccagtgcccgaccgccgcggacaacgccaccgcgctcgtmacctacgtgatgcagccgggcgacacctacgcgtccatcgccacggcgttcgccgtcgacgcccagtcgctcgtctccctcaacgggcccgagcagggcacgcggaacctgagctccccggagattctggtgccgctccgcaggcagatgctgctgctgggctgcctgtggaggcggcttaaggcgagggggcggcgagcggaggcggtggcgagcggcgatggcggcgagggcggcaggtttaccaaggccgcgtccggtggcggcggcggcggcggcgggaggttcttggtcagtgacatatccgagtggctggacaagtacaaggtgttcaaggtggaggagttggagagtggcacgggtggtttcgacgacgagcacctcatccagggaagcgtgtacaaggcctacatcgacggtgaggtgttcgccgtgaagaagatgaagtgggacgcctgcgaagagctcaaaatcctgcaaaaggtgaaccacagcaacctagtgaagctggagggcttctgcatcaactcggaaaccggcgactgctacctggtgtacgagtacgtggagaacggctcgctggacctgtggctcatggaccgcgaccgcgcgcggcggctggactggcgcgcgcgcctccacatcgccctcgacctcgcccacggcttgcagtacatccacgagcacacctggccgcgcgtggtgcacaaggacatcaagagcagcaacgtcctgctcgacgaccgcatgcgcgccaagatcgccaayttcggcctcgccaagaccggccacaacgccgtcaccacgcacatcgtcggcacgcaggggtacatcgcgccggagtacctcgccgacggcctcgtcaccaccaagatggacgtgttcgcctacggcgtcgtcctgctcgagctcgtgtcggggcgcgaggccgtcagcgacgacagcggcgagccgctgtgggccgacgcggacgagaggctgttccgcggccgggaggagaggctggaggcgcgggtcgcggcgtggatggaccccgcgctcgccgagcagacgtgcccgccgggcagcgtcgccagcgtggtgagcgtggcgaaggcttgcctgcaccgtgacccggcgaagcgccccagcatggtggacgtggcgtacacgctgtcgaaggcagacgagagcttcggcgactactcgggcgagagcgtgtccgtcgccagcagcggcgggatcgcagcgcggtga

SEQ ID NO: 3262 - DNA, 543 bp, Oryza sativa
atgggcacctacctgtcccagccgaatcctgtcacttctcgatgggaaggggaagaccatctacgggatcccaactttcagctggatgcattcagataccgaacatctcgattactgcacagcgttgccgctcgactccagaagcatagcaagacgcttggaggatttggtgcatggaatagatgtttaaaccatctgctcacacttgcggaatcacacattgagtctgtcattcttgcgaagtttatagaagcggtcaaaagatgcccggatgaaaaaacacgggaattgttgaaattggtgtgcgacctttacgcgcttgataggatctggaaagatataggaacctatcggaatgtggactatgttgccccaaacaaagccaaggctatccataaactagctgactacctcagttaccaagtgaggcttgtcgctcaggaactcgtcgatgcatttgatcttccagatctcatcattcgtgccccaatcggcatgcagtctgaggcatatgctcagtatactcagcatgttggtttttaa

SEQ ID NO: 3263 - DNA, 1065 bp, Oryza sativa
atggsgaacgaccccgccgagtacttcgccgtcatggaggcccccggcggcgccgamatttccctcggsgtcaagctcggsgtccagtacagcctttggggaggttctataataaatctgggaaccaaaaagcacagagataggttctttgacggaatcgacaatttggattatcctggctgttttgctatgacagagctgcaccatggatctaatgtccaggccctacaaactactgctacattcgatccagttactgatgagttcattatcaatacacccaatgatggagctattaagtggtggattggtaatgcagcacttcatggaaaattcgctactgtttttgcaaggttaattttgcccctccaaggaaaaggtggggaccctgctgatatgggcattcatgcattcattgttcccatacgggaccttgacaccaatgctgttcttcccggaattgagatcaatgattgtggtcacaagataggcctgaatggtgtggacaatggtgcactgaggttccgttcagtgaggatacctcgtgataatcttctgaaccgattcggagacgtgtcacgagatggaaaatacacaagcagtctgccaacaattaacaaaagatttgcagcaacccttggtgagcttgttgggggacgcgttggtattgcatatagttctgtaggtatactcaaagtttcagtgaccattgctgttaggtatgctctgcttcgacagcaatttggtccacctaagaagcctgaaatcagtgtgttggactaccaatctcaccagcataagctaatgcccatgttggcatcatcatacgcatttcactttgccacacggtacttggtggataaatactcagaaatgaagaaaaccaatgatgaggatgttatggctgatgtgcatgttctttcatctggattgaaagcctacataacttcatatacagccaaatccattagcgtatgccgagaatcatgtggtggccatgggtatgctgctgtaaatcgttttggtgctttgcgcaatgatcatgatatatttcagracatttga

SEQ ID NO: 3264 - DNA, 675 bp, Oryza sativa
atggcggcgcctgtgacggtgtacggtccgatgatctcgccggcggtggcgcgcgtggcggcctgcctcctggagaaggacgtgccgttccaggtcgagccggtcgacatgtccaagggcgagcacaagtccccttccttcctcaagctccagcccttcggccaggtccccgcattcaaagacagcctcaccaccgtcttcgagtcgagggctatttgccgttacatctgtgaccagtacgccgacagcggtaacaagaccctcatgggcaggaaagaagatggggcggttggccgcgctgccattgagaaatggatagaagctgaaggccagagcttcaacccaccgagcttggcaatggcattccagctcgcatttgcgccgttcatgggtagggccactgacatggccgtggttgaacaaaatgaagcgaaacttgtgaaggtgctcgatgtttacgagcagtggctgggggagaaccagtattttgcaggtgatgagttctcgctggcggacctggtgcacatgcccaacacagatcttcttgtgcgcaagaccaacaaggcagggttgttcacggagagaaagaatctggcgaggtggtgggatgaggtatcagctcgtccttcatggaagaaggttgttgagttgcagaatgtaccacggccctcatga

SEQ ID NO: 3265 - DNA, 879 bp, Oryza sativa
atggcgtcttgtcggagaggagggggaggggatgtggataggataaaggggccgtggagtccggaggaggacgaggcgctgcagcggctggtggggcggcacggggcgcgcaactggtcgctgataagcaagtccatcccggggaggtcggggaagtcgtgccggctgcggtggtgcaaccagctgtcgccgcaggtggagcaccggcccttcactcccgaggaggacgacaccatcctccgcgcccacgcccgcttcggcaacaagtgggccaccatcgccaggctcctcgccggccgcaccgacaacgccatcaagaaccactggaactccaccctcaagcgcaagcaccactcttctctccttgccgacgaacttcggccctttcaagcggacaaccagcgacggccacccgaagctctcctccgccgccggccccgggagcccctccggcacgtctaccgcccggtcgcgagggccggcggggtcgtcgtccctcctcctcctyccccggcgcctccggcgacctcgctctccctctctctctcccttcccggcctggatcacccacaccccgatccctccaccccgtcggagcctgcggtacagttgcagccgcctccaccgtctcagatgccgccaccaacaccatcttgtgtacgccaagagccgcctcagatgccgttccagctgcagcccccaccgccgccgcgcccatcggcgccgttcagcgcggagttcttggccatgatgcaggagatgatccggatcgaggtccggaattacatgtccggctccgccgccgtggatcctcggtcgtcgcccgacaacggcgtgcgcgccgccagccgcatcatgggcatggccaagatcgagtaa

SEQ ID NO: 3266 - DNA, 1130 bp, Oryza sativa
atgaaatgcttcaagcagcagcagcagcagggcggcggcaatggcggtgggcaggggaagaggctggagaggcggctgtcgctgggggagtacaagaaggcggtgtcgtggtccaagtacctggtggctccgccgggagccaagatccggggtggcggcgaggagctgtggagcgccgacctgtccaagctggagatccggaccaagttcgccaccggcaggcacagccgcgtctactccggccgctacgccgcccgcgacgttgccatcaagatggttagccagcctgaggaagacgccgccctcgccgccgagctcgagcgccagttcgcctccgaggtcgccctcctcctccgcctccgccaccccaacatcatctcgtttgttgcagcatgcaagaaaccaccagtcttctgtatcattactgagtacatggcaggtggctcccttaggaaatatctacatcagcaagaacctcattctgttccaattgaattagtgttgaagttatccttagagattgctcgtggaatgagctacttacactcgcaaggcatacttcacagagacttgaagtcagagaatatacttctcgatggagatatgtcagtaaaggtggcagattttggaatttcgtgcttagaatcgcagtgcggaagtggtaagggttttactggaacgtataggtggatggctccagaaatgatcaaagagaaacaccatacgaggaaggttgatgtatacagctttggaattgtcttgtgggagattttgactgctttggtaccattcagtgagatgacacccgagcaagctgctgttgctgttgccttgaagaatgctaggccaccactgcctccttcatgccctgtggcaataagccatctgataactcagtgctgggcgaccaacccagacagaaggcctcagttcgacgacatcgtcgccatacttgagagctacatagaagctcttgaagaggatccatccttcttgcagtcatatataccgcctccgcatccgctgcaccatcaccatcaccagcatcataatcatcatcatcaacagagccttctccggtgcttccctcgctacagaaccacccgacgatctgcatctctgagagtata

SEQ ID NO: 3267 - DNA, 1164 bp, Oryza sativa
atggggtttaatttgctcttggttcctctacttttggtttggtgcgagtggatggaaatgttcttcagcagctttcttaatgaatcggcatcatcagagaacctctttggtcatccaaatgtcgagagatgcccattcctgagaaacatcaatggagctacaacatattcattttcttctgctttgccagtagctgcccgaggaggaaatggtccaatttttgaggacggaccaggctttgattcagcatttaaacttttccatggatgggatggaatagttccgctttcaggaaagtcatatttacctgatgagagcaacagtgagagcattgatgccaatcctgaacctgctctgctgtttaacccattggctgctagagctgccacaataagtctatctgcatttgggccatttggttttaacttctttaatggcaaggggaaaaggcagaacaagaagcccaacaatctaaatcagtcaaacaagaagcccagcaatccgaaccagaattccatgaaacagaaaggaggtaactcatcatcgcacgaggcaatgagcaacgaatggatggaaaatgggcagtgcccacttgcccggtcttaccgagcaatgagtggcattctgccccttgttgcaaaggctttacaaccaccagcaggtgtgaagctgaagtgcccgcctgctgtggtcgctatacgtgcagcccttgcacggactgaacttgtgaagtctctccgtccccagcccctgcctgcaaagatggtagccattgcgttgcttggaatggcagcaaacatccctctcggggtgtggcgtgagcacaccaagaaattctccccgcagtggtttgcagctgtccatgccgctgttccattcatcggaatgctgaggaaatctgtgaacatgcccaagactgccatggcattcaccatagcagcctccattattggccagacaatcgggtcgagggccgagcgcattcgtctgaaggcattggctgcaaagggcgacgccgattccaccaccgtggctgacatgtatccaaacaagtctggcaattgcagtgacactgagggcaaggcatgggatccgctcgcgatgaagatggctggacgggcttctggtggcgttgctgcaccaacaccaagcatgtgtttctga

SEQ ID NO: 3268 - DNA, 819 bp, Oryza sativa
atgggcgaggaggagaaggtgaaggaggaggcggcggcggagaaaggggaaggaggcggcggagtggaagatgttgtcgcggactcgaaagctcacaaggtgatcgtgaagggaaagaaggctgctgctgacccaatgaaggtggtgcaccgtgtgcagaagaagacaggccgcaaggttgagcttctatcaccgatgccacctccggtggaggagaagaaggaagaggagaaaaaggaagagcccgagccaccaaaacctgaagagaaggagccaacggtgatagcggtggtcctgaaggtgcatatgcattgtgaggcctgtgcgcaagttatcaggaagaaaatcctcaagatgaaaggagtgcaatcagcagagccagacatgaaggcatcacaagtgacggtgaagggtgtgtttgaggagtcaaagctcaccgattacgtgcataaacgcattggtaagaatgccgccgttgtaaaatctgaaccagcccctccccctgagaatgctggcgatgcaaatgcaaaggatgacaagaaggcggccgaaggtggcgaggagaaggacgagagcaaggaggaaaagaaggaaggtgatgatgagaaagaaaaggagaaagagaaggatgatagcaatgctgccgaggttgaagagaaggacaaagagaaagatccttcagccttggctgctgctaatctgtatatgcattacccaagattcagcaaccctggtggatatggtgttcctggctacgcatacccgtatgcgccgcagctcttcagtgacgagaatccaaacgcctgtgttgtgatgtga

SEQ ID NO: 3269 - DNA, 1548 bp, Oryza sativa
atgtccggcgcggtggcgacccatgcggcggagcccccccgcccatccgcagcagcagcggaggtggcggtggcggggggaaggggagggtgcggggcggcgaggaagccggcggcgacgatggagcacgtgctgctggcgctgcacgagacggaggcggaragggaagcgcggatccgcgccatgttcggcttcttcgacgccgcggggcggggccacttgaacaagcgcaratcgaggccggcttgccgcgstccaacttccgccgccgccgccgcccgaggagggcggcgggggtacgcccgcgagctgctccgcgcgtgcgaccgcgaccgcgacggccgcgtcggctacgacgacttccgcaggtacatggacgacaaggagctggagctctaccgcatcttccaggccatcgacgtcgagcacaacggctgcatcctccccgaggagctctggcacgccctcgtcaaggctggcatagaaattgatgacgaggagcttgcaagatttgttgagcatgtggataaggataataatggaattattacttttgaagaatggagggactttcttttgctttaccctcatgaggcaaccattgagaacatctaccatcattgggaaagagtctgccttgtagatataggcgagcaggctgctataccagaacgaataagtaaacatgcaagcgcaagcaaatatctaattgcaggaggtgtttctggtgcaacatcccgtactgctactgcacctcttgaccgtctcaaagtcatcatgcaagtacaaacaaaccgtattacagtattacaagcagtgaaggatatatggagagagggcagtctgcgtggtttcttcagaggaaatggattaaatgtggtaaaggttgctccagaaagtgcaataagattttatgcctacgaaatgctaaaagaatacataatgaaaagtaaaggagaaaataagagcgacattggtacttctggacgtctgatggctggtggtttggctggagcagtggcacagacagcaatttatcccatagatttagtaaagactcgactgcagacttttgcatgtggtagtggtaaaattcctagccttggtgcactatcaagagacatttggatgcaggaaggtcctcgagcattttacagaggcctcgttccatcattgcttggtatggttccgtatgctggaattgatcttactgtttatgaaacactgaaagaaatgtccaagacatatgtcctcaaggatagcgatcctggtcctttagtccaactaggttgtgggacagtctcaggagctctaggagcaacatgtgtttaccctttgcaagtcatcagaacaagactgcaagctcaacgagccaattcagaggctgcatatagagggatgtctgatgttttctggaaaacactgcagcatgagggaatttccggattctacaaagggcttgtaccaaatcttctcaaagtggttccagctgcaagtataacatatcttgtttatgagacaatgaagaaaagtctatcactcgattaa

SEQ ID NO: 3270 - DNA, 1872 bp, Oryza sativa
atggcgggcggcggccgcgtcgtgtcggtcgacctcgccgggctgcgccgcacgcggctggggcgcctggcgccgcggttcgccgtcgacgggctgcgcaaccttacgcggctcgaggccttcagcgcgcccgggttcggcctgccaggctcccttccggcgtggctcggcgcggggctcgcgcccaccttccagctcctcgacatctccggctgcgccgtcacgggggagatcccgscctsggccatcgccggcctcagcaacctcaccactctcaacctcgcggggaatctactctcggggcagctccctggcagtgctctcgccgggctcgctcggctcaagactctcaacctctctggcaatgccttctcaggcgagctacccaaggcggtctggtcgctcccggagctgagcgttctcgatgtgtctcggaccaacctcaccggcgcattgccggatacagggctcgcgcttccatccaatgtacaggtggtggatctgtccgggaacctcttctatggtggcgtgccgggatcctttggccaacttttcggtaggacgaagctggccaatatctctgggaattacttcgacggcaaactgggtgtatccaatggtgatggtgggaatttctcatttgagttgaattgcttcgttgatgtcactggacagcgtagccaggcagaatgtcagcagttctatgctgcacgtggtttgccgtataatgtttcaggtcctgcacccacaccgcagcctgcgatgccagcttcaccgggaaggaaaaaggggcacaagaatttgaagtatatactgattggagccatttgcggcggtgtcctcttggtagctgtgattgctgccattttgtattgcttggtgtgctctgggagtaggaggaatgggagtaggaatgatcagcgggaaagtggcgtgcggaacacacagttgggagcgtctggaactggtgggggtgcagttactgctggcacgcaaccttctgcatcgcctgcaaacttggcaaaggtcggtgattcattcggttatgaccagctcgtcgaagccaccacggactttggagatgataggcttatcaagcatggtcactcaggtgatctttaccttggggcgctccatgatgggacctctgtggttgtgaagaggataacttccagcatggctaagaaagatgcttatatggcggagctagatttatttgccaaaggattgcatgaaaggctggtgccgatcatggggcattgccttgataaagaggaggagaaatttctcgtgtatatatttgtccggaatggcgacttatcaagtgcactgcacagaaagtcaggggaggaagaggaaggcctgcaatctttggactggataaagaggctgaaaattgcaacaggagtggcagaggcactatgctatctccaccacgagtgtaatccaccaatggttcacagggacgtgcaagctagcagtattcttcttgatgataaatttgatgtgcgccttgggagtttgagcgaggactgcggatcaaggatcttctggtcttctaaacggccgccgatgaaatatattctaaaagcactagagaatccgttgaaggtggtgagggaagataacggcggctctagctcagcccgtttgagagccacgtcatcacggggatcatggaatgctgcattcttcgggagttggcggcatagctcgtctgatataggtccttcaagggatgacaacttgttgaaacgctcagagacgatcaaatcatccggagggagcaatggtgaccattcttcctcccgcaggaggcaatcgaaggagatcttccctgagccatctggttcacgtgacaccgaggattaa

SEQ ID NO: 3271 - DNA, 800 bp, Oryza sativa
atgaggattgagctttgtcaagagcagaagaagtcatgtttagctttaggaaaaagcatgcctctcgcttcgattcagatgacattgagcaacaagaagcaaagatccaagagctcagagctgcacttgggccgttgtcttcctctgcccgagatttctgttgaatcagaaacaggtaaaatgtacagagcaagttttgtagatagagaggggagaactgtcgtcattatgagacccgcaaagcagaacacatcgtcccatgaagggcaggtacggtttcttgtatatacgttggagaatgcaatcctcagcttgcctgaagatcaagagaaaatggtttggttgatagatttcacaggatggaccttggcaaatgcgacacccataaagactgccagagaatgtgcaaatatcctgcaaaatcattaccctgagaggttggctatcgggatcctgtttaatccccccaaagtatttgaggctttttggaaggttgtcaaacatttccttgacccaaaatcaatccagaaggtgaattttgtatacctgaagaacgaggagagcatgaagatcctgcacaagtacattgatccagaagtccttcctgtagagtttggaggaaagaacaatgtggtgtacagccatgaggagtactccaagttgatggtgaaagatgacattaaaatggcaagcttttgggcatcggatacaaaaactgaccatgttaacaaagtcattaacgagcactccgtccccgaggttacgcaacagtcgtcgctggtggctgcgaaagcgagctg

SEQ ID NO: 3272 - DNA, 1005 bp, Oryza sativa
atggcgagcggcggcggcggaggaggggagggggagacggtgctggtcaccggcgcgagcggcttcatcggctcgtgtctcgttcgccgcctcctcgcccgcggctactccgtccacgccgccgtcctcaaccccgatgacaaggccgagacggaccacctccamgcgctygccgccgccggcggcggcgagggccgccgcctccgcgtgttcccgggcgacctcctcgacggcgccgccctcctcgccgccgcgcggggctgctccggcgtcttccacctcgcctccccctgcatcgtggaccgcgtcctcgacccccaggcgcagctgatggtgccggcggtggaggggacgctgaacgtgctgcgcgcggccaaggacgccggcggagtgcggcgggtggtggtgacctcgtccatctccgccatcgtgcccagccccggctggccggccggcgaggtgcgcgacgagcgctgctggactgaccttgactactgcgagaagaacggggtttggtaccctgcttcaaaaacattggcagagaaggcagcatggaagtttgcagaggagaatggattggatgtggttgtggttaacccaggaactgtcatgggcctggtaatcccaccgacgatcaatgctagcatggccatgcttgttcgcctactcgaaggttgcacagaggagtatgcggatttttacatggggccagtccatgtggaagacgttgctcttgcccatattctgctgtacgagaacccatctgcatccgggaggcacctctgcgtgcagtccattgctcactggagcgatttcgcttccaaagtcgccgagctctaccccgagtacaaagtgccaaaattacccaaggaaacgcagcctgggctggtgagagcagaggctgcgtcgaagaagctgatcgcgctgggtttgcagttcagtcccatggagaagatcatcagggattcagtggaaagcctcaagagcagaggcttcatctcttga

SEQ ID NO: 3273 - DNA, 1107 bp, Oryza sativa
atgcatgggaggccgtcgaggccattagcttcctcctcgtcgtcgtcgtcgtcccgcgtcttctccttcttcttggcgccgcgggttttcttgttcttggtggtggtggtggtcgtcgtcttcttgccgggtcggtcgtcttgctggtggctggagggcacggaggagttggaggaggagatggggtttgccggggactgctcgccggtcagcggtggcgggctcagggggaagatccaagaggaggaggaggaggaggagaaggatgacaagtttttcatggcgcgtgaaaacggcaagttcagttatgggtatgcaagtgctcctgggaaaagggcttcaatggaggatttctacgagacgagaatcgatggtgttgatggagagaccattggattatttggcgtattcgacggccatggcggagctcgagcggctgaatatgtcaagcagcaccttttcagcaatttaattaagcatccaaagttcatcagtgatatcaagtccgctatcgctgaaacgtacaaccatacagattcagaatttctgaaagccgaaagtagtcacactagggatgctggctcaactgcctcaacagctattcttgtaggcgatcgcttgctggttgctaatgttggagattctagagcagttgtttgtagaggcggggatgcaattgcagtttcaagggatcacaaacccgaccagtcagatgagagacaaagaattgaggacgctgggggcttcgtgatgtgggctgggacgtggcgtgttggtggtgttcttgctgtttctcgagcatttggtgataagctattgaagcagtatgtagttgctgatccagagatcaaggaggagattgtcgatagctcccttgagttcctcatccttgctagcgatggactttgggatgttgtaagtaacaaggaagctgttgacatggtgaggcctattcaggatcccgaacaggcagcgaagaggcttctccaggaggcgtaccaaaggggtagcgccgataacatcaccgttgttattgtccgctttttggagggaacaacgactggtggtggaccaagtagggaggccgccagcgaccaaaactcatag

SEQ ID NO: 3274 - DNA, 729 bp, Oryza sativa
atgacgcgccacgccggcgcccgccgccggggcggcccgggcttcgtcagcctcatcgtcgtcgtcgtcgcggtcctctcggccgytgcaatcgccgcgaaggctgccggggaagcgaacaacctcgcgccgtggaagtccctgcccgaggagtgcgccgcctacgtgcgggagtatctcaccggcgtggcctaccgctccgacctcgaggtcgtcgcgcgggaggcctccgcgtacgcgcggaccgcccgcgtcggggacgacggccgcgacgcgtgggtgttcgacgtcgacgagacgctcctctccaacctcccctactacgccgaccacggatacgggctcgaattgttcgaccaccgggaattcgacaagtgggtggagaggggggaggcgccggcgatcccctccagcttgaagctgtacaatgaggttcgcgaccttggattcaagaccttcttgctcacgggccgcagcgaggggcaccacggcgtcaccgtcgacaatctcaagaagcagggcttccatgattgggacaagctcatactaagggcgccagctgatcgcaagaagacggcgacgatatacaaatcggagaagaggaaggaaatggaagaggaggggtacaggatcctaggcaactccggcgatcaatggagcgacctgctgggtttctccacgagcgctcgctccttcaagcttcccaatccaatgtactatattccatga

SEQ ID NO: 3275 - DNA, 1146 bp, Oryza sativa
atggctgacgatttgggccctcccactgtgctccagaagatacatgggcagtccatgatgttcagcaagatctcaccttattctttgatgaagaatcccgcactctacaatgccaacacttcttacagtgtgcctctgaagtcatacaatgggatggatgggaacaatgggttctcatctgtcacatctgtatccccagtctttgcttctgccccaaaggagaaaggtctttctgggtttatgattgacttcatgatgggtggagtttcagctgctgtctccaagactgctgctgctcccattgagcgaatcaagcttctcattcaaaaccaggatgaaatgatcaagagtggtaggctctctcacccatacaaaggtattgcggactgctttggccgcacaattaaggatgaaggtgtgattgcactgtggagagggaacactgctaatgtcatccgttactttcctacccaggccttgaactttgccttcaaagaccatttcaagcgcatgttcaactttaagaaggacaaggatggttactggaagtggtttgctggaaacctggcttctggaggagctgctggtgcttgctctctcttctttgtgtattctctggattatgctcgtactcgtctggctaatgatgccaaggctgcaaagaagggtggtgggaggcaattcaatggacttgttgatgtttaccgcaagacccttgcgtctgatggtattgctggtctgtacccgtggattcaacatctccctgtgttggtatcattgtctaatcgtgggctgtactttggaatgtatgattctctcaagccagtcgttcttgttggcaaccttcaggataacttccttgccagcttcttacttggttggggcattaccattggtgctggccttgcttcatacccaatcgacactgttcgtcgtcggatgatgatgacatctggtgaggctgtcaagtacaacagctccttggatgcgttcaagcagattgttgcgaaggagggtgcgaagtcactcttcaagggcgctggtgctaacattctgcgtgctgttgctggtgctggtgtgcttgctggatatgacaagctgcaggtggtcgtctttggtaagaagtacggttctggtggtggctaa

SEQ ID NO: 3276 - DNA, 1554 bp, Oryza sativa
atgacggcggcggcagcggctcccctcccctcccctttcagatccggccgggggaggggggcggcggcgaggcgcgtggcggcggcggcgggccgttgccccgactacgaaaatcatcgattttcacagtcgttgtgttgcaggcggacctccctccccagctactattcgatcgttcttgcagtaaatctgaacaactttgcagtcgtgccagctcgttcgttcgaaccagaagcagcgtgctctacatcaagtgcgagttccgacccgaaccgcgcttccgtgcctttggtgcaccggcacgggccgtgcgcgccatcggcggcgagcggcggcaagccatctctcgccgagaggctccgccgcgaccgcgcccgcacgaactacatcgtcaccaaggccaccggcggccgcacggcggccaccgcgctgtcggacgccgccggcggtggcacgagcatcccgacgttcctgggcgactccgtcaactcgctggagtacgtcgtcacgctcggcatcggcacgccggccgtccagcagaccgtcctcatcgacaccggcagcgacctgtcgtgggtgcagtgcaagccgtgcggcgccggcgagtgctacgcccagaaggacccgctgttcgacccgagctcgtcgtcgtcgtacgcctcggtcccgtgcgactccgacgcgtgcaggaagctcgcggccggcgcgtacggccatggctgcacgggcgtctccggcggcgccgccgcgctgtgcgagtacgggatcgagtacggcaaccgcgccaccaccaccggggtgtacagcacggagacgctgacgctcaagcccggcgtcgtcgtcgccgacttcggcttcggctgcggcgaccaccagcacggcccctacgagaagttcgacggcctcctcgggctcggcggcgcgccggagtcgctcgtgtcgcagacgtcgtcccagttcggcgggcccttctcgtactgcctcccgccgacgagcggcggcgccgggttcctcactctcggcgcgccgcccaacagcagcagcagcacggcggccagcggcttatcgttcacgccgatgcgccgcctcccctcggtgccgacgttctacatcgtgacgctcaccggcatcagcgtcggcggtgcgccgctcgccatcccgccgtcggcgttctcgagcggcatggtcatcgactccggcacggtcatcacggggctcccggcgacggcctacgcggcgctccggtcagcgttccggagcgccatgtccgagtaccggctcctgccgccgtcgaacggcggcgtgctcgacacgtgctacgacttcaccggacacgccaacgtcaccgtgccgacgatctccctgacgttcagtggcggcgccacgatcgacctcgctgcgccggcgggtgttctggtcgacggctgccttgccttcgccggagcagggacggacaacgccattggaatcattggcaacgtgaaccaacgcacgttcgaggttctgtacgattctggcaagggaaccgtcggatttagggccggtgcttgctga

SEQ ID NO: 3277 - DNA, 774 bp, Oryza sativa
atggggaaggctccgtgctgcgagaagatggggctcaagaagggtccatggacgccggaggaggacaaggtcctcgtcgcccacatccagcgccacggccacggcaactggcgcgccctgcccaagcaagccgggctgctgcgttgcggcaagagctgccggctccggtggatcaactacctgcggccggacatcaagcggggcaacttctccaaggaggaggaggacaccatcatccatctccacgagctgcttggcaacaggtggtccgcaattgccgccaggttccccgggaggacggacaacgggatcaagaacgtgtggcacaacccacctcaagaagcgcctcgatgcgccggctcagggcggtcatgtcgcggcgagcggcggcaagaagcacaagaagccgaagagcgcgaagaagccagccgccgccgacgccggccgccggcgtcgcccgagcggtccgcctcgtcgtcggtgacggagtcctcgatggcctcgtcggtggcggaggagcacggcaacgccgggatcagctcggcgtccgcgtccgtgtgcgccaaggaggagagctccttcacctcggcttccgaggagttccagatcgacgacagcttctggtcggagacgctgtcgatgccgctggacgggtacgacgtgtccatggagcccggcgacgcgttcgtcgcgccgccatccgccgacgacatggactactggctcggagtgttcatggagtccggcgaagcgcaagacttgccgcagatctag

SEQ ID NO: 3278 - DNA, 978 bp, Oryza sativa
atggatcaaattaggcaaagcgtaactctgaagaagaatcaaaagttgcatacagatatcgatatgcattccctggatcacagagcgtgctcgaagattcccagattccgaatggaagacggcgggaagcacttcgtgttcgtccatggcctcggccacggcgcgtggtgctggtacagggtggtcgccgcgctgcgcgccgcggggcaccgcgcgacggcgctcgacatggccgcggcgggcgcgcacccggcgcgcgccgacgaggtgggctccctcgaggagtactcgcgcccgctgctcgacgccgtggccgcagcggcgcccggcgagcggctggtgctcgtcgggcacagcctcggcggcctcagcctcgcgctcgccatggagaggttcccggacaaggtcgccgccgccgtgttcctcgccgcctgcatgccggccgccggcaagcacatgggcatcacgctcgaagaggtgagacaacgagaccgattactccatgctcgattagctcagcttcaccatttttcagagcttgatcagacatcgttcatgaggaggatcaaaccggatttcttcatggacagcaaaaccatcgtcctgaacacgaatcaagaaccaagaaccgcagttctgcttggccccaaattactggcagagaaactgtataatcgaagcccaccagaggatctgacgctggcgacgatgctggtgaggcctggcaccaactacatcgatgatccgatcatgaaggacgagacgctgctcactgaaggcaactacgggtcggtgaagagggtgttcttggtcgccatggatgatgcttcgagcgacgaggagatgcagcggtggaccattgatctgagcccaggcgtggaagtcgaggagctcgccggagcggatcacatggcaatgtgctccaagccgagggagctgtgtgatttgctgctcaggattgcagctaagtatgactaa

SEQ ID NO: 3279 - DNA, 720 bp, Oryza sativa
atggcagagcatttcagccacgccggcatgtacatcggctacacggcagacgccgccgcgtcctcctcctcctcctcctcgtcttcgtcgtcttcctcctcggagatgcttcggttcgacacgggctggcccgacgagacacctgcgccatcctccgtggcggggaggaggaggagcgcgggcggtgatcatcgtcaaggtcggggacagacggaggcggcggcggcgttcatcggggtgcggaggcggccgtggggcaggttcgcggcggagatccgggactcgacgcggaacggcgcgcgggtgtggatcggcacgttcgacagcgccgaggccgccgcgatggcctacgaccaggccgcgctctcggcgcgtggcgccgccgcggcgctcaacttccccgtggagcgcgtccgcgagtcgctccacgcgctctccctcggcgcggccgggggctcccccgtgctggcgctgaagcggcggcactcgaagcgaaagcggcgcaagaaagctgaactactcgccgccgccgccgccaccgccgcgacggcgaatgccacgccgcagacgcggaggatcagcaagagcacggaattgactactgcgacgacggacgagcagaagcggttcgtcgtggagcttgaggacctcggcgccgagtacctggaggagcttctctggctgtcggagatcaatggtggtagtgaccctgctgactga

SEQ ID NO: 3280 - DNA, 2210 bp, Oryza sativa
atggctgccaagctagctcgcctccacagtctccgcgaacgcctcggtgccaccttctcgtctcatcccaatgagttgattgcactcttctctaggtatgttaaccagggaaagggaatgctccagcgtcaccagctgcttgcggagttcgatgccttgatcgaagctgacaaagagaaatatgctccctttgaagacattctccgggctgctcaggaagccattgtgctgccgccctgggttgcactggccatcaggccaaggcctggtgtctgggactacattcgggtgaatgtragtgagttggcagtggaagagctgagtgtttctgagtacttggcattcaaggaacagcttgttgatggacaaattcagagccttcgtgggctccaatcatcccttagaaaggcagaagaatatctgatgggcattcctcaagacacgccctactcggagttcaaccacaggttccaagagctcggtttggagaagggttggggtgactgtgcaaacgtgtgcttgaaccatcacttgcttctggacttttttgaggcccctgatccggccaacttggagaagttccttggaactattccaatgatgttcaatgttgttatcctgtctccgcatggatactttgcccaatccaatgtgttgggataccctgatactggtggtcaggttgtgtacattttggaccaagtccgcgctttggagaatgagatgcttttgaggatcaagcagcaaggccttgatatcacacctaagatcctcattgtaaccaggctgttgcctgatgctgttggtactacatgcggccagcgtgtggagaaggttattggaactgagcacactgacattcttcgtgttccattcaggagtgagaatggtatcctccgcaagtggatctcccgttttgatgtctggccattcctggaaacatacactgaggatgttgcaaacgaaattatgagggaaatgcaagccaaacctgatctcatcattggcaattacagtgatggaaaccttgttgccactctgctggctcacaaattaggagttacccagtgtaccattgctcatgccttggagaaaaccaaataccccaactcagacatatacttggacaagtttgacagccagtaccacttctcatgccaattcactgctgatcttatcgccatgaatcacactgatttcatcatcaccagtacattccaagaaattgctggaagcaaggacactgtggggcagtatgaatcacacattgcattcacccttcctgggctttaccgagttgtgcatggcatagatgtttttgatcccaagttcaacattgtctctcctggagctgacatgagtgtctacttcccgtacaccgaggctgacaagaggctcactgctttccaccctgaaattgaggagcttctctacagtgaagtcgagaacgatgaacacaagtttgtattgaaggacaagaacaagccaatcatcttctccatggctcgtcttgaccgagtgaagaacatgacaggtctggttgagatgtatggtaagaatgcacatctcagggatttggcaaaccttgtgattgtttgtggtgaccacggcaatcagtccaaggacagggaggagcaggctgagttcaagaagatgtacggtctcattgaccagtacaagttgaaggggcatatccgctggatctcagctcagatgaaccgtgttcgtaacggggagttgtaccgatacatttgtgacaccaagggagtctttgtccagcctgcattctatgaagcgtttggtctgactgtcatcgaagccatgacatgtggtttgccaacaatcgcaacatgccatggtggccctgctgagattattgttgatggggtgtctggtctgcacattgatccttaccacagtgacaaggctgctgatatcttggtcaacttctttgagaagtgcaagcaggattcaacctactgggacaatatttcacagggaggtctgcagaggatttacgagaagtacacctggaagctgtactctgagaggctgatgaccttgactggtgtatacggattctggaagtacgtaagcaaccttgagaggcgcgagactcgccgttacattgagatgttctatgctctgaaataccgcagcctggccagcgccgtcccattggctgtcgatggagagagcacatccaagta

SEQ ID NO: 3281 - DNA, 1578 bp, Oryza sativa
atgacaatgtgcgccgcggtggcggtgctcctcgttctgacgtcgacaatggcggccgccgccggcgatggcgatggcgatggcggtggcttcgactacaagaaggcgctgcacagcgggctgctctacttcgaggcgcagcggtcggggcacctgccgtacaaccagcgggtgcggtggcgcggccactcggggctcgccgacgggctgcagcaaggggtggacctcgtcggcggctactacgacgccggcgacaacgtgaagttcggcctgcccatggcgttcacgatgacgatgctgtcgtgggccgcggcggagttctgggacgagatcgccgccgccggcgagcggcggcacgtgctggaggccatcaagtggggcaccgactacctcgtgaaggcgcacaccgccgccgacgagctgtgggccgaggtcggcgacggcgacaccgaccactactgctggcagcggccggaggacatgacgacgtcgaggcaagcctacaaggtggaccgcgacaaccccggctccgacgtcgccggcgagaccgccgccgcgctcgccgccgcgtccatcgtgttccgccgctccaagccccgctactcccgcctcctcctccgccacgccgagcagctgttcgacttcggcgacaggtacaggggcaagtacgacagcagcatcggcgaggtgagggcgtactacgcgtcggtgagcggctacggcgacgagctgctgtgggcggcgctgtggctgcaccgcgccaccggccgccgcggctacctcgactacgccgtcgccatggccgacgagctcggcggcgtcggctgggccgtcaccgagttcagctgggacgtcaagtacgccggcctccagatcctcgccgccaaggtgctcatggacggcggcgaccacccggcggcgcacgcggcaacgctggagcagtacaggtccaaggcggagcactacctctgcgcctgcctcggcaagaacgccgccgccggcgacaacgtcaaccgcaccgccggcggcatgctgttcgtccgccgctggaacaacatgcagtacgtcaccaacgccgccttcctcctcaccgtctactcccgctacctccgcgactccggcggcgacaccatccggtgctccggtggggctatggcaaccggcgacgagttggcggcgatggcgagggcgcaggcggactacgtgctgggcgacaacccggcgggggtgagctacatggtcgggtacgggcggcggttcccgcggcgggtgcaccaccgcggggcgtccatggtgtcgcaccgcgcggacgggcggttcgtggggtgcgtgcaggggtacgaccgctggttccggcgcggcggcgcgaacccgaacgtggtcgccggagccatcgtcggcgggccggacgaccgcgacaggttcagggacagccgcgacaactacatgcagacggaggcgtgcacgtacaacaccgcgcccatggtcggcgtcttcgcgcacctgcacgcccagaagatggcggcgaggactgctaataataatgccgatcgatcgatgattaaacgagtggattga

SEQ ID NO: 3282 - DNA, 2286 bp, Oryza sativa
atgaaggcgacgtcggagggggcgtggcagggggacaacccgctgcggttctcgctgccgctgctgatcgtgcagatctgcctcgtcgtcgtcttcacccgcggcctcgcctacgccctccgccctctccgccagcctcgcgtcatcgccgagatcatcggcggcatcctcctgggcccgtcggcgcttgggcggaacaagcgattcctcgacaatgtcttccccaaggacagcctcaccgtgctcgacacgctcgccaacgtcggcttgctcttcttcctcttcctcgtcggcctcgagctcgacccggcctcgctccgccgcaccggccgcaccgccctcgccgtcgccgccgccgggatctcgctcccgtttgctctcggcgtcrgcgcctcgctcgtgctccgcgccgccatcgcccccgacgccccccgtggcccgctcatcgtgttcatgggcgtcgcgctgtcgatcaccgcgttccccgtcctcgcgcgcatcctcgccgagctcaagctcctcaccaccgacatcggacgcatggccatgtcggccgcggctgtcaacgacatcaccgcgtgggtgctgcttgccctcgccatcgcgctctcgggatccgggtcgccgctcgtgtccatctacgtcctgctctgcggcgtcgcgttcgtcggcttcgccacggtcgccgtgcggcccgtgctcgtcttcatggcacggcggtcgccggagggcgacccggtgaaagaatcgttcgtctgcgccattctagtcatcgttctcgccgccggcttcgccacggacgccatcggcatccacgcgctgttcggcgcgttcgtcatcggcgtgctcgtccccaaggaaggcgcctgcgccggcgcgctgacggagaaggtcgaggacctggtgtcgtcgctgttccttcccctctacttcgtgtcgagcggtctgaagacggacgtcaccaccatctccggcgccaagtcgtgggggctcctcgtgctcgtcatgacgacggcctgcgccggcaagatcggcggcacggtggcggcgtcgctgctgatgcgtgtgccgctgcgtgaggcgctcgcgctggggatgctgatgaacaccaaggggctcgtggagctcatcgtgctcaacatcggacgcgaccggaaggtgctcaacgaggaggccttcgccatcctcgtgctcatggcgctcgtcaccaccttcatgaccacgccggccgtcaccgccgtgtacaagccggcgcggcggcaggcgtcgtacaagcaccgcacggtggagcgcgccgacgccgacagcgagctgcgcgtgctcgcgtgcttccacgccagccgcggcatcccgacgctgatcaacctcgtggaggcgtcgcgcggcacgaggaggagcaagctcaccatgtacgccatgcacctcgtcgagctgtcggagcgctcgtcggccatctccatggtgcagcgcgcgcgccgcaacgggctcccgttcgcgagccggcgcggccacgaaggcggcggcggcggcggggaggtggtggtggcgttcgaggcgttccagcggctcaccgccgtgacggtgaagccgatgacggccatctccgacctcgacaccatccacgacgacatcgtcgcgtcggcgctggacaagcgatccgccatcatcctgctcccgttccacaagatgctctgccatgacggcacgctcgagcccgtggaccgggcgttccaccaggtgaacgtccgggtgctccgcgacgcgccatgctccgtcgccgtcctcgtcgaccgcgcgctcggtggcgcggcgcaggtctcggcgccggacgtctcctactcggtcctcctcctcttcttcggcggcgccgacgaccgcgaggcgctcgcgtacgcctcacgcatgggcgagcaccctggcatcgcgctcaccgtggcccgtttcacggccgccgccgacgacgccgccgaagacgacgacgccatacaaaagcacatctccaacgtgcgcaaggccggaaacgacggagcgttcaagtacgacgagagcaagactggtggtggccgggcgtcggcggcggtggcgacgccgctggtggacaagacggactgcccggagctcggccacgtcgggagctacctggcgacgccggagttctcgacgacgtcctccgtgctcgtggtgcagaagtacgactcgagaggtgacactggcacatcgtcgtcgagccaagccggaggagaggcgaccgtggaggaatccggcgtgccaatccgccggccatag

SEQ ID NO: 3283 - DNA, 2990 bp, Oryza sativa
atgtcacctcgggtagcccaacgagagtacgagccgttgttacttgtactcctcctcctactacaaaccttgatcgcgagctcgcttccatgcttgccggaccaggcggcggcgctgctccagctgaagcgatcgttctcggcgaccaccgcgtccgccaccgcgttccggtcatggcgcgccggcaccgactgctgccgctgggcgggcgtccgctgcgacggcggccgcgtcactttcctcgatctaggcggccgacgcctgcagagcggcggccttgacgccgccgtcttcagcctcacgtcgctgaggtatctcaacctcggcggcaacgacttcaacgcgtcacagctcccggccaccggattcgagaggctcactgagctcacccatctcaacatctcccaacccagcttcgcaggccagataccagcaggtattggaagcctcaccaacttggtttctcttgatctgtcatctagcatctacatcgtcaatcaaggagatgacgatgtcagtatcatgtcaaatttgttacccccctggggcttctcgagggtaaacttcgagaagttgattgcaaatcttggtaatctgagggagctctatcttggattggtgtacatgtccaacggaggcgaagggtggtgcaatgctctggctaattccactcctaagattcaggttctgagcctaccattatgccagatctctggtcccatttgccaatctctgtttagtttgcgatccctttctgttgttgacttgcaaggaawtgacctgtctggtgccatacctgaattcttcgctgatttgtcatcccttagtgttcttcagctttcaagaaataagtttgagggtttgtttccacaaaggatcttccagaacagaaaactgacagctattgatattagctacaactatgaagtttatggtgatttgcccaattttccacctaatagcagtttgatcaaattgcatgtcagtggcaccaagttctcaggttacataccaagctctatttctaatctcacggatctgaaggagctgagtctgagtgcaaataatttccctacagaactgccgtcttctctaggaatgcttaaatccttgaacttatttgaggtttcggggctcggcctagtaggatcaatgccagcttggataacaaatctaacatctttgacagatctccaaatttctcattgtggtttgtctggatctttaccatcttccataggcaatctcaagaatctcagaagaatgtctttattcaagagcaacttcactggaaacataccattgcaaatctttaacttgacacaactgcatagcttgcatcttccactaaacaacttcgtggggacagtggaacttacctcattctggagactaccatacttatcacaccttgatctttcaaataataaattatctgtggtggacgggttagtcaatgattcagcagtgtcctctcccaaagtaaaattcttgagcctagcttcctgcaacatatcaaagtttcccaatgcattaagacatcaagataagataatcttccttgacctttcaaataaccaaatgaatggggcaatacctccatgggcatgggaaacttggaaagaatcgttcttcttggacctatcaaataacaaatttaccagtcttggacatgacacgttgctccccctgtacacaagatatatcaatctcagttataatatgtttgaaggacccatacctatacctaaagagagtacagactctcagttggattactcgaataatcggttttcttctatgccgtttgatctaattccatatcttgctggtacactatctctaaaggtctctatgaacaatgtctctggagaagtcccatcaacattttgtactgttaagagtctccaaatccttgacctttcctacaatatcttaaatggctcaattccttcctgtctgatggagaattcatcaacactaaaaatattaaatttgaggggaaatgaacttcgcggagagttgccacataatatgaaggaagactgtgcatttgaggcattggatgtcagctataattggattgaagggacactacctaaatcattagtaacttgcaaaaacttggtggtacttaatgttgcgaacaatcaaattggaggctcttttccatgttggatgcatcttcttcctaaactccaagtccttgtcctgaagtccaataagttctacgggccgttggggcctactcttgctaaagatgatgaatgtgaactacagtatctccgaattcttgatctagcttcaaacaacttctcgggagtattgccttatgaatggtttaggaaactaaaatccatgatgtcagtctccattaacgaaacattggtcatgaaagatggagatatgtacagcacatttaaccatataacatatctttttactgctagatttacatataaaggactggacatgatgtttcctaagatcttaaagacctttgtactaattgatgtctcaaataatagattccatggcagcattcctgaaactattgccacactaagcatgctcaatggtctcaacatgtcacataatgctcttacaggaccaattcccaaccagcttgctagtctgcatcaacttgagtctttggacctctcatcaaataagctttctggggagatccctcaaaaattagcatccttggacttcctatcaacattgaacctatccgataatatgctggagggaagaataccggagtcacctcatttcttgacactccccaatagttcatttatacgaaatgctggtttgtgtgggcctccattgtcgaaagaatgcagcaacaaatcaacatcaaatgtgatgccacacctttccgaagagaaatctgcagacattatactatttctctttgttggattgggttttggtgttgggtttgctattgcaattgtagtgaggaaaccttgcattggcaaata

SEQ ID NO: 3284 - DNA, 3183 bp, Oryza sativa
atgcgaacaataccttctttagcttcgttgctaaaatcagacaagatcattgacaaatactttgctgctcagtcactggctagccttgtttccactggaagcagaagtatacagcttgctattgcaaattctggtgcagttatgggtactatagctatgattggacagatcgaatctactatgccaaaccttgttgctatggctgaagaattcaagttggcagataacccaagtaaaataatattgagaagcctttttgagcttgaagatgtccgtacgagtgctactgctcgaaggtccattccgttgcttgtggatctacttaaaccaatgccagacagacaaggcgcacctctggttgctttgcaccttctgactcaactagcggaaggcagtgagacaaataaagtagctatggcagaggctggagtcttggatgctttaacaaagtatctatctttaagtcctcaagactcaactgaaactactataatcaatctactgcggatcctatacacaaaccctgatcttctttaccatgaatcctcaattagcacttcaaatcaattggtagctgtcttacgtctgggctcaagaaattctaggcttaatgcagcaaggacgttacagaacctctttgattcagagaatatwagagacactgaagtggcttggcaagctattccgccattacttgatatgcttgagtcaggaactgaaacagaacagcaggcagcacttggtgctctaatcaaactttcttctgggaatatctcaaaggcttcagctttgtttgatgtagaaggcactacacttgaaagcctctacaaaattttatccttcagttcgtcattggagcttaagaatgatgccgctcagctctgctatattctttttgagaattctactataagggcatcacccattgcctctgaatgccttcaacccctgatatcattaatgacgtcaggctctacttttgttgttgaacctgcagttcgtgctctaaataggctactggatgaggagtacaatgcagagattgctgccactagtgaagttgttgatcttcttgttagttttgttcctgggactaatcaccaactgtctgaggcatgtattggtgctctcataaaattgggtaaggaccgtcccaactgcaagcttgagatggttaaagctggcattattgaacatgtgcttgatatgattcttgatgttcctgtttctgttagttcatcgattgctgagttgcttcgcattttgacaaacaacagtggcattgctaaaagttctgctgcagcaaaaatggtagagccacttttcttgcttttacgtcgcccagatgtcactatgtgggaccagcatagcgcattgcaagctcttgtaaatattctagaaaagcctcaaagtctcgcggcattgaagttaagtcccagtcaaataattgaaccgttaatatcattccttgagtctccctctcaagcaatccagcaacttggcactgaattactgacacatcttctagagcaggagcatttccaacaggatatcactacaaaaaatgcagttgtccctctggtgcagcttgctggtattggaatcttgagtttacaacagactgcagttaaagcgcttgagagcatatctcagagttggcctaaggctgtagcagatgcaggtggaattcttgaactttcaaaggtaattgtccaagatgatcctcagccaagtcaagcattatgggactctgcagcacttgtattatgtaatgttttgcgctatagctctgataactatgtccaagtgtcaatagctgtacttgtaagactgctgaattccaccatcgagagtactgttacaatagctctgaatgctcttcttgtgcaagagaaaagtaagtcacgctgtgctttagccatggctgaggctggggctgtgcgtgctctgttaaagctccttaagagccatcgttgtgaggaatccgctgcaagattgcttgaagctctgataaacaatgcaagggtccgggagacaaaagttgccaaatattctattggtcctctctcacagtaccttttagatccccagtctaagaatcagtcagccaagttcttggttactcttgcactgggtgacattttccagcatgaagcactcgcaagagcaagtgactctgtatctgcttgccgtgctcttgtaagcgtacttgaggaccagcctacggatgatatgacaatggttgctatttgtgcactacaaagcttagttctgcacagcaggacaaataggcgtgctgttgcggaggctggaggcattttggttgtacaggaattgcttctgtctccaaatgtagatattgcaggacaggctgctcttctaatcaagtatctatttttaaaccatacacttcaagaatatgtttcgaatgagctcattcgatctctcactgctgccttggaaagagagctactctctacatcaaccatcaatgaagttattttgaggactatacatgtgatattcaacaactttaaaaaagtccggttttctgaggcagcaaccttgtgcataccccatttggtttgtgccctgaaggatggaaatgaggctgcccaagaaagtgtgctcgacaccctttgcttgctgaaagaatcttggccacaaatgaatgaggacattgcaaaagcccaatccctgatttctgctgaggcgatacctgtactacaaatgcttatgaagacatgtcctcccagttttcacgagagagctgatagcttgctgcaatgcttacctggttgcctgacagtgaccatcttacgtgggaataacttaaagcagacaatggggagtacaaatgcattttgctgcctgcaaataggaaatgggcccccaaggcaaactaaggtggttaacaatagcatctgcccagtatggaatgagggtttcacttggttatttgatatcccaccaaaggggcagaagctatacatcttgtgcaaaagcaaaaacacgtttggaaagtcgacactcggtcgagtcaccatccagatcgacaacgttgtcaccgagggtgtatacagtggtttcttcagccttaaacatgatggtggcaaggatggctcgagaaccctagagatagagattgtatggtctaataggccatccaatgacaatatgtag

SEQ ID NO: 3285 - DNA, 3045 bp, Oryza sativa
atggcatggggaggcgcaggcaatcttgtgcctgttaggccagcgggttctgtcaatgctaaaggacaggggccacgcgagcagcgcgttaaaggcagcaagctcctcagtggccgcttcttgtgcataggtggcatcctcaaggagaggtgtagtgatggcagcagtcgggcaatgtggaggcacagagagggaggaggagcaggagaagatgggagggggagatggaggtggcattggctggggaagaagagggggaacagaagtgggacatctatagcaaaagtaaatgctgcagcactacttagcgcactctgcaaggaagaggacctgcgtgtcaagtctgaahctactggagcaaagaaggcggctgctgaagctatttttgaagtgtcttctggtggactttcagatgatcatataggtatgaaaatatttgtgacagaaggtgttgtgccaaccctctgggacatgctcaaacctaagtcacaccaagataaagtagttgagggttttgtcactggtgccttaaggaatctctgtggagacaaagatggttattggagggccaatcttgaagctggtggagtagaaattataactggtcttatttcatctaagaatactacttcacagtcaaatgctgcctcccttttagcacggttggtatctgcctttggtgatagcatccccaaaattattgatgccggggctgttaaggctcttcttcgcctcctaaatcgagacaatgacatttcagttcgtgaaagtgcggccgatgctttggaggctctatcttccaagtctagtattgcaaagaaggctgtggtagatgctggtggcattcctgttctcattggagcagttgtagctccttcaaaagagtgcatgcgtggggatacttgtcattctctacaaagtcatgctgttcatgctttatcaaatatctgtggtggaacagtatctctgttgctttatcttggaragctctgccaggtgcccagtccacctgttcccctcgctgacattcttggtgcacttgcatatacattgatggtatttagtggcactgatggtaaatcttttgatccgattgagatagaaaatattttgattgtgctcctgaagtcctatgatagtaatcttgtgcttgatcgtattcttgaggctttagccagtctatatggaaatgcatgtctgtctggtaggcttaatcactcgaatgcaaagaaggtccttgttgggctgatcactatggcttctgctgatgtgcagaaaaatcttgttcatgctttaacgagcttgtgctctgatggtattggaatatgggatgctctaggaaagagagaaggaactcaattgctgatatcatttcttgggctttctagtgagcagcatcaggagtatgctgtttcattgttggctatattgagtgatgaagtagatgacagtaaatgggcaataaccgctgctggaggtattcctccacttgtccagctactggagacaggatctcaaaaagcaaaagaagatgctgctcatatcttgtggaacttgtgttgtcacagtgatgatatcagtgcatgtgtcgagagtgctggggcagttcttgcattgctttggcttctaaagagtggtagccctcatggacaagaggcatcagctaaagcactcaagaagattatacggtctgctgattcctccacaattaatcagttacgagcactgctgcttagtgactctcttagtacaaaggcccatgccattacagttcttgggcatgtacttgtgatggcttcccagagagatctagtgcagaatggagctccagccaataaagggctcagatctcttattgatattcttgagtcatcaaatgaggaaactcaggaacaagctgcaactgtggtggctgatattttcagtacccgtcaggatatttgtgatatcttaggaactgatgaaattattcagccatgcatgaagcttttgacaagtgggaaccaagttattgcaacacaatctgctcgagctttaggagcactctcccactcggctaatgccatgttgaagaacaagatgtcatgcatagctgaaggctatgtgcaaactcttatagagatgtcaaagtcaccatccattgatgctgctgaaacaacaattgctgcattggcaaatttcctatcagatgcacatattgccaaggaagcactagacggcaacatcgtcctggctttgactagagtacttaaggaagggagcttggaaggaaagattagtgcttcacggtcgctctgtcagttgctcaaccagttccccctcaatgaagttattccagattactcgcagtgctattttataattcatgcactgctggtgtgtctatctggcatcaatttagaaaatgctactaatttggatcccttgaatgtacttgcatggatggctaggaccaaggagggcgcgcactttagttctcccttgtggtctgcctttcttgatgttccagaaagcttagagcctttagtgcgctgtatcagtgttgggcttccaccgattcaagataaggccattcaaattcttgcaagtttatgtcaggaccaaccttctctacttggtgagcatttgaacagaagtcaaggatgcattgcttcccttgctagtagagttattgaatcaacaaacatggaaataagaattggcagtgccatcaccctcatatctgcaatgagacacagcagggaacactcaattgatgttattgaagcatcagggcatctgaagaatctaatatctgcatccattgatatgatgaagcaagattctgccccaacatccctagatattgaagtttggaaaccataccccgaaaacagtttgtataactatgataaggatgttctgggtgtgtctggatcaggaaaggtcttggaagaaacagttgcgctttggttgctctcacttatttgttcttctcatttgagtagtaaacttactgttatggacctcggtggtgttgagactatatctgataaaacttgctag

SEQ ID NO: 3286 - DNA, 1257 bp, Oryza sativa
atgggggctgaggcgaaggcgccgctgctggaggggaggaggggcgcgacgccggcgcagacgctgggcaacatcgtcgtctccatcgtcggcaccggcgtgctcggcctcccctacgccttccgcacctccggctggctcgccggagctctcggcgtcgccggcgccggcgccgccaccttctactgcatgctcctccttctggattgcagagacaagctacgggagcaagaagaggtggatcacgacggcaactacacctatggcgacctcggcgagaaatgcttcggcgccattgggagatacttcaccgaggtcaccatcatcctctcccagaccggcggctccgtcgcctacctcgtcttcatcggccagaacatctgctccgtcttccccaccaccgccgccggcggcaaggagccgccgcgtcgcgtgtcgccggcagccgtcgtcctcgccgtgctcctgccggccgaggcggcgctctccttcatccgctcgctgtcgtcgctggcgccgttcagcatcctcgccgacgcgtgcaccgtcctcgccgtggccaccgtcgtcagggaggacgtccagctcctcgccggccgcggcgggagcccattccaggggcggagcgccctcgcggggctctggggcgtcccgttcgcctgcggcgtcgccgtgttctgcttcgaggggttctgcctgacgctggcgctggaggcgtccatgtccgaccggaggaggttccgccccgtgctcctccacgccatcgccggcgtcaccgccgtctacgtctgcttcggcgtctgcggctacctcgcctacggcgacgtcaccagagacatcgtcactctcaatctccccaacaactggtccaccgccgccgtcaagatcgtgctgtgcgtcgcgctggcgctcacgttcccggtgatgatgcacccgatccacgagatcgtggaggcgcggctgttcccgtcggcgggcgggtgggcgcggaagcgcgcggcggtgcaggcgagccgcgtggcggtggtgggcgcggtgacggcggtggcgtgcttcgtgccggcgttcggggagttcgcggcgttcgtggggagcacggtgtgtgcgctgctctccttcgtgctcccggcgctgttccacctccgcctcgtcggagcggcggcgagcgcgtggcggcgcgcggtggacggcggcttcttgctccttgggctggccttcgcggcccatgggctttacacggttgtctcgggcctctga

SEQ ID NO: 3287 - DNA, 495 bp, Oryza sativa
atggcgtgcgaccagcaggcggagctccggcgggtgttcgagctgttcgaccgtgacggcgacggccggatcacccgggaggagctgacggagtcgctggagaggctcgggatgcccgtgcacagggaggagctcgccgccaccatcgcccgcatcgacgccaacggcgacgggtgcgtcgacatggacgagttcacccagctgtacgagaccgtcatgcgcgtcgacggcggcggcggcggcggcggcggcgcctgcgacgtggatgaggcgagcatgcscraggctttcracgtgttcgaccggaacggcgacgggttcatcaccgtggacgagctgggccccgtgctggcgtcgctggggatcaagcagggccggacggcggaggactgcggccgcatgatcggccaggtcgacagggacggcgacggccgcgtcgacttcctcgagttcaagcagatgatgcgcggcggcgcgttcgccacgctccggtga

SEQ ID NO: 3288 - DNA, 3216 bp, Oryza sativa
atggattccttgtgggcagcgatagcggcactgtttgtggcggcggcggtggtggtgaggggggcggcggcggccgacgacgcccagctgctcgaggagttcaggcaggcggtgccgaaccaggcggcgctcaaggggtggagcggcggcgacggcgcgtgcaggttcccgggggccgggtgccggaacgggaggctcacgtcgctgtcgctcgccggcgtgccgctcaatgccgagttccgcgccgtcgcggccaccctgctgcagctcggcagcgtcgaggtgctgagcctccgcggcgccaacgtcagcggcgcgctctcggcggctggcggcgcgaggtgcgggagcaagctgcaggcgctcgatttgtccgggaatgccgcgctccggggctccgtcgccgacgtggcggccctggccagcgcctgcggcggcctcaagacgctgaatctctccggcgatgcggttggtgcggcgaaggtcggtggcggtggtggcccgggctttgccgggctggactcgcttgatttgtccaacaacaagatcaccgacgatagcgacctccggtggatggtggatgccggagtcggggcagtacggtggttggaccttgccctgaacaggatctccggtgtcccggagttcaccaactgctccgggcttcagtaccttgacctctccggcaacctcatcgtcggtgaggtgcccggcggggcactttccgactgccgcggtctgaaagtgctcaacctctccttcaaccacctcgccggcgtgttccctccggacatcgccggcctcacgtcgctcaaagccctcaacctctccaacaacaacttctccggcgagctccccggcgaggctttcgcaaagctgcagcagcttacggcgctctccctctccttcaaccacttcaacggctccatcccggacaccgtagcctcgctgccggagctccagcagctcgacctcagctccaacaccttctccggcaccatcccgtcgtccctctgccaagatcccaactccaagctccatctgctgtaccttcagaacaactacctcaccggcggcatcccagacgccgtctccaactgcaccagcctcgtctccctcgacctcagcctcaactacatcaatgggtccatcccggcatccctcggcgaccttggcaacctgcaggacctcatcctgtggcagaacgagctggagggcgagataccggcgtccctgtcgcgcattcagggcctcgagcatctcatcctcgactacaacgggctcacgggtagcatcccgccggagctagccaagtgcaccaagctgaactggatttctttggcgagcaaccggctgtccgggccaatcccttcatggcttgggaagctcagctacttggctatcttgaagctcagcaacaattccttctcggggcctataccgccagagctcggtgactgccagagcttggtgtggctggacctgaatagcaatcagctgaatggatcaatacccaaagagctggccaaacagtctgggaagatgaatgttggcctcatagttggacggccttacgtttatcttcgcaacgacgagctgagcagcgagtgccgtggcaaggggagcttgctggagtttaccagcatccgacctgatgacctcagtcggatgccgagcaagaagctgtgcaacttcacaagaatgtatgtggggagcacggagtacaccttcaacaagaatggttcgatgatatttctcgatttgtcatataatcagctggactcggcgattcctggcgagctgggggacatgttctacctcatgatcatgaatcttgggcacaacctactgtcaggtaccatcccatcgcggctagcagaggccaagaagcttgcggtgcttgacctgtcgtataaccagttggaagggccaatacccaactctttctcggcactttccttgtcggagatcaatctgtcaaataatcagctgaatggaacaattccagagcttggttcccttgccacatttccgaagagccagtatgagaataacactgccattgggagcaagcggcggaggctgaagaatgaggaggcgagtacctctcgtgatatatatattgatagcaggtcacattctgcaactatgaattctgattggaggcaaaatctctccggtacaaatcttcttagcatcaacctggctgcattcgagaagccattgcagaatctcaccctggctgatcttgttgaggccacaaatggcttccacatcgcatgccaaattgggtctggtgggtttggtgatgtctacaaggcacagctcaaggatgggaaggttgttgcaatcaagaagctaatacatgtgagcgggcagggtgaccgggagttcactgcagaaatggagaccattggcaagatcaaacaccgtaaccttgttccacttcttggctattgcaaggctggtgaggagcggttgttggtgtatgattacatgaagtttggcagcttggaggatgtgttgcatgaccgcaaaaagatcggtaaaaagctgaattgggaggcaagacggaaaatcgctgttggagcagcaaggggtttggcattcctccaccacaattgcattcctcacatcattcaccgagacatgaagtcgagcaatgtgcttatcgatgaacaactggaagcaagggtatctgatttcggtatggcgaggctgatgagcgtggtggatacacaccttagcgtgtycactcttgctggaacgccagggtatgtaccaccggagtactaccagagcttcagatgcaccaccaagggtgatgtttatagctatggtgttgtgttgctggagctgctcaccgggaaaccgccgacggactcggcagactttggcgaggacaataaccttgtggggtgggtcaagcagcacaccaaattgaagatcacggatgtcttcgaccctgagctactcaaggaggatccatccgtcgagcttgagctgctggagcatttgaaaatcgcctgtgcgtgcttggatgaccggccgtcgaggcggccgacgatgctgaaggtgatggcaatgttcaaggagatccaagctgggtcgacggtcgactcgaagacctcgtcggcggcagcgggctcgatcgatgagggaggctatggggtccttgacatgcccctcagggaagccaaggaggagaaggattag

SEQ ID NO: 3289 - DNA, 2025 bp, Oryza sativa
atgagtggagagagtcccccactgctgctgctgctgctgcgcggggcaaccggccaccggctgcacctcctcgggtcggggatttccgggcttgaagcagcagcactaggaaggttctacgcgttcgagaaggcgcaccggctggacccgacgtccagcggccgtggcgtccggcagttcaagaccgcgctcctgcagaggctggagagggagaacgaccccacgctcaaggggagggtcaagcagagcgacgcccgcgagatgcagagcttctaccagcactactacaagaagtacatccaggctcttcagaacgctgccgacaaagccgaccgtgctcaactcactaaagcttaccaaactgctgccgtcctgtttgaggtcctcaaagccgtcaatgtctcccagaaaattgaagttgatcaagcgattttggagacacacaaccaagtcgaggaaaagaaaaaactttatctcccttacaacatcctcccgcttgaccctgacagcgctaatcaggctatcatgcgatatcctgagattcaagctgcttttcacgctcttcgtaatacaagaggactaccgtggcccaaggatcatgaaaaaaagcctgatgctgatcttcttggttggcttcaggcgatgtttggatttcagaaagataacgtgtccaaccaaagggaacacctcatactcttacttgccaacgtccatataaggcagattcccaagcccgaccaacaacccaaggtctcactcttactcaacgtccatatcggtgcttgtgtcattctggtgttggatgaccgagcactggacacagtcatgaagaagctatttaagaactacaagagatggtgcaagtaccttggccgcaaaagcagcttatggttgccaactattcaacaagaagtgcagcagcgtaagctcctctatatgggtctttatcttctcatctggggtgaggcggctaacctgagatttatgccggaatgtctatgctacatctatcatcacatggcttttgaactatacggtatgttggctggaaatgtgagtccaacgacaggtgaaaatgttaaaccggcttacggtggtgatgaagaagcctttttgaagaaagttgtgactccaatatacaaagtcatcgagaaggaagctgaaaggagtgaaagtagtgaaaggagcgaaaggagcaagacaacaaaatctaagcactcacattggagaaattatgatgatctaaatgagtacttttggtcaagagattgtttcagattaggatggcctatgagagctgatgcagatttttttaagaccccagattatgcttatcatgatgaagtgagcggagagaacagaagagttggtagtggccagtggatgggaaaagtaaattttgttgagataaggtcattttggcacatcttccgcagctttgacaggatgtggagcttcttaattttatctttacaggccatgattataattgcttggaatggtggtacaccaagtgatatctttgatgcaggagtatttaaacaggttttgagcatattcataactgctgcaatactgaaattgggtcaagcaattctggacatcatcctgagctggaaagcaagaagaagcatgtctcttgctggcaagctgcgctacatcttgaagttgatatcagctgctgcatgggttgtgattttaccagtaacttatgcatacacctgggagaatcctacaggtcttgcaagaacaattaaaagttggctcggtgatggtcagaatcaaccatcattatacatcttggctgttgtgatatatttagcaccaaacatgctgtcggctgtgttatttcttttcccagtccttagaagagctcttgagcgatcaaatcttaaagttgtaacattcatgatgtggtggtcgcagatcaagccacttgtgcgaccaacaaaagatataatgaaggagccaatacggaagtttcaatggcatgagtttwcccacacggtgtgcctcctgaaatga

SEQ ID NO: 3290 - DNA, 1344 bp, Oryza sativa
atgccgccgaggcagtggaggccgatgctggcgtcggcgaccaagtgctgcgcggcggaggacgcggtggtggcggtggatggcagcggcggcgggggcggcctcgcgcggtgcaggccggcgcggtccgagttctcacggaggctggcgtcgttccggaagctgtcgtcgatgaccaacagcccggcgtcgtccgtcgcgggggcggcggaaggggggaaagacgacggcgaggaggggggctgcggcggtggcggcgtgtccggcccgctgcagctctactccttcagcttctccgagctccggtccatcacgcacgacttctccagcagctacctgctcggggagggcggcttcggcgccgtccacaagggcttcgtcgacgccggcatgcgccccggcctcctgccccagcccgtcgccgtcaagcagctcgacatcgccggcctccagggccaccgggagtggctggcggaggtgatcttcttggggcagttccggcacccgcacctggtgaagctgctgggctactgctgcgaggacgaggagcgcctcctcgtctacgagttcatgccgcgcggcagcctcgagaaccacctcttcaagaggatatcggcgacggtgccgtggggcacgcgtctgaagatcgccatcggcgccgccaagggcctcgccttcctccacggcgcctccacccccgtcatctaccgcgacttcaaggcctccaacatcctcctcgactcggagttcacggcgaagctgtcggacttcgggctggcgaagatggggccggagggttcggagactcacgtgacgacgcgggtgatgggcacgcacgggtacgcggcgccggagtacgtgatgacggggcacctcaacatcaagagcgacgtgtacagctacggcgtcgtgctcctggagctcctgacggggcggcgcgccatggagcatgtcagggggaggagcctccacgccgaccaggtggtcaagatcgtcgactggacccgcccctacctcggcagcagccgccgcctccgctgcatcatggacccgcgcctcgccggccactactccgtcaaggccgcccgcgccgtcgcccacctcgccgtccagtgcaccagcccgcagccgcgcgaccgcccgcgcatggccgccgtcgtcgacgccctcgagcgcctgcagggcttcaaggacatggccgtcaccgtcggcctctggcccaccaacgcccccgtcgccggcaggaacgccatctccgccaagatccgcgccgaggtcagaggcgccggctccggcggcggcgcggcttcgcggcggcggagcgcttccgccaagctgccctga

SEQ ID NO: 3291 - DNA, 1353 bp, Oryza sativa
atggcgcccatctcctgccgcgaactctccccgcacctctcctctctcccccgcgccgccgccaccaccaccgcccacacgcacctctccttccgacgcgctccacctccgtgccgcctcctcaccggcacagccagcgacgacggcgacaggctgcgcctcctcccctccgcggccacgagggacgatgcgctcgcctccctcgtcggccagctcgagcacgacgtcgtcgttcgccacggacaagcggcggaggaggaggaggaggaggaggaggatgaggagctgtatcaccacgatagccaggacctcggggcggcgcggaggcgccatcaccggcagcaccaccaggacgggcacgagctggcggcgcggtggcgggagatccacgggcgcgacgactgggcggggctgctcgacccgatggacccgctgctccgctcggagctcatccgctacggcgagttcgcgcaggcgtgctacgacgccttcgactacgacccgtcctcccgctactgcggcagctgcaagtacccgcgccgcgccttcttcgaccgcctcggcatgcccgccgccgcgcggggctacaccgtgacccgctacctctacgccacctycaamttycgcttyccaaacttcttctcgcagtcgcgcgcgggtgccaagatctggagccagsgcgccaactggatcggctacgtcgccgtttccaccgacgaggagaccgcgcgcctgggccggcgcgacatcgccatcgcstggcgcggcacggtcaagggsctcgagtgggtctccgacctcatggacttcctccgccccgtygccgacgaaggcatcccgtgcccggaccgggaagtgctcacggaggtccgccgcctcgtcacccgctacgccgcgctcggcgaggacgtgagcgtgacggtgacggggcacagcctcggcagcgcgctggcgatgatcagcgcgtacgacatcgcggagtcgggcgccgcgagcgcggcgcacggcggcgggaaggaggcggcggcggcggtgtgcgtgtactcgttcgcggggccgagggtggggaacgcgaggttcaaggagaggttcgagggggagctcggggtgaaggcgctgcgggtggtgaacgtgcacgacggggtggcgcggatgccggggatcctgctgaacgagggggcgccggcggcgctgcggcgggtggcggagggcatcctccgggtgccgtggtgctacgcgcacgtcggcgtggagctcgcgctcgaccacaagcggtcgccgttcctcaaggacacgctcgacccggcctgcttccacaacctcgaggcgcacctccacctcctcgacgggtaa

SEQ ID NO: 3292 - DNA, 2589 bp, Oryza sativa
atggtttcaaaatcttattcaaatctgttagaaatgagttgtggagatggagttgactttcggcaaccttttaaatctcttcctcgtgtggtaacctctcctggcattatatctgatcctgattgggacactagaagtgatggcgattcagttggttcagcatcttctgttgagaggaaaataattgttgccaacttccttccactgaactgtacaaaagatgaagctgggcaatggtccttctcaagggatgatgatgcactgctcatgcaacttaaagatggtttttcaaatgagactgatgtcatttatgtgggtagtttgaaggttcaggtagatcccagtgagcaggatcaagttgcacagaagcttcttagagattaccgatgcatacctacttttctccctcctgacctccagcagcagttctatcatggcttctgtaaacagcaattgtggccacttttccactatatgcttcccatttgtcttgacaaaggtgagctctttgatcgctccctgtttcaagcctatgtccgagctaacaaactctttgccgacaaagttatggaagctattaatacggatgatgatcatgtctgggttcatgattatcacctcatgcttctcccaacatttctgaggaagaggttacaccgaataaagctaggattttttctccacagtccatttccctcctcagaaatctacaggtcactgcctgtaagggatgagatcctgaagtcattgcttaatgctgatcttattggtttccaaacatttgactatgcccgccacttcctttcttgttgcagcagattattgggtctgcattatgaatcaaagcgcggttacattggaatagattactttggaagaacagtgagcctgaagatcctctcagtgggtgtccatgttggccgtcttgagtccatcctaaagttgcctgctacagtaaagaaggttcaagaaattgaacaaaggtataaaggcaagatgctcatgttaggtgtagatgacatggacatcttcaaaggaatcagtctaaaactgcttgggttggagctacttctagataggaacccgaaactcagagggaaggttgtccttgtacagattgtcaatccagcaagaagcacagggaaagacgtggaggaagcaataacagaatctgtctctgtagctgaaagaatcaaccttaagtatggctctgtagattacaagcctgttgtccttattgatcatcgcataccattttatgaaaagattgcattctatgctgcatctgattgttgtattgtaaatgctctgagggatggtatgaacttggtaccatatgagtacactgtttgccggcagggaaatgaggagatagataatgccagaggcagtgacacaaattgccatcacacaagcacactaattgtgtctgagtttgttggttgctcaccatctcttagtggtgctttcagggtaaatccttggagtgttgacgatgtggctgatgccttacaccatgcaacagacttgactgaatccgagaaaaggctacggcatgaaaagcactaccgttatgttagatctcatagtgttgcttactgggctcatagctttgctcaagatctggaaagggcatgcaaagatcactacagccgaaggtgctgggctattggttttggtctgaacttcagagttattgctctttctcctggctttagaaagctctctttggaacactttgcttcttcttacaacaaggctaccagaagggcaatatttcttgactatgatggcactcttgtaccccagtcatcaatcaataaagctccaagcgatgaacttattactattctcaacagcttgtgtgatgacccgaagaatgatgtattcatagtcagtggaagagcgcgtagtttgcttgatgagtggtttgctccatgtcagaagcttggtattgcagcagaacatggctattttgtcagatggaacaaagcagctgaatgggaatcaagctatccaaaccatgattttgagtggaagcacatcgctgaaccggtcatgcaagtttacaccgaaacaactgatgggtcctccatagagccaaaggaaagtgctctagtatggcattatttggatgcagaccatgacttcggttcctgccaagcaaaggaactactgggtcatcttgaaagggtgctatcaaatgaacctgttgttgtgaagtgtggtcattacattgttgaagtcaaaccacagggagttagcaagggtcttgttgtggacaaggtaattcacagattgatgaacaacgggaagacgcctgatttcgtagtgtgcatcggtaacgatcgatctgatgaggacatgttcaaaagcatcgacagcatgacctccagctccgcattccctgcagttccagaagtctttgcctgttcagttggtcagaaacccagcaaggcaaagtactatgtcgacgatgctggtgaagtagtaagattgctcaagaatgtagctggcatttcgtcgcaccgggaggccgtcagccatggacgtgtgaccttcagggatgtgatggattatgtggagtga

SEQ ID NO: 3293 - DNA, 1143 bp, Oryza sativa
atggccgccgcgtcctccttcaccgccgccgccaagttcttggcgccggtgtccgcgagatccgccggggactacaagccgccgctcccgctcccggcctccgcctccctcaggcccgggaggaagcccgcgccccgcctccgcaccgcgctcgccgtctcctccgacgtgctccccgggaacaaggccgcccccgccgccgccgcccactccgctgtcacgcgggaagaggctttggagctgtacgaggacatggttcttggccgtattttcgaggatatgtgcgcgcaaatgtactaccgtggcaagatgtttggttttgtccatttatacaatgggcaagaagctgtctccactggcttcatcaagctgctcaaccaagctgactgtgttgtcagcacataccgtgaccacgtccatgccctatccaagggtgtccctgcacgttctgtcatggctgagcttttcggtaaggccactggctgctgccgtggacaaggtggttctatgcacatgttctctgaaccccacaacctccttggaggttttgccttcatcggagagggcatccctgttgctactggtgctgcctttgctgctaaataccgccatgaggtgctcaagcagtctagccctgatggacttgatgtaaccctggcattctttggtgatggtacctgtaacaatggccaattctttgagtgcctgaacatggctcagctttggaagcttcctattgtgtttgttgtggagaacaatctatgggcaattgggatgtcgcatcttagggctacttcagacccagagatttataagaagggtccagcgtttggaatgcccggcgtgcatgttgatgggatggatgtcctgaaggtcagggaggtggctaaggaggccattgagagggcaaggagaggtgaaggaccgactcttgtggagtgtgagacttaccggttcagagggcattctcttgctgatccagatgagctcaggagacctggtaagggtcaccttccttgttcattttttagttcaatggtgtctactaggctaactaaacagagaaatggaaactataaggaaaatattcaggcacttaggtttctaatatttttaataccgttttgtttcatgtctgagtaa

SEQ ID NO: 3294 - DNA, 2223 bp, Oryza sativa
atggcgatcgaggccatgcggcactgcagcagcagcagcagcagcgaggaaggaggagcggcggcgacgacggcggccagatcagcagtacgggagcgcctccaattagcgccgccgtcgccgtcgccgtcgccgtacgacacggcgtgggtggccatggtgccggccctccgccgtggcggcggcggcccgcggttcccgcagtgcgtcgcgtggatccagcggaaccagcggggcgacgggtcatggcgccacgcggcggcggcgcaccagcagctcggctcctcgccggagatcgtcaccgagcgcgacctctcgtccaccctcgcctgcgtcctcgcgctcgcgcgatgggacgccggcagtgagcacgtcaggagagggctgcagtttatcgggaggaacatgtcggtcgccatggacgatcagacggctgctccggcgtctggttccgtcgtcagtttcgcagcgatgctccggatggcgatggagatgggtttggaggttcctgccgtcagccaagctgacgtccgcgacagagatgctggggtgatctgccacggtggaagaacagaatatacggcttatgtctcagaaggattaggcaatattcagaactggaatgaagtgatgaaattccaaagaaagaatggctcactgttcaactccccttacacaactgcagctgcattagtccacaactatgatgccaaagctctccagtacttagacatgcttctggacaaatttggaagtgcagtgccagcggcctatcctgcaaatattcagtctcagctctacatggtggatgtgcttgaaaagatgggaatatctaggcattttgttggtgagataaagagcatactggacatgacctacagttgctggaaacagagggatgaggaaattgtgcttgacatgcaaacatgtgggatggcatttcgtatgttgcgtatgaatggatatgatgtttcttcagatgagctatctcatttttctgaaccttcaagtttccacaattcacttcaaggatatctgaatgatacaagatctttattagaattacataaggcttcaaaagtcagtatcgcagaaaaggaggttgaatatgctcttgaatttcccttctataccatcttggatcgtctagaccataaaagaaatatcgaacattttgacattacaagcagtcagatgctagaaacagcgtacttgccatgtcattccaatgaagaaatcatggccttgggtgtgagagattttagtagctctcagtttattttccaagaagagctgcagcaactcaacagctgggtgaaagagagcaggttggatcagctgcaattcgcacggcagaagttggactacttctatttctctgctgctgctaccattttcactcctgaactgtcagatgttcgcattttgtgggccaaaaatggcgtgctgacaacggtcgtcgacgacttcttcgacgttggaggatcaaaagaagaactggaaaacctcgtcgcattagttgagaagtgggacaagaatgacaaaactgagtactactctgaacaagtagagattgtgttctctgcaatttatacttcaactaaccagcttggatcaatggcctctgtagtacaaggccgtgatgtcaccaaacaccttgtagaaatatggcaagaattgctgaggtctatgatgacagaggtagagtggaggcagagccggtatgtgccaacagcagaggaatacatggaaaatgcagttgtgacatttgcactgggacccgttgtgctcccagcattgtatcttgttggaccaaagatccctgattctgtcataagaagccaagaatgcagcgagttgttccggctaatgagcaaatgtggccgtctcctgaatgatgtccaatcctacgagagagagggcagccagggcaagctgaacagcgtctctctgcttgccctccacagtggaggctctgtctccatggaagaggctgtgaagcagattcagagacccatcgagaaatgcaggagagagttgctgaagctggtcgtcagcagaggaggcgccgttccaaggccatgcagggagctgttctggagcatgtgcaaggtctgccacttcttctactccggcggcgacgggttcagctcgccgacggcgaaggccggcgcgttggacgcggtgatccacgagccgctgaatctgtcttgttctgtgtga

SEQ ID NO: 3295 - DNA, 2193 bp, Oryza sativa
atgatgatgctgctgctgccgagttcctcctcctcctgctgctgtcgctgccccggcgggcagttccacggagctccaccccgcgtgatggcgcctcgtcgtggggtcaccagagtatatattgagaagagattgggagtaggagggggaaatgcatcaagcctgcaagacatgcacaggaaggagctccaggcaaggacaagggaccagctccagacattggagttatctacgtctttgtacgacacggcgtgggtggccatggtgccactgcggggttcccgtcagcatccgtgtttcccacaatgcgtggagtggatattacaaaaccagcaggatgatggatcttggggtacaagaggattcggcgtggcggtcacaagagatgttctgtcgtctacgttggcgtgtgttcttgcactcaagagatggaatgttgggcaggagcacatcaggagaggactagattttattggaaggaatttctccattgccatggatgagcagattgctgctcctgttggtttcaacatcacttttcctggtatgcttagccttgccatggggatggatttagaattccctgtcagacagacggatgttgatagacttcttcacctccgggagatagaactggaaagagaggctggagaccattcttatggaagaaaggcatatatggcttatgtcacagaaggattaggaaacctgttggagtgggatgagattatgatgttccagaggaagaatggatcatttttcaactgtccttccacaactgctgccacattagtcaaccactataacgataaagccctccagtacttaaattgtctgctagtttgcagttcatggttagaaagagatgaggaaattatgctggacataacaacatgtgcaatggcttttcgcctgttaaggatgaatgggtatcatgtttcctcagtcgagttatctcctgttgctgaagcttccagtttccgtgaatcacttcaaggatatttaaatgataagaaatctctaatcgaattatacaaggcttcaaaaatgaagtatgctcttaagtttcccttctacaccacactggaccgtctagatcacaagaggaacattgaacgttttgatgcaaaggattcccagatgttaaagacggaatacttgcttcctcatgccaatcaagatattctagctttggctgttgaagatttcagtagttctcaatctatataccaggatgaacttaattatcttgagtgttgggtgaaagatgaaaagctcgatcagctgccatttgcacgccagaagttgacatattgctacctttctgctgctgctaccatattcccccgtgaattgtctgaagcccgcattgcatgggctaaaaatggtgtactgacaactgttgttgatgacttctttgatcttgggggatcaaaagaagaactagaaaacctcattgctttagttgagaagtgggatggacatcaagaggagttctactcagaacaagtaagaatagttttttctgctatttatactacagtgaaccagcttggagcaaaggcttctgcattacaaggccgtgatgttacaaaacacctaacagaaatatggttatgtctgatgaggtctatgatgaccgaagctgaatggcagaggacaaaatatgtgccgacaatggaagaatatatggcaaatgctgttgtctcatttgcactgggacctattgtgctcccgactctgtatttcgtaggaccgaagctccaagaggatgtcgtcagggatcatgagtacaatgaattatttagactgatgagcacttgtgggcgtctcctgaatgacagccaaggctttgagagggagagcctggagggaaagctgaacagtgtctcactgcttgttcatcacagtggtggttctatctccatagacgaggctaaaatgaaagcccagaaatccatagacacttccaggaggaacttgttaagattggtccttggagaacagggtgctgttcctaggccatgcaagcagctgttctggaagatgtgcaagattgttcacatgttctactctcggactgatgggtttagctcgccgaaggaaatggttagtgcagtgaatgcagtcgtcaaggagccacttaaactcaaagtgagtgatccatatggctctattttgtcgggcaattga

SEQ ID NO: 3296 - DNA, 2214 bp, Oryza sativa
atgctcggccggcgcgtggtgatgctcccgtcggcggcggcggcgctggggctgcgccggggccgggcgcggatgcggctkgggtgcgtgctcgagcacgtggccccgcggctcgcggtggcgtcggccgcgctcctgggggccggggaggtcatcgccgcggccgccgcggcggggaaaagcggcggggccgggcacgccgccgtggcgtcgacgctcgcgcagcttacggtcacggccgtggcgatcgcctcgggggcgtgcctgtcgaccaaggtcgacttcctctggcctcgcatcgagcaactgcccgacactcttatatttgaaggagtagaggtgactggatatccaatatttgaggacccaaaggtgcagaaagcaattgtttttgcaagtactgcccacattgggcaatttaggaaaacaggagatccatatgtcacacactgtatacatactgggaaaatcttagctgccttggtcccgtcaactggagaaaggcctgagaacttgaagagcatagaagagcagtttggagatgatgttgctagtttggtatctggtgtttcaaagctaagctacataaatcagctactgcgcaggcatcgacaaaaaaacaccggtggaagcactcttacttcagaagaatatttcagctatgctcttcccattcgcaaagctgaagctgttgctcaagagacattggctgtctggtgctcacttgcttctcgattgggtgtctgggctttgaaagctgagctagaagatttatgctttgctgtccttcaggacttattgcaagctgtattgccatttgacctccttttggatcggaaaagacgatcctacttcctaaataatctccatggcagttctgaaacatctgtaccaaagcctaagattgttgatgacgctgctgttgcattagcatctttagcagcttgtgaggaagaacttgaacaagaattacttatatcgacatcgtatatacctgggatggaagtaactttgtcaagtagactcaagagcttgtatagcatgtactgtaagggtgatcattggagacaaaaacggtgcattgcatggacctgctgtcaagattgctacagcgtccttgatatagtaaacaggctatggactccaattgatggggagtttgatgactacattatcaaccctaagggtagtggttaccaatcactccatacggcagttcaggcatcggataactcaccactggaggtccaaataaggacccagcgaatgcatgaatatgcagaatatggactcgctgctcactggctgtataaggagagcaaagttgactacagaagtggcacgagtaacaagataggacaaagtacatcgtacccatcaagttcttcggaagatgaaaactacatacaagatgttatgccctcaaagtacagttctatgaaaatggggcatccagtcctaagaattgagggcagccagttactggcagctgtcattgtcagtatagataaagggggaaaagagttgcttgttgctgtcagttttggccttgaagcttctgaagctgtagctgaacgaagatcttgcttccagttgaaacgctgggaaacttatgctagagtttacaaaaaggtttcagagaaatggtggtgtgcaccaggacatggtgactggtcaacaaacctggagaagtatacattgtgccaggatgggatattccataagcaagaccaatttgggaggcttttgcctacttttattcaacttattgatttgacggaagaggaagaggaagaatattggatggttgtatcagccatatttgagggtaaagaggcctcatctctgactcccgattcaagcaacactgaacgatcgacatctgaacctccaagctctactccattgagtgatcccatcaacaataaggttcatttgctcaggacaatgcttcaatgggaggagcaagttcgacgcggagcatcacttgtggagaaaagcctcagtgtaggcacatgtactgaaccaatccttcgtgaggtggccatcatctgctggccgtacgggaagataatgaggatgagcctaggcagcacagccgctgatgctgctagaagaatgggcgttgaagggaagctgctttgggttaatggccaacttgtgttgccccagaccgagctcaaggatggggatatagttgaagtgaggatgtag

SEQ ID NO: 3297 - DNA, 1497 bp, Oryza sativa
  misc_feature (1)...(1497): n = A,T,C or G
atggccaggcacaagagctcgccgccggcgatccgccgccgcggggtcggcatgctccggtgggcggtgcgcgtcgcctcgagcatcgtgctctggacggccctcctccatttatccagcctcctcggcctcccccgcccgccgctcctcgccgcccggccctcctgcctaggcggcggcngcggcagcaactccagcgcctcctctgctgtaaccgtcgctgccgccgacgaggtcgggcgcctcgcgcccccggctgtgcctcgcaggactagtgatacgttaacgttatgtcagaatttgagatcttcacatgttggaacttggaacctggaagctatatgtgacatggtaactgtagcacgctatatgaacctgactatggtggtacctgaacttgataagcagtccttctgggctgatcctagtgattttggagatatttttgatgtaaaccacttcatcaattctttacaagatgaagtaaagatcatcagggaactgccacagaaattcagcaggaaagttccattctcaatgcagccaatcagctggtctagcgagaagtactatttgagacagatcttgcctctagtacggaagcataaggtggtacgttttagcaggacagattctcgccttgcaaataatggccttcctttaaagctccaaaagcttcgttgccgtgttaactacaatgcactacaatttgcaccatcaattgaggctcttggcaaaaagatgatatcagctcttaggaaaactggatcttttattgtgcttcatctgagatacgagatggatatgcttgcattctctggttgtacacatggatgttctgacgaagaaacagcagagctcacgagaatgaggtatgcgtacccttggtggaaagaaaaagaaatagattctgaaaagaaaaggctcgaaggattatgccccctaacacccggagaaacaacattagtactcaaagctcttggtttccccagggacactcggatatatattgcctcgggtgaaatctatggtggtgaaaaaagattaactgaactgaagacagaattccctaacattattcggaaggagatgcttttatctgctgatgagttacgccccttccagaagcattcgactcaaatggcagccctggactatcttgtgtctattgctagtgatgtttttatccccagtaatgacggaaacatggctaaggttgtagaaggacatcgcaggtttatgggctttcacaaaaccatacagcttgataggaaaaagctagttgagcttatagatcttcttgaagatcaggagctgtcctgggacgaattctctactgctgtgaaggagctacacgagggccgaatgagcgaacccaccagaaggaaagctattgccgggcagccaaaggaagaggactacttctatgctaatccacatgaatgtcttggagctgcgagaaagcgaagggagaagctaaaacatactgagatatga

SEQ ID NO: 3298 - DNA, 2220 bp, Oryza sativa
atgcctcgccgcggcgcgtcctccgcttccaccagccgcggccgccgccgcccccgcgaggaggaggaggaggaggatgaggaggaggtggtgggggatgtcgcctccgacgactccgccgactccgacttcgtcgccgacacggaggaggaagaggcggcggacgacgagtacgactacgcgtccgatgggaaggatggcgcggggcccgcggctgctgctgctgctgctcctgcggcggtggccccgcsgcccccgcaaccgaagcggctgcaaggggggaggaagaagggggcgggtggccacgggaagctgcccctgccgtgggaggagtgggaggaggcgaacgagaagtggctcgacgagcgggaggcggcggccaagggggaggaacccccggacccggaggttccccccgccgtggccgcgggggtgcccamggcggacccggccccggagtgggcgcaggagatcgagcggcacacggccaaagacagcgtgcgcgtgctggtgtaccacggcggccggcggggtgctcagaagtatgatttcaacaagtacgacttcgtgatcaccacctactccaccatcgaggcggactaccggaagcacatcatgccacccaagactcggtgctgctactgtgataaattgttttaccccaacaagctgaaggtgcatttgaggtattactgtggtcctgatgctcagcgaaccgagaagcaggccaaacaggagagccggaaatggggtagcaaaaaggggacatcgaagaggagggtccaaaagaagaaaaatgatagtgatggtgaggattttgaggaacgtgatgggggatcggggagccaatcaaggggtcagtcacctctacactcagtgcggtgggagcgtattattttggatgaggctcacttcataaaagacagacgttgcaatacagccaaggctatttttgcattagaatcggaatacaagtgggctctgagtgggacacctttgcagaatcgtgttggagaactctactcgctgatccgttttttgcaaatatttcccttactcgaactatttctgcaaggactgcaactgcgagatactagataccctgcatttttgctggtggaacaagcaagttttgaaggcaaaagagccatggttcttctaaaggaaaaggttctgaagggcatagtgttaaggcgcacgaaaaaaggaagagctgcagatcttgccctcccgccaaagattgtgaccttaaggagggactctttcgataaaaatgaaatggaattctacgaagctttatatactcagagtcgcacgcaatttgattcatatgttgatgctgggacgctgatgaacaactatgcacatatctttgacctcctaacaaggttgagacaggctgttgatcatccatatcttgtggcattttctaagacagcagaactcagtgacagaagtaaaaatgaaggaaatgagaacatggaaagccagtgtgtgccccttactgtcgacctaacaacacgaagttctggagaaaaggtcactccaaatttgaagggtggcaaacgctcaggaatattaagcagactacaaaaccttgcagattttaagacaagcacaaaaatcgatgccttgtttttggcctacatgtttttgttgattgagttacataatgatgttaatggtgatgttaatgatgaaaatactttggttaacctgagagaagagataagaaacatggttgagcatgatggttccgccaaagggattgtgttcagccagttcacatcattcttggatttgattgaattctccctgcagaagtctggtatcaagtgcgtgcaacttaatggcaaaatgaacattgttgagaaggggaaagctatagataccttcaccaatgatccagactgcaggatttttctgatgagcttgaaagctggaggagtagctctcaatctcactgtggcatcacatgttttcttgatggacccttggtggaatcctgcagtcgagagtcaggcccaggatcgaatccaccgaattgggcagttcaagccaatcagaagcatgaggtttgtgatcaaggacaccgttgaggagcgtatactgcagctgcaagagaagaagcgactggtgtttgaaggcaccgttggcgactcacctgaggccatgtccaagcttacagaggctgatctcaagttcttgttccagaactga

SEQ ID NO: 3299 - DNA, 1446 bp, Oryza sativa
atggccggcaccggaggcagccctctgctccgctctccctctccggtgatgaacaccatgccgacgccgccctccgccgcggtgttcgacgtcgaggccgcgtccggcgctcgccgccttggcatcaagcccgccgccgacgccggcgccgccttcgtgctcgagtccaaagggaattggtggcacgccgggttccacctgacgacggcgatcgtggggccgacggtgctgacgctcccgtacgcgctgcgggggatggggtgggcgctcggcctggtggcgctyaccgccgtcgccgccgtcaccttctacgcctactacctcatgtccagggtcctcgaccactgcgaggcccacggccgccgccacatccgcttccgcgagctcgccgccgacgtcctcggatctggatgggtgttctacttggtggtcaccgtgcaaactgccatcaacgccggtattaccatcgggagcatccttcttgcggctgactgcttacaaataatgtactcggaccttgcaccaaatggacccctgaaactgtaccatttcatcatcgtcgtcgctgtggttctgtccttgctctcccagctgccgtcgttccactccctgcgttacatcaacctcggctcgctcctcctcagcttcggctacaccatccttgtctcagctgcctgcatccgagcaggtgctttgagcgatgtcccggagaaggattactccctgagctcatccaattcggagaagaccttcaatgcgttcctctccatttccatcctcgcctccgtcttcggcaatggcattctgcctgaaatccaggcgacgctggcgccgccggcggccgggaagatgatgaaggcgctggtgctgtgctacacggtggtgttgttcaccttctacttgccggcgatcaccggctactgggcgttcggcagccaggtgcagtccaacgtcctgcagagcctcatgccggacaagggcccttccctggcgccgacgtggctgctcggcctcgccgtcgtgctcgtcctcctccagctgctcgccatcgcgctcgtctactcccaggtggcgtacgagatcatggagaagagctcggccgacgcggcgcgcggccggttctcgcggcggaacgtggcgccccgggtggcgctccggacggcgtacgtcgcggcgtgcgcgttcgtggccgcgatgctgcccttcttcggcgacatcgtcggcgtcgtcggcgccgtcggcttcatcccgctcgacttcgtgctccccgtcgtcatgtacaacatggcgctcgcaccgccgaggcggtcgccggtgtacctcgccaacgtcgccatcatggtcgtcttcaccggcgtcggcctcatcggcgccgtcgcctccgtacggaagctcgtgctcgacgccggccagttcaagctcttcagcggcaacgtcgtggactga

SEQ ID NO: 3300 - DNA, 1218 bp, Oryza sativa
atggcgaaacaaagcaacataattcttcgtgcttatcttttcctctctcgctcgctgtggatagcgaaagaaaacgaaacgaggaaaagaaaaataaaaaatggtccccgcgagcccatctgggccgtccggtcgattccgcctcgtccccgatgcacggctgccgttccaccasgtcaccccccgggtggtgtggttgcggcgaccttcgtgtgcccgctcgatgtgatcaagacgaggtttcaggtgcacggctggcccaagctcgccaccggcacaattggaggtagtgtaataattggaagcttacaacagattgctcagagggaaggttttcggggaatgtatcgtggtttatctccaactattctggcactcttgcctaactgggcggtctattttactgtgtatgagcagcttaaaagcttgctttcttccaatgatagaagtcatcacctgtccttaggggcaaatgttattgctgcatcatgtgctggaggtgcaactactattgcaacaaatccactttgggttgtgaagacaagatttcagacccaagggatacgagctggggtgatcccgtacaaaggtacacttgctgctttgaagagaatagcacatgaagaaggcattcgtggactgtacagtggacttgtccctgccttggctggtatcagtcatgttgctattcagtttcctgcatatgagaagatcaaagcttatctggctgagcgagataatactacagtggaggcattaagttttggtgatgttgctgttgcttcatccctggcaaaagttgctgcgtcaaccttgacatatcctcatgaggttgttcgctcaaggttacaggagcagggagcacactccaaggcgagatatacaggtgtaatggactgcatcagaaagcatgcaatgaggaggtatatgggtttagggctgtggggacatggtgattttggtgggcatctcctgggtattgtttcgttcgacaaagactccgctttgtacaatgtacatgttggaatggtctatggctctatgctattactactatgtatcaactctgaatcaagctgctcttctaagggtttgtttcgcctcggacaaacacacccagcactgcgttactcgccatatatggttccgttgagaggtgtggtgtacggtgtaccattgccctacttagatttttttttgagaatgaaaattttataa

SEQ ID NO: 3301 - DNA, 3225 bp, Oryza sativa
atggaagaagcatccacagcaagagctgctgatggagataagcgtggaaaggaagagaatgacaggaggatggccaaggatggcaaggtggcattccatcacctgttcaagtatgcggacagcacagatgtggcgttgatgctggttggcaccatagcatcacttgcaagcggcatgtcacaagtaatcatgaccatcatcttcgggcagatggtcgacgcctttgggaaatcatccccgggcaacatccttcatcaagtcaacaaggcggtactatactttgtctacttgggcattggatcagggattgtttgttttctccaggtgtcatgctggtctgtgactggggaaaggcaggccactcgcattcgatccttgtatctcaagacaattctgcgacaagatatggcattctttgacaaggaaatgacaactggacaagttatctccagtatctctactgacactacactaattcaaggtgctactggtgagaaggttgggaagtttctacagcttgttaccactttccctggtggttttgtgcttgcgttcctcaaaggctggcttctcactctcgtcatgctttctaccataccaccttttatctttgctgccggaattgtctcaaagatgttagccaaaatatctaacgagggcctagcatcatacagcaaggcaggggacattgttgaacaaacagttggatctataagaacggtggtatccttcaatggtgaaaagaaagccattggcctctacaacgatctgataaagaaagcatacaagggtgcggtcaaggaagggtttatccaaggctttggcatgggtttcctcaacttaatctatttttccagctttggattaattgtatggtatggcagtaagctaagcctcagtagaggatatagtggggcggatatcatgaacatcttgtttggtatcatgataggtgcaagagctttaggtgatgcgaccccctgtactgctgcctttgaagaaggaagaattgctgcttacagattgtttaaagtaatcaagaggaaaccagagattgactatgatgatactagcgggattgtgttagaagatatcaagggtgacatagagctaaaggatgtattcttcagttacccgagcaggtcggagcaattgatatttgatggattttcgatgtgtgtatcaaatggaacaacaatggccatagtaggggagagtggtagcggcaaatcaactgtgataaatctagttgagagattttacgatccacaggctggtgaggttttgattgatggaatgaacatcaagagcttgaggctggagtggatacgagggaagattggccttgttaaccaggaaccaatactcttcatgacatctatcaaggacaatatactttatggcaaagagaatgcaacacttgaagaaattaagagagcagctgagcttgccaatgcagcaagattcattgagagcatgcctaaatgtacacacataacactatctgttcataccaacacacacctcatcttgcgtggggccactgaattactagagtatgatggtgcagacggtgagaatcgcaatttgaaaaatgatggaaagttacccaaaaaaggatccatgggtcgcctaattagcctaaacaaaccagaaatcgcaattcttctgtttggttctcttgcagcagcaattgatggagctgtcttcccaatgattggtttagtattggccagtgctgttaaagttttttatgaatcaccagacaagcgagagaaagatgcaaccttttggggattgctctgtgttggcatgggtgcaattgctatgatatcaaagctagcaaatatccttctatttgcaatcgctggtgggaaacttataaagcgcatccgtgctttgacatttcgaagcatagtacaccaagaagtttcttggtttgatcatccagcaaattctagtggagctcttggtggaaagctatgtgtcgatgcccttaatggctatgctcaagtgaggttcctacaggggttcagtcaagatgctaagatcatgtatgaagaagcaagccaagttgcaactgatgcagttggtagcatcagaacagtagcatcttattgtgctgagaagaaagtgatgacaaaatacaatcagaaatgtcaagcttctagataccagggaataagaacggggatagttggaggccttggttttggtttctcaaacatgatgttgtttatgacctctgctctttgctactatgttggtgcaaagtttgttagtcaaggcaactctacttttggcgatgtcttcaaggctttcttttctttagttgtggccatgctgggagtatcatcaactgctgccatggcttctgactcgagcaaggctaaggattctgcttcttccatatttgcaatcttagatagaaaatctcaaattgattccagcagcaacgaaggtttaaccttggagcttgtcaagggtgacattgaatttacgcatatcagtttcagatacccatcccgtccagatgttcaaatcttcagtgactttaccttgagcatcccctctgggaagactgtggcacttgttggtcagagtggcagcggcaagtctacagcaattgcgttactagaacggttttatgatcctgattctggtgtaatcttattagatggtgtagaaatcaagaaactagagatcagttggttgagggaccagatgggattagttagccaagaaccagtgcttttcaatgatacgatccgtgccaacatagcttatggaaagaatgaagaagtaactgaggaagagattgtggcagctgctaaggcagcaaatgcccacgagttcatatcaagtatgccagaggggtacagcaccagtgtcggagagaggggaacccaattatcaggtgggcaaaaacaacgaatagccattgcaagggccatcgtcaaggatcccaggatactactcctagatgaggcgacgagcgcattagatgctgagtcagagcgcatcgttcaagatgcactggaccatgtgatggttggaaggacaaccgttgttgttgcacaccgcctctcaacaatccaaggcgctgatattattgcagtcctgaaggacggtgcaattgttgagaaggggaggcacgaggcactcatggggattgccagtggagcttatgcttcacttgtggaacttcgccataatgtgacataa

SEQ ID NO: 3302 - DNA, 1170 bp, Oryza sativa
atggcggctggcggcgggctgcgggcgctgctctccggccgcgcgctggcgcacctggaggccgcgctccggcgcgcgtcgggcgacccggacgcccgcgtcgcggactacttcgacctcgtcgccggtacgggcgccggcggcgtgttcgccgcgatgctgttctcgacgcactcgcgcggcgcgcctctgttccacgccgatgacacatggcgcctcgtggctgaccacgctccccggctcttccgcaaggccgtcggcggctcgacgtcgctcttctgccgacccaagaagcggcccctcgcggcgccgacggcggcgctggacgcggccatgaagacggcgttcggcgaggagctcaccctgcgggataccatcaagcccgtgctcatctcctgctacgacctcaagtcgtccgcgccgctcgtgttctcgcgcgccgacgccctggagagcgagagctacgacttccgcctctgcgaggtcggccgcgcggcgtggtcggaggccggccgattcgagcccgccgaggtcgcgtcggtcgacggcgccacgtcctgcgccgccgtggacggcgggccgatcatgggcagccccgccgccgccgcaatcacgcacgtgcttcacaacaagcacgagttcccgttcgtgcgcggcgtcgaggacctcctcgtgctctccatcgggggatgctccgccggtggcacgggggccgcggccgacgccgacctccgacgcttgcgccgctggggtcccaaggattgggcgcgccccatcgcgcgcatmgccgccgaaggcgccgccgacctcgtcgaacaagccgtggcgcgcgccttcgggcagtgccgctcgtccaactacctgcgcattcaggcgaaacgggagagcatgccgccgtgcgggccggacggggagtacgacccaaccccggcgaacgtgcacgcgctgctcgcggcggcggacgagatgctgaagcaccggaacgtggagtcggtgctgttcgaagggaggcgtgtcggcgagcagacgaacgcggagaggctggactgcttcgccgccgagctcgtcgccgagcatcgcagcaggggctcccgtattggccccaccgtggcgttcaagcaggcgccgcggaagcagccgccggcggcggcggtggcggcgatgggctga

SEQ ID NO: 3303 - DNA, 1545 bp, Oryza sativa
atgagaggccgggcgctggtcctcgtggccgcgctgctgctgcagctgcttctcctcgccgctgccggtggcgcgggcgcggcggcgacggagaggaaggcgcacaactacgaggacgcgctgcggaagagcctgctctacttcgaggcgcagcggtcggggcggctcccgcacaaccagcgcgtcgcgtggcgcgaccaytccggcctcaccgacggcctcgagcaaggggtggatttggtgggaggctactacgacgccggcgaccatgtcaagttcgggctgcccatggcgttcacggtgacgatgctgtcgtggagcatgatcgagtacggcgacgacgtcgaggccgccggcgagctcggccacgcgctcgaggccatcaagtggggcactgactacttcatcaaggcgcacaccaagcccaacgagctctgggctgaggtcggggacggcgacacggatcactactgctggcagcggccggaggacatgacgacgtcgaggcaggcgtacaaggtggaccgggagcggccgggctccgacgtcgccggcgagacggcggcggcgatggccgccgcgtccatcgtcttccgcaagtccaacccgcactacgcgagcctcctcctgcaccacgcccagcagctgttcgagtttgccgacaagtacagagggaagtatgacagcagtatcgccgaggtgaagagctactacgcgtcggtgagcgggtacaaggacgagctcctttgggccgcattgtggctgcaccgggccaccggcaaggcccattacctcgactacgtcgtggacaacgccgactgcttcggtggcaccggctgggccatcaccgagttcagctgggacgtcaagtacgccggcgtccagatcctcgccgcaagactgctgctgagaggagagcacgaggagcggcacaggagcacgctggagcagtacagggcgaaggcggagcactacgtgtkcsggtgcctggggcgraacgcgracggcggcgcgracgcraacgtggagcggagcccgggcgggatgctgtacgtgaggcagtggaacaacatgcagtacgtgaccaacgcggcgttcctcctcgcggcgtacgcggactacctgggcgacgacgcggacggcgccgtgtcggcccaggtggactacgtgctgggcaccaacccgagggggatcagctacctggtcgggtacggcgccaagtacccgaacagggtgcaccaccgcgccgcgtccatcgtgccgtacaagcacagcaaggagttcatcgggtgcacgcaggggttcgaccactggttcggtcgccggagctccaacccgaacgtcctcgtcggcgccatcgtcggtgggccggaccggcgggacaggttcagggacaaccgggagaactacatgcagacggaggcgtgcacgtacaacacggcgcccatggtcggcatgttcgccaagctgaacaggatggcccggcaggagagggagcaggaggaggtggcggctccggcgaggagtacggcggccgatgtgtaa

SEQ ID NO: 3304 - DNA, 1047 bp, Oryza sativa
atggggttggggcgagcgctgagcgacgcgaagccgtacgtggcgatggtgctgctgcaggtggggttcgcggggatgtacatcgtctccgtggcgtcgctgaagcgcggcatgaaccacttcgtcctcgtcgtctaccgcaacctcgtcgccaccgtcctcatggcccccttcgccctcctcctcgagaggggagtgaggcccaagatgacactgagaatcttcctcaagatcatggggcttgccattcttgagcctgtgcttgatcagaacctatactacatgggcgcgaagctgacctccgccggcttcgcctcggcgctcgtcaacatcctccccgccgtcaccttcctcctcgccgtcctcctcaggatggagaaggtcaggctccggagcctgcacagccaggccaagatcgccggcacggtgttcacggtggccggcgccgtgctgatgatcatgtaccacggcccggtggtgcagttcccgtggtcgtcgtcggcaacggcagcgccgaacaacacgctgcagagctacccggccgagctgtcgctgacggcgctcatctgcgtgctcggctcggcgatgagcggcgccgtcgcgctcgtggcggagcgccgcgacatgagcgtctgggtcatcggcttcgacacccgcctcttcaccgccgtctactcggggatagtgtgctccggcgtggcgtactacgtgcaggggctcgtgacgagggcgcktggsccggtgttcgtcacggcgttccagccgctctgcatgatcatcaccgccgtcttgggctccaccattctcaaagaagagatcactcttggaagtgtgatcggcgcggtgatcatagtggtggggctctacgcgctcatctggggcaagggcggcgaccacgccgacaacggcaagccgccggccgccgccgmggccgcgccggagaagggcttgccattgaccacgctgcaggccaacggcgacggcgacggcaagcttgctgtgctcgtcgccgacgtcgagatgccggcggtgaaggatgtctactag

SEQ ID NO: 3305 - DNA, 1010 bp, Oryza sativa
atggctgcctttgccttcctactagtcatcgccatcgtcttccccctcgcatccgcattcccttcccctcctgtttcatggggccaacagcagctagaccctcacttctacgaccactcgtgcccacaagcacagcaaatcgtggcatctatcgtcgggaaagcgcattaccaggacccccgcatggccgcatccctcctccgtctccacttccacgactgctttgtcaagggctgcgacgcgtcgatcctactagacagcagtgcgacgatcatgagcgagaagcggtcgaaccctaaccgggactctgcgagggggttcgaggtgatcgacgaaatcaaggcggcgttggaggccgcttgcccacacaccgtctcttgcgctgacatccttgccctcgccgcgcgtgactccaccgtcatgacgggaggccccgggtggatagtgccgctggggaggagggactcgcgtggggcgagcgtgcagggctccaacaacgacatcccggctcccaacaacaccctccccaccatcatcaccaagttcaagctccagggcctcgacatcgtcgacctcgtcgccctcctcggtagccacaccatcggcgactcccggtgcacgagcttccggcagcggctgtacaaccagacggggaacggcctgccggacttcacgctggacgcgtcgtacgcggcggcgctgcggccgcggtgcccgcgctccggcggcgaccagaacctcttcttcctcgaccccgtcacccccttcaggttcgacaaccagtactacaagaacctgctcgcccaccgcggcctcctcagctccgacgaggtgctcctcaccggcggcaacccggccacggcggagctcgtcgagctctacgccgccgatcaggacatcttcttcgcccacttcgcgcggtccatggtcaagatgggcaacatctcgccgctcaccggcggcaacggcgaggtcaggaccaactgcaggagggtcaaccacaactactg

SEQ ID NO: 3306 - DNA, 858 bp, Oryza sativa
atggccgaggcggtcgcaagcggcgcagcggggagatggaccctccgcggcaagacggccctcgtcaccggcggcacccgcggcatcgggtactcaccccaacacccttctctggttctcccctatcgctacccagtgaggagtgagacctccaccgcagagcctttgctgctcttccacgatcaacgcggggaattcatgcgcaggcatgcggtggtggacgagctggcggcgctgggggcggccgtgcacacctgctccaggaaggaggccgagctgggcgagcgcctcagggagtgggagggcaagggcttccgcgtcaccggctcagtctgcgacgtctccgtgaacaacgtgggaacaaacttttcaaaacaaaccactgaatactctgcagatgattactcgttcataatggccaccaatcttgaatctgcgtatcatctgtgccaacttgctcatcctcttctcaaatcatctgggtcaggaagcgttgtcttcatatcgtcagtctctggagtggtggctgtaagttctggctctgtctatgcgatgacaaaaggtgccatgaaccagctggccaagaacctggcatgtgagtgggcgaaagacaatataagaaccaattctgttgcaccatggtacatgaagacttcacttgtggaagatgaattggcaaggaaggacttcgctgacagcgtcgtgcgtcgaacagcgctgaagcgcgtgggagaaccagaagaggtgtcatcgctggtcgcgttcctgtgcatgcccggcgcttcctacatcaccggccagacgatctcggtcgacggcggcatgaccataaacggactgtatccaactcaggactag

SEQ ID NO: 3307 - DNA, 1182 bp, Oryza sativa
atggccggagtggtgatcaccgggcgggccttggtggccgccgtcgctgtcgtggtcgccgttttgctcggcggagcggcggaggcgcagcagctgtcccccaacttctactcgaggacgtgccccaacctggccaccatcgtgcggtccgggatggcgtccgccgtgcggacggagccccggatgggggcctccatccttcgcctcttcttccatgattgcttcgtcaatggatgtgacggctcgatcctgcttgacgacacgtcgacgttcaccggcgagaagagcgccggcccgaacgccaactcggcccgcgggttcgaggtgatcgacgccatcaagacgcaggtggaggcctcctgcaaggccaccgtctcctgggccgaaatcctcgccctcgccgcccgcaacggcttcaacctgctgggtgggccaacgtggagcctggcgctggggcggaaggactcgcgcacggcgagccagagcgcggcgaacagcaacctgccggggcccgggtcgagcctcgccacgctcatcagcatgttcggcaaccagggcctctcggcgcgcgacatgacggcgctgtcgggcgcccacaccatcggccgcgcccagtgccagttcttccgcagccgcatctacaccgagcgcaacatcaacgcctccttcgcgtcgctccggcagcagacgtgcccgcgctccggcggcgacgccaacctcgcgccgttcgacgtgcagacgcccgacgccttcgacaacgcctactaccagaacctcgtgtcgcagcgcggcctgctccactccgaccaggagctcttcaatggcggctcgcaggacggcctcgtcaggcagtacagcaccaacccctcccagttctcctccgacttcgtctccgccatggtcaagatgggcaacctgctgccgtcctccggcaccgccacggaggtcaggctcaactgcaggaaggtgatcatttccgatgatcaccgtcttcgccgacgccctgggaaccaatgcgccggtgagatatcaaaacacaagaagagacgaaacgtgaaatacttgtttgataataaaaggacaaagaagttcctagtgcacttaccacagcttgattttgtggacgtcgcaaatttgcaatttgcgaagtgtcgtatcgaaatggttgcacatgcaaggtga

SEQ ID NO: 3308 - DNA, 1580 bp, Oryza sativa
atgacgacgacatccagggccctcgcgctggtgctcctctcgtcttgctgcctcctcgtcgccgtcgacgcggcctacgccaagaagccgaatctgtccaagaatgacttcctctcctgcctagccgccggcatccccgcccggcagctgtacgccaagggctcgccgtcgtacggctccgtgctgacgtccaccatccggaacctcaggtacttgtcgtccaagacgtgcaacccgctgtacatcgtcacaccgaccgacgtgaagcacatccaggtggccgtctcctgcggccgccgccacaacgtccgcatccgcgtgcgcagcggcggccacgactacgagggcctctcgtaccggtcggagatccccgagccgttcgccatcgtcgacctcgtcaacatgcggaacgtgaccgtcgacggcaaggcgcgcacggcgtgggtggagtccggcgcgcagatcggcgagctctactacggcatctccaaggcgagccccacgctggcgttcccggcgggcgtgtgcccgaccatcggcgtcgggggccacttcagcggcggcgggttcggcatgctgctgcgcaagttcggcctcgcgtccgacaacgtgctcgacgtgaaggtggtggacgcgaacggcaaggtgcaggaccggaagtcgatgggggaggactacttatgggccgtccgcggcggcggcggctcgagcttcgggatcgtggtgtcgtggaagctgaggctgttgccggtgccggcgacggtgacggtgatccagatgcccaagatggtgaacgagggcgccgtcgacctcctcaccaagtggcagtccctcgcgccgacgttcccggaagacctgatgatccgcgtgatggcgcaggcgcagaaggccgtgttcgagggcctctacctcggcacctgcgacgcgctcctcccgctggtgaccagccgcttcccggagctgggcgtcaaccgctcccactgcaacgagatgtcatgggtgcaatccatcgcgttcatccacctgggcaagaacgccaccgtcaaggacatcctcaaccggacctcctccatccgagccttcggcaagtacaagtcggactacgtgacgcagccactgtccaaggcgacatgggacaccatctacaaggactggttctccaagccgggctccggcatcatgatcatggacccgtacggcgccaccatcagcaaacccggcgaggcggacacgccgttcccgcaccggaaggggatgctgtacaacatccagtacatcaccttctggttcggcgagggcgcgccggcggaggcgccgatcaagtggatcagggacttctacgcgttcatggagccgtacgtcaccaagaacccgaggcaggcgtacgtcaactacagggacctcgacctcggcgtcaacgccgtcgargccggcgccaacgtctcctgctaccaggtcggcaaggtgtggggcgagaagtacttcaagggcaacttcgagaggctcgccaggacgaaggccaaggtggatcccaccgacttcttcaggaacgagcagagcattcctccattgctcgcgtg

SEQ ID NO: 3309 - DNA, 1587 bp, Oryza sativa
atggcaacgttgttcagaaacctatcactagtgctaaccattagcttcttgtcgtgtcactacctctccgtcacttcgcttgcctcctccgatggcttcgtgcggtgtctcctgcagaagatccccggagagctggtgctcacgccgagctcgagcagcttcgccgacgtgctcgtctcctccatccggaaccccatgtttttcaacaacgccacggcgaggccgctctgcatcgtcacgccggccgacgcgtcgcacgtccaggccgccgtgctctgcggccgcgccgagggggtgcgcctccgcgcgcgcagcggcgggcacgactacgagggcctctcgtaccggtccgcgcgccgcggcraggtgttcgcggtggtcgacctcggcgccaggctccgcgccgtgarcgtcagcggcgggggcgacgccacggcktgggtggartccggcgcgtcgctcggggagctgtactacaccgtcgcgaagagcaacccggggctggcgttcccggccggcgtgtgcccgaccatcggcgtcggtggccacctcagcggcggcgggatcagcatgatgtcacgcaagtacgggctcgccgccgacaacatcctcgacgccaagctggtgaacgccaacggcgagctcgtcgacagggccgccatgggggaggacctcttctgggcgatccgcggcggcgscggagagagcttcggcatcgtggtgtcctggaaggtccgcctcgtgcaggttccgacgacggtgacggtgttcgtcgtcgggaggaacgtcgaccagggcgccgccgacgtcgtcgccagatggcaagacgtcgcgccgagcctccctcccgagctcaccatacgggtgatcgtgcgagggcagcgcgccacgttccagtcgctgtacctcggctcgtgcgccgacctggtgccgacgatgagcagcatgttcccggagctcgggatgacgagcgccgactgccgggagatgagctggctgcagtcggcggcgctcatccagttctggaacccaagcacgccggtggaggcgctcctcaaccggaggaccagcctgagcaccttcaccaaggccaagtccgactacgtccggcgagccatcccgtcggacgtgtggaagaacatcctcccgtggttcaccatgaacggctccggccagatgctcctcgagccgatgggcgggttcgtcggtggcgtccccgccgcggcgacgccgtacccgcaccggagcggcgtcctgtacaacatccagtacatcgcgtactggtccggcgacggaacggcggcgaacaggtggatcagtggcctgtacgcgttcatggagccgtacgtcagcagcgacccgagggaggcgtacgtgaacttccgggacctggacatcggcgagaacgcggtggcgccgaacgacgtgagcacgttcgagagcggcaaggtgtggggggagaagtacttcgccggcaacttcgagaggctcgccgcggtgaaggcggcgatggatccgaccgactacttcaggaacgagcagagcatcccgccatttgttggtccaaagcaagtgaaaaaagcttaa

SEQ ID NO: 3310 - DNA, 1580 bp, Oryza sativa
atggccgcgtcgacaagtctggcgctcgtgctcgccgtctgctgctgctgctgctacgcggcgtccgtcgccccgctgtcctccgccgactcctccggcgaattcctgcagtgcctcgccgcgggcgtgcctagccagctcgtcgtcacgcggggctcgtcgtcgttcgcgtcggtgctggcgtcgtccgtcaggaacccgaggttcctggcgcccggcaccgtgcggccgctctgcgtcgtgaagcccaccaacgcgtcgcacgtccaggccgccgtgctgtgcggccgccgccacggggtgcgcctccgcgtgcgcagcggcgggcacgactacgagggcctctcgtaccggtccgtgcgccaggaggtgttcgccgtggtcgacctcgccggcctccgctccgtgcgcgtcaaccgccgcgcggccaccgcgtgggtggactccggcgcgacggtcggggagatgtactacgccgtcgccaaggcggacgccgggctcgcgttccccgccggcctgtgcccgaccatcggcgtgggcgggcatttcagcggcggagggatcggcatgatgatgcgcaagtatggtctctccgtggacaacgtcctcgacgccatggtcgtagacgccaacgggaggctcctggacaagaaggccatggggagggactacttctgggccctccgtggcggcggcggcgagagcttcggcatcgtgctgtcgtggaaggtgaggctcgtggctgtcccacggacggtracggtgttcaacatccagaagacgctggcccagggcgccgtggacgccgtcaccaaatggcaaacgctcgcgccggcggcgctccccgacgagctcaccattcgggtggtcgtgcagaacaagcaagccctgttccagtcgctgtacctcggcacgtgcgaccagctcctgccggtgatgggctcgcgcttcccggagctcggcatgacgcgtgccgactgccgggagatgagctggctgcagtccatggtgtacatcaacggcggcaccagcagcacgccggtggaggtgctcctgaacaggacgaccagcctgagcgtctacaccaagaacaagtccgactacgtcaagcaggccatccccagcgcctcctgggagaagatcttcccgtggttcgacggcgccgccggtgcggggctcatcatcctggagcctcacggcgggagagtcggcagcatcgccgacggcaacacgccgtacccgcaccggtccggcgtcctctacaacatccagtacgtcgcgttctggccgacgacgacggcgacgcccgcggtgccggactggatcaagaacgtgcacgcgttcatggagccgttcgtcaccagcaacccgagggatgcgtacgtgaactaccgcgacctcgacatcggcgagaacgcggtggccggcggcgtgacgagctacgagaacggcagggtgtggggggagaagtacttcggcgcggccaacttcaggaggctggcgctgaccaaggggaaggtggacgccagcgactacttccggaacgagcagagcatcccgccgcttgtctccaccaagta

SEQ ID NO: 3311 - DNA, 1539 bp, Oryza sativa
atggcgtcgatgtgttcgaggtcgataccccagctcatcctcctcctctccctgaccgtcttcctcctcgccaatgcgcatcccatggccccgccatcgccgccgcggaaggcggccgcgcctccgacggcggcgaagggggtgaccggcatttcgccggtgctcgtctccacgctgcgcgagacgctggacgcgatcaagaacgtcgcgtccatcatctcgtcgttccccatcggcggcatcctcggtggcggcgacctccgcctctcctccgccatcgccgactgcctcgacctgctcgacctgtcctccgacgagctgtcctggtcgatgtccaccacgtcgtcgtcgtcctaccagcccaccaacgccggcgccgccacgtcgtcccacgtcggcaccggtgacgctcgctccgacctccggtcgtggctgggcggcgcgctgagcaacccaggacacctgcaaggagggcctcgacgacaccggctccgtgctcggctcgctcgtcggcaccgccctccagaccgtcacatgccgttgggccccggtggcatgccggtggacgccgtggtcgccaaggacgggagcggcaactacacgacggtgagcgcggccgtggacgcggcgccgacggagagcgcgagccggtacgtgatctacgtgaaaaagggcgtgtacaaggagacggtggacatcaagaagaagaagtggaacctgatgctggtcggcgacggcatgggcgtgaccgtcatctccggccaccggaactacgtcgacggctacaccaccttccgcagcgccacagtcgctgtgaacgggaaggggttcatggcccgggacttgacgttcgagaacacggcggggccgtcgaagcaccaggcggtggcgctccggtgcgactccgacctctccgtcttctaccgctgcgggttcgagggctaccaggacacgctgtacgcgcactcgctccgccagttctaccgcgactgccgcgtctccagcaccgtckacttcgtcttcggcaacgccgccgccgtgttccagaactgcaccctcgccgcgcgcctcccgctccccgaccagaagaactccgtcaccgcgcagggccgcctcgacggcaacatgaccaccggcttcgccttccagttctgcaacgtcaccgccgacgacgacctccagcgcgcgctcgccggcggcggcaaccagagctccgccgcggcggtgacscaracgtacctcggccggccgtggaagcagtactccagggtggtgttcatgcagtcgtacatcggcgccgtggtgcgccccgaggggtggctggcgtgggacggacagttcgcgctcgacacgctctactacggcgagtacatgaacaccgggcccggcgccggcgtcggcggcagggtcaagtggccggggttccacgtcatgacgagccccgcccaggccggcaacttcaccgtcgctcagttcatcgagggcaacatgtggctgccgccaaccggcgtcaagtacaccgccggcctcacgtcttga

SEQ ID NO: 3312 - DNA, 927 bp, Oryza sativa
atgtcgcagcctgctgagctttcccgtgaggagaatgtgtacatggctaagcttgcagagcaggccgagaggtatgaggagatggttgagttcatggagaaggttgctaagacagttgactctgaggagctcactgttgaggagcgcaaccttctatcagttgcttacaagaatgttattggtgctcgccgtgcgtcatggcgcatcatatcatccattgaacagaaggaagagagccgtggtaatgaggatcgttgcacgctcatcaaggaatacaggggaaagattgaaactgagctctccaagatctgtgatggcatcctcaagcttcttgactcccaccttgtgccttcatccactgctccagagtccaaggtcttctacctcaagatgaaaggcgactactacaggtacctcgcagagtttaagactggagctgagaggaaggatgctgctgagaacaccatggtggcatacaaagccgctcaggatattgccctggcagagttgcccccaactcatcctatcagacttgggctggccctcaacttctcggtgttttattacgagatcctcaactctcctgaccgtgcttgcaatcttgcaaagcaggctttcgatgaggctatctcagagctggacactctgagtgaggaatcctacaaggacagcactttgatcatgcagcttctgcgtgataacctgacgctgtggacttccgatatctcggaggcgctccccatttatgttgtgctaggaaaccttgcagctgactcgctgcttggctggtggattctcgagctgcactttctttggggggagcctcagggtggaaccttcatgtcacttattggatcgattgttttcggtatgtcagttgtgagccttatctccagagtccacagtcctgccaagtgccctgcttga

SEQ ID NO: 3313 - DNA, 1074 bp, Oryza sativa
atgttgtctgtgagctgcccgagagtgtacatgagcaggaaggcgctggatttcggtcagctggcctcctgccggtgccgttgggctggccggtccggcatgcgggtggcgccgaggcggcgcatgccatgtgtttgtttcgtggcctcaccgagccagccagaaaatccagttttagtttctgcggcagaacaaattttcggtgctggtggaaaaaggttaagaccagcattagtttttctggtgtccagagcaactgctgaattagctggtttgttggagcttactacagagcatcaacgcctggcagagatcatagagatgattcacacagcaagtttaatacatgatgatgtcatagatgatagtggcatgaggagagggaaagaaactattcatcagctatatggaacacgggtggccgtacttgctggtgattttatgtttgcacaatcttcttggttcctagcgaacttagaaaacatcgaagttattaagctcatcagccagatgatgtgttcacaggtgatcaaggactttgccagtggtgagataaaacaagcatctactctttttgactgcgacgtcacccttgatgattacttgctcaagagctattataaaaccgcttcgttgctcgcctcaagcacaagatctgctgcaatattcagtggtgtaagcaccactatatgcgaacaaatgtatgaatacggcaggaatctcgggctctcgttccaggtagtagatgatattcttgactttacccaatcagctgagcaacttgggaaaccagcagggagtgacttagcaaagggaaacctgacagctccagtcatattcgctttgcaagatgaacccaaactaagggagataatcgattctgagttcagtgaaagtgattcattggctactgcaatcgacttggttcacagaagtggtggaataagaagggcgcaggagcttgcaaaggagaaaggtgacttggctctccaaaatttgcagtgccttcccaagagccagttcagaagtacccttgagaacgtggtgaaatataatcttcagaggattgactga

SEQ ID NO: 3314 - DNA, 882 bp, Oryza sativa
atggcgatcgtggccgccctcgtcgcgcccaccgcgaacccccacaacccactccggctcatcgccgcggcgccgcaccggcaatggcggcgcgtcgccgccgcggcttcctcctcggcggcgcccggggtttacctcaaggcgctccaggccgccatcgacaagacatctctgcgagagctcaccacgcttgggataaagaacgctgagaacctggcgattccgagtttcagaaatgatgcagcatttttgttcactgttgttggttcaaccggattcttaggcgttcttgcaggccagcttcctggggattggggctttttcgttccttacttgattggaagcatctcattgatagtattggctatcggaagtatttctcccggtcttctgcaagcagcaattggtgcattttcaactgtttttcctgactatcaggagagaattgctaggcatgaagctgctcattttttggttgcctatttgattggactaccaattctgggatattccttggacattggaaaggagcatgttaacttgatagatgatcaattgcaaaagctaatatacagtggccagcttgatcaaaaggaaatagacaggttagctgtagtgtcaatggcagggctcgctgctgaaggtctagaatatgacaaagttgtcggtcaatcggcagatcttttcacccttcagagattcataaaccggactaagccgccattaaccaaggatcagcaacaaaaccttacaagatgggcagtcctattttcggcatcacttctgaagaacaataaagcagctcatgaagctctcatgtctgccatgtcgcagaaggccagtgtcttgggctgcatcgaagccatagagaatgcctcttga

SEQ ID NO: 3315 - DNA, 1296 bp, Oryza sativa
atgggttcctgtgcttccaagtctgtcattgagcagagaccaccagcaaggcactataccaggaaaggaagaagagctcgtactaattcccgatccatcatgccagaggcgcccaagtcacggttgaacgattcaagaggacacatgactgacttctcaatgagtgaggttgtccattttgagacatcatcaaaccatggaaaatcagagcattccaaaacattccacctcacacagatgcagtggcaccacagccagagggattccaatggttgctgcaaagaagatgcctggtttgactccgtcagtattctcgaggacgactccgacgatgaatttaagagtgtcaatggaggtaatgatcctgaccgtaggagccaaagcatggccaatgtgcgcaaccagcagctgacctgtggaagtccagcaaaaaagaagtcaacagtcattagactatcatacmagaggacatcatgtgatgactatgaagatgacagcgaactgggcgaatcagagaaatatgtggtccgccccaagggagggacaacaattctgtataggggagaaaagcccacatcaggatgttggtcacggattgatccatccctcttcaagctcaggagtgaaaccttcctcaagtatgttgtggacttgtttgccagccacaagaaggttcaacacattgctcagcacattgagcttccacaagtcaaaccacatgacaagctcccttcacttttaattgttaacatccagatgcccacctatcctgctgctatgttcctcggcgacagtaatggagaaggattgagccttgtcttgtacttcaaaatctcagagtacttcgacaaggaggtttcagagcatttcaaggagtccattatgaatgtatctgacggcagagatttattgagaatgaaagtgagaagagaccggttaaagatcatggctggactggttaacccagaggatcttcaattgagttccacagagaggaagcttgtccaagcatataatgagaagccagtcctctcacgaccccaacataatttctttgagggagagaactattttgaggtagaccttgatatacaccgattcagctatattgcaaggaagggattggaatcattccgagaacgcctgaataatggaatccttgacctgggtttgacaattcaggcccagaagcaagatgaactccctgagcaggtcctctgctgcgttaggctgaacaagattgatttcattaaccatgggcaaattccaactatcgtcacattggatgacaagtga

SEQ ID NO: 3316 - DNA, 2856 bp, Oryza sativa
atgccgccactactcttccacctcctcgtactctccgtcgtcgtcgtcgtcgttagcggtggcgcggccactgccggcggcggaacgtacgacgacgccatatgcgcgaggccgatcttttgcggcgagcaggtggagatcaagtaccctttctacctctccaacacsacggatcaggtcgtcgtcgtcgacgggaacacccgctactgcggctacccgtggctgggcatcatctgcgaccacgaccgcgccatcctgcgactcgggaattacaactacaccgtcctggagatcaaccacggcaaccacaccgtcacggtggccgactccgacgcgctcgacggcggcgactgcccgagggtgaagcacaacgtcaccctcccggaggtgctcacgttcccgagccccggcaacgacagcatcaccttcttcttcgactgcaactccacggccaacgtcgtgctgcggccgccgccgtacatccgcccgatcaactgcagcaccttcgacttcccggggcggcgagacacggcgccgtctttcgtcgccacgcagccggacgtggcaggcgagacggagtggttggggctgtgcaaggaggtggtgatggtgcccgtgctcaaggattggctcatgaacgagaagtactacggcaaattgggcgacgatggatacggcgccgtgctgaagcgcgggttccagctgagctgggacccgacggcggggatgtgccacgagtgcgaggtatccgggggacgctgcagctacggcacgaagaacgagttcctgggatgcctgtgctccgatggccacgtcagcaaamcagactgcgttcaccacacctttgagaagatgcatcccctatgttcgttgccattactcatcatcatcctactctcatcggtgccaccttctatgcaagaatccggtgcctacttccggtacacaaattgtaccccagcttcttaccagtgtggatcactcaagttcgatgtcgattaccccttctcagcgaatggcgtccaccgtccagactactgctcttacccaggatatcgcctcatctgcagcccagacaacaagctcatgatccacatgaattccaccgcgttccaggttacagatatcgactatggcaacaagtttcttgcggtcatcgatcaaactcaacctcaggaggcatgcctggatcgctatcacaacaccaccatcgacgagagcaagttcatgtacacagaccgtgatcagttcctgacggtctatgtcaactgcagtgccaacttttcctctctgcctcttatctatgatcttgtgtcgtgcgtttctgggggaagctcctactataggttgcacaagaacaaggatgactcgttggaatcagatattctgggatcatgcagctcaactatcgttgttccatgcaactcaaccatggcaggctcattggctgctggaaattctagccttgcggatgtgattagaggaggtttcacggcgagatggaaagttgggctaggttggtgtagtgattgtaaggcttctggagggcattgtgggtttaatggcagttttcctgatcagtatacatgttactgcccttatggtcaagctattggatcatgttcttcatcaggatcaaagaagtcgaagaaaaaggctattgcaatagcaacctccatcgcctccggtgttctgttcctgcttctcctcgttgtgtccttcttgtacattcgcaagaggagacagtacaagatgacctcgtcgtcgaggctgctcaagtacaccacctccggcaggacgccgcggtcgaaaggcagcagcgacaagttcgtggagtccggcagcttccactacctgcagacccaccacttcgcctacgaggagctcgaggaggccaccgacggcttcagcgacgcccgcgagctcggcgacggcggcttcggcaccgtctacaaaggtgagctccgagatggacgcgtggtggccgtgaagaggctgtacaacaacagctgccggcgagtggagcagttcgtgaacgaggcggcgatactgtcgcggctgcgccacccgaacctcgtgctgttctacgggtgcacgtccagccgcagccgggagctgctgctggtgtacgagttcgtgcccaacggcaccgtcgcggaccacctgcacggccaccgcgcgccggagcgcgccctgacatggccgctccgcctcaacgtcgccgtcgaggccgccgccgcgctggcgtacctccacgccgtcgagccggcgcccatcgtgcaccgcgacgtcaagaccaacaacatcctcctcgacgccaacttccacgtgaaggtcgccgacttsggcytctcccgcctcttcccgcgtgacgccacgcacgtctccaccgcgccgcagggcacgccagggtatgtggatccggagtaccaccagtgctaccagctcacggacaagagcgatgtgtacagcttcggcgtggtgctcgtggagctcatctcgtcgaagccggcggtggacgtgacgcgggaccgcgacgagatcaacctggccggcatggcggtcaacaagatccagaggtgccaggtggaccagctggtggacgacgagctcgggtacagctccgacgaggcgacgaggaagacgatgaccatggtcgccgagctcgcgttccggtgcctgcagcacaacggcgagatgcggccgccgatcaaggaggtggccgacgtcctccggggaatccaggacgagtgcagggcggcggagaaaggcggcaagaggggctcgccgtgctcgcccaacaccgtgcacgcgccatgggacagcatgagcacgacgccgaacactagccagtaa

SEQ ID NO: 3317 - DNA, 1452 bp, Oryza sativa
atggctcagatgctctccgccgtggccatggtgggcgccgcctcggccgcgtcgcccattgtgacgaagagcctcgtcggcgtggacgcgccggcgtcgggcatcacggtcgtgtcgagacaggacgtgcgcccggacggcgcttcggcggtcggggacctcacgctgtccgtctccgacctgcccatgctgtcgtgccactacatccagaagggcctcttcttccccgcccccgacgtgcccatggcttccctggtttcgttgctcatgtcttcgctgtctcgggcgctcgccatcttcccgaccctcgccggccgccttgtcacgctccccgatgatcgcgtcgtcatccgctgcaacgacgccggcgtcgagttccgccacgccgtcgcgcccaacctgtcgctggatgacttcatcgtgcccgacgccgacgtcccgaccaagctgaccaaggacctgttccccatggaccgcaccgtgagctacgacggccaccgccgcccgctcacgtcgttccaggtcaccgtgctcggcgacggcgccgtgttcatcggcatcgtcgcgaaccacgccgtggtggacgggacctccttttggcacttctttaatacatgggccgccctttgccgtggcgcgtcacccaagctgccggacttccgccgcagcttttttggcgagtcaaccgccgtcctccgctttccaggaggcgtgggccccgccgtgaccttcgacgcggacgcgcctctccgcgagcgcgtctttcacttcagcgcggatgcgattcgcgagctcaaggcaatcactaaccgtcgcccgagcggcggtcaagacgccgaggtctacggcaagatggcgcacgatcggaagaatcccgaagggctcagtgcgatctcgtcgttccagtcactgtgcgcgcagatatggctctcggtgacgcgcgcgcggcagcgtctggcgcccgacgcgacgagcacgttccgcatggcggtgaactgccggcacaggctgcgcccggcgatctcccctgtgtacttcggcaacgccatccagagcgcagcaaccacggccacggtggccgagctggcgtccaacgacctgcggtgggcggcggccaagctcaacgcgagcctggcggcgtacgacgacggcgcgatacgccgcgccgcggcggcgtggcagggcgctccccggtgcttcccgctgggcaacccggacggcgcggtgatcacgatggggagctcgaaccggttccccatgtatgagggcaacgacttcgggtggggccgccccctcgcggtgcggagcggccgcgccaacaagttcgatggcaagatgtcggcgttccctgcccgcgccggggacggcagcgtggacatcgaggtgtgcctcgcccccgacaccatggcggcgctgctccgcgacagcgagttcatgcagttcgtgtcgtga

SEQ ID NO: 3318 - DNA, 942 bp, Oryza sativa
atggtggcgatcacggcgccgagctccatcgagcacatcccgctggtgaggtgccccaagggcgccaatgccgggccgcaagctgtcatcccgtgcatcgacctgtcggcaccgggcgcggcggcggcggtggccgacgcgtgccgcaccctggggttcttcaaggcgaccaaccacggcgtccccgcggggctcgccgacgcgttggagtcgagcgccatggcgttcttcgcgctcccgcaccaggagaagctcgacatgtccggccccgcccggcccctcggctacggcagcaagagcatcgggtcgaacggcgacgtggggtggctggagtacctcctcctctcggccggcgccgcctcgtccggcggcgcggcgctgccggcggccctaagggcgccggtgaaggcgtacacggggccgttaagggggttggggtccagggtgatggacctgatgccgaagggcctgggcctggggccttcgaagaagggaaggtccaactgcaccgcgggcctccagatcctcctccgcggagactactcctcccctgcccgctgggtccccgtgccccccgaccccgattccttcttcgtcaacgtcggcgactccctccaatttacaacccgaaactataggggttacgaactgggagaagaggtgttgacgaatgggaggttcaggagcgtgaagcacagggtgttggcgccggagggggaggagtcgaggctgtcggtgatctacttcggcgggccagcggcgtcgcagcggatcgcgccgctggagcaggtgatgcgggagggggagcagagcctgtacagggagttcacctggggggagtacaagaaggccgcctacaagacgcgcctcggcgacaaccgcctcggcccctacgagctgcagcacgccgctgccaacgatgaggccgcgacgaagaaataa

SEQ ID NO: 3319 - DNA, 2100 bp, Oryza sativa
atggcgtcggagaccgagacgttcgccttccaggccgagatcaaccagctgctgtccctcatcatcaacaccttctactccaacaaggagatcttcctccgcgagctcatctccaactcctccgatgcattggataagattaggttcgagagcctcacggacaagagcaagctcgatgcgcagccggagctgttcatccacattgtccccgacaaggctagcaacaccctgtcgatcatcgacagtggtgtcggcatgaccaagtcggacctcgtcaacaacctcggtaccatcgccaggtcggggaccaaggagttcatggaggcgctcgctgctggtgctgatgtgtccatgattgggcagtttggtgtcgggttctactccgcctaccttgttgctgagagggttgttgtgaccaccaagcacaacgacgacgagcagtatgtgtgggagtcacaggccggtgggtccttcactgttacacgtgatacctctggtgagcagcttggacggggtactaagatcaccctctacctcaaggatgatcagctggaataccttgaggaacgtcgcctcaaggatctggtgaagaagcattctgagttcatcagctaccctatctccttatggactgagaagacaaccgagaaggagatttctgatgatgaagacgaggaagagaagaaggatgctgaggagggaaaggttgaggatgttgatgaggagaaggaagagaaagagaagaaaaagaagaagatcaaggaagtctctcatgagtggaacgtgatgaacaagcagaaacctatttggttgaggaagccagaggagatcaccaaggaagagtatgctgctttctacaagagcttgacaaacgactgggaggaacatctggctgtcaagcacttctctgtggagggtcagcttgaattcaaggccatcctgtttgtaccaaagagagcgccatttgacctctttgacaccaggaagaagcaaaacaacatcaagctgtacgtacgccgggtgtttatcatggacaactgtgaggagttgatcccagagtggctcagctttgtcaagggcattgttgattctgaagaccttcccctcaacatctcacgtgagatgctccagcagaacaagatcctgaaggtgatccgcaagaaccttgtgaagaagtgcgtggagctcttctttgagatcgctgagaacaaggaagactacaacaagttctacgaggccttctccaagaatctcaagcttggcatccatgaggactccaccaacaggaccaagattgctgagctcctgaggtatcactccaccaagagtggtgatgagttgaccagcctcaaggactacgtaacccggatgaaggagggccagagtgagatctattacatcactggtgagagcaagaaggctgttgagaactcccccttccttgagaagctgaagaagaagggatatgaggtcctgtacatggttgatgccattgatgagtacgctgttggtcagcttaaggagtttgagggcaagaagctcgtctctgccaccaaggaaggtctgaagcttgatgagagtgaggacgagaagaagcggcaggaggaactcaaggagaagttcgagggtctgtgcaaggtgatcaaggaggtgctcggtgacaaggtggagaaggttgttgtctctgaccgtgtggtggactctccctgctgtctagtcactggggagtatggctggactgctaacatggagaggatcatgaaggcccaggctctgagggactccagcatggccggctacatgtcgagcaagaagaccatggagatcaacccggagaattccatcatggacgagctccgcaagcgtgccgatgctgacaagaacgacaagtctgtgaaggacctggtgatgctgctcttcgagactgccctcctgacctccggcttcagccttgaggaccccaacaccttcggcaccaggatccaccggatgctcaagctcggcctgagcatcgacgaggacgagtctgctgaggctgacgccgacatgccgccgctggaggacgacgccggcgagagcaagatggaggaggtcgactaa

SEQ ID NO: 3320 - DNA, 1893 bp, Oryza sativa
atgaaagaggagatgatcaagggagactcaaagcagctagcttctatgtacatgaaagaggagatgatcaagggagagaggcagcttggaacccmtgaagatcggttaaaagacgaggttataaaagatggcgataaaatttcagatggcaattttttcaagtccttgcaaaacatatcaagcacaaaggaggaggtgtgttcaccaggcccaatagaaagatcatgtatggactcatcattgctaaacatgaaagctcaaaataagggtcaggatgataagcttgaatcaacaagggcagaaatgggtgaagtacgagaagagaacgagaggctcaagacgttgctgtcgcgcatctcacacgactatagatctcttcagacgcacttctatgacgttcttcagcaaggccgagctaagaagctcccagactctccggccaccgacatcgaggagcctgaactcgtctctctgagacttggaacgagcacgagcaaatgcaagaaggaagacaagagtaccaccagtagcgaagtcaaagggagtactgaagattttctgaagatcaaaggaggtctctctcttggattatcagactgcagagttgatgctaataacagtgagaaggtacagccggatgtgatgacgttgagccctgaaggcagctttgaggatgctagggatgacaccgcagagaccacagagcaatggccaccaagcaaaatgctgaagaatttgaggagcgtcggcgcggaagccgaggatgacatagctcctcagccacaggtcaagaaggctagggtttcagtgagagcgagatgtgatgcgccaacgatgaatgatggatgccagtggagaaagtatgggcagaagattgcgaaggggaacccgtgcccgcgcgcctactaccggtgcaccgtggcagcaggatgcccagtcaggaagcaggtgcagcgatgcgcggatgacatgtccatcctcatcaccacctacgagggcacgcacaaccacccgctctccgtctccgccaccgccatggcctccaccacctccgccgccgcctccatgctcatctccggctcctcctccacctctctcgccgcctaccccgccgccgccgcgtcgccggccctcgcattcgacgcctcctccaagccgcccctcatcggcggccgcccgttcttcctcccgaccgccgccgccgccgccatcacctccaccccttcctaccccaccatcaccctcgacctcacctcgccggccgccgccgccacctcctcccacgccgccttctccctcagtaacaggttctcgcacaccaggtacccttccaccggcttcaccttctccggctccggcccgagtagcgcgccatggccggggtacttgagctacggggcgtcgctatccgctcacccgtacaacgccggcggcggcaagagctcgtcgtcgttcgaggctgcgctgagcagcatcaacggaagcaggcagcagggcggcggcggckttgcggttggcgccgccgctttaccagatgcagcagaaggcggcggccgcggcgccgcagatgccgagcgtgatcaccgacacgatcgcgaaggcgatcacggcggacccgagcttccacacggcgctggcggccgccatcacgtcgtacgtcggcaagaagggctcgccgccggcgtcgggaggagaggacagcaaggtcgggctcaagtggggggagcacctcgggctcgggctgacccactcgtcgctgtcgacggcggcggcggcggcggcgagctcgagcagccagatgttcttgcagccatcgctggggttatcaggatcgacgacgagtgcgtcgacgtctcctgtggcgaacagagagcaagcacattaattaattag

SEQ ID NO: 3321 - DNA, 1629 bp, Oryza sativa
atgtcaaatcacaattctccctgtgacatcccaaagcctgcctctgttgatgaattcgtcaagaatggcaagaagaagaagtcattcatgtcgagcatctttcggaagaaagggaggagcggcacggggagctcggacaagaagctgctatcgcggagggatatcgtcttcgatcggcattgcgccacaaaaattgagagcttgactctaagctgcttggattcaccccacaggcagttcgatacccgggaataccgggtgttcgtaggcacatggaatgtggctgggaagcctcctaacagcagccttaacctggaggattttctacagatagaaggattacctgatatatatgtcttggggtttcaggagatcgttcctctgaacgcaggcaacgtgctggtcatcgaggacaacgagccagcggccaagtggctgggcctcatataccaagctctgaacaagccccaggaccagtcctccggcgacgagctgtctccgccggagacctccgacagccggcagggcggcggcagcggcagccgcgactccatacccaagtcgtcgagcggcggcatgctcttcttccagaagccgtcgctgaagatgctgagcaagaactaccgcgtggacagcgcgctggtgaagacgtgcacctgcctgaccgacccgtccaccatgcagcgccgggcgcgggaaatgcgggagttcctctaccgcatcgaggcgtcgccgccgccgtcgttggcgtcggcggcggcggcggccgacgaagacgggggcccggacgccggcggcaagctggcgaggagcagcgtgaactactgcctgatcgcgagcaagcagatggtgggcatcttcctgtccgtgtgggttcggcgggarctcgtgcagtacatcggccacctcagggtgaactccgtcggcagaggcatcatgggccgcttcggcaacaagggttgcatcgcgatgagcatgacgctgcaccagaccagcgtctgcttcgtctgcagccacctcgcctccggcgagaaggaaggcgacgaggtgaggaggaactccgacgtcgccgagatcatcaagagcacgcagttcccgcggatctgcaaggtgcctggccagcgtatccccgacaagatccttgaccatgaccgggtcatatggctaggagacctgaattaccgagtcgcgctaagctacgacgagacgaagacgttgatgggggagaatgactgggatacattacttgagaaagaccagttgatgatcgagagacaggcagggagagtgttcaaagggtggaaagagggcaagatctacttcgcaccgacgtacaaatacaagcagaactctgactcatacgcaggggagacggccaaatcgaagaagaaacgaagaacacctgcatggtgtgaccggatactgtggcacggccagggaatcgagcagctgcagtacatcagaggggagtccaggttctcggatcacaggcctgtttgcagcgtgtttgtgatcgaagccgatgtagataatggaagcatgatcagaaagggctactcaactctggattccaggatccatttcgagtctccgataccacaaagacacagcttctacgatgatttctga

SEQ ID NO: 3322 - DNA, 1137 bp, Oryza sativa
atgagctccgcaagcggtgtgaacaatggtgatggaaaagaagcggcactgtttgagcagcggctatccaagattggtgaagttagagctgccctaggacaactatcaggaaaagctgcgctatattgctcagatgcttcgattgcgaggtacctggtagcgaggaactgggaagtgaagaaggccacgaaaatgctgaagaaaaccttgaaatggcgttcagagtataagccagatgagatccgttgggatgagatagcaaacgaagctgcaactggaaaaatctaccgaactgattactttgacaagagtggacggagtattcttgtcatgagacctggagttcagaataccaagaaggccaaggggcagatcagatatttggtatactgtatggagaatgcaattctgaatcttccgcatgaccagagtcagatggtttggctcattgattttgctggattctcattatctaacatatcacttcatgtgacaaagttgacagcagatgtcctacaaggtcactatcctgaaagattgggtgttgcaattctttacaatgctcctaagttttttgagtctttctggaagatcgcaagccccattcttgagccaaagactttcaacaaggtcaaatttgtatacccagataggcctgagactaacaagatcatggaagacctttttaacatggaagaattagaatctgcatttggtggcaaaaaccaggctacttttaacataaatgattatgctgcaaggatgagagaagatgacatcaagatgccattgttctggagtcctgaaaattctgctcttgcttcagagccatatgtgatggtgaacaaggacatggcacaagaaggtagttcaggtttgaagagtgaagagactgcatctgaaaagagggaagaaacagatactgaatctgaaaacagggaagaaacagagagtgaatctgagagggcagaaatagactctgtatctgggaagagggaagaaacagtggctgtatctgacaagagagaagaaaaagagactgaatctgaaaatgggaaagccgcagtgacttcatcaaacggagttgagctgacaagcttgccaggcgaaggtaaaggtataaccccggcagattga

SEQ ID NO: 3323 - DNA, 2136 bp, Oryza sativa
atgccgcagtcggtgctcgtcgaccgcgcgacgagcgagtcgctcatcgggcccgactggtccctcaacctcgagatctgcgacatcctcaaccacgacccctcattgcttcctgataacattcttcaattatatcgtatggtgttgtcacttctagtatatttactcatacttcaatattcacgtagccaagccaaagatgtagtgaagtctatcaagaaacgcattgggcacaagaactcaaagatccagcttctcgcactaacattgctggagacactgattaaaaattgtggagactttgttcatatgcacgttgctgagagggatatactccatgaaatggtgaagatagctaagaaaaagcctgattatcatgtaaaagagaagatactaattctgatagacacttggcaagaagcttttggtggttcccgtgcaagatatccgcaatattatgtagcatatcaagagctcctgcgcgctggagctgtatttcctcaaagaccagacagctctgtgccaatctatactcctccacagactcaacctctacggaatcttcctccagctctgcgtaatactgagcgtcaacaagaagcacctgaatcttcttcaacaccagaagtacctacactgagtttgacagaaatccagaatgcacgtggtgtcatggatgttctttcagagatgttgaatgctattgatcctggcaacagagagggtctaagacaggaggttattgtggaccttgtggatcaatgtcgttcttacaagcagagggtggtacagcttgtcaactcaaccacggacgaggagctgctaagccagggtctttcattgaatgatgatttacagcgtgttcttgcaaaacacgatgcaattgctgcaggcatagcagttcgtgtagaaaaaccaaaatcagtccaggcccgaggggacaagtctccatcaatcaaaccagaaggggcaaaacagccagatcagaggtcttctgaagctgccagtaccgtgactccatttgagcaattagcgcttccagcacctgcatcatccagcagttccaaacctcctgtagaaccagctgttggccctagtattgacctacttagtggtgatgactacttcaagccagaacctgttaattcccaggcccttgtttctgtaggcaatccacctgctgcttcagccaacaataccttggacctggtagacatgtttgcacaaagcaatgttggcaacaacccgaaccctgctgtcacctcttctatgttgaattcaaatcctagtctctctgagccacagctgtatccctcacagcagactgtgccaccacaacagccttctccatactctaatgggttaacttcaaatacaatggcaccgtatgatcaaccctctgacataaacgccacaggttcatggaatagtcaatttgctcatggaatgcttcctccacagcttcctccacaacttcctccacagcaaccaccaaattacggtcaaggtcaagatcagagtggtgatctcccaccaccaccctgggaaactcaacctgcagaaagtgatcaattccagcctgggcaacctcgtgggctagcaatgccatcagggcaaattggaggcattcaatcccaacctgttcaagttcagcccgggcaagttgcaccattacaaccaatgctgaccgggcaacccacaggaatgcagtttcagcaagggtttggggatcagcttggggctcaacaaacacaacccttgcacacacaatatggtggaatgtatcctacaatgcaaggtaaccaatcagctggcatgtatccccagcagatggctggagatttctaccagcaacagatgtatggtggtcagatggctggttatggatacggtcagcagtctggaggatactatgctccaaacgctgcgtatgggtatggcggtgcaaacgagctttctcagggaatgaatggccttgcagtgcaagataacagtttgtatggaacttctgcatcctcttccttccagcagccaatgaggccatccagacccgaggattccctctttggtgatcttgttagcattgctaaaacaaagcctagcaaaactgcagctaataaggctggtggcttgtaa

SEQ ID NO: 3324 - DNA, 717 bp, Oryza sativa
atggatcggacgtcagccgtgccggggagagtgagcgacccggggtccgcgtggttcggcggcggcgagaggagctcgtcggccgggccggggcgcaacgtgcggctcatcgccaccgccgtcgccgcgttcgtgtccgtgctcgggctggccctgttcctccacctctacgtctgccacgtacgccgccggaaccgcaggcgcgcggcggaagcggccgcgctggcgaccgtgaacgcgggggcgccgcccaagcaggtcgggctggacccgtcggccatcgcggcgctgccgaccgcggcgtacgggaaggtggcgggcggcgacgcggcgggcggcaccaccgagtgcgccatctgcctcggcgccatgcaggaggcggacgcggtgcgcgtgctgccggcctgccgccacgtgttccacgtcgcctgcatcgacaagtggctcgcgtccagctcgtcgtgcccggtctgccgcgccggggtggagccgccgccgccgcctccgtcaacggcggcggcgaggtgcgtgcacgagaagcaggacgcggagaaggaggaggcggccgccggtagctcggcgccggtgcgggtgctcggcgcgtcgctaatgaagatgctgagcagggagagaccgtcgccgaggaggcagccgggagtccacgccgtggaaatggaagacttggaaagccagctgccgcggccgcaacagcagtag

SEQ ID NO: 3325 - DNA, 1974 bp, Oryza sativa
atgggtagtggaagcgcggcgaacggcggcggaggaggggccggggcggcgagggtgccgatgccggcggcgaagccgttcctggagacgctgggggggaacatgaaggagacattcctgccggacgacccgttcagggtggtgcggcgggagcgcgggtgcgggcggcgcgcggcggcggcgctccggtacgtgttcccgttcatggagtgggcgccgtcgtacaccctcggcaccctcaagtccgacctcatcgccggcatcaccattgccagcctcgccatcccccagggcatcagctacgccaagctcgccaacctccctcccgtcctcggcctctattcgagcttcgtgccgccgctggtgtacgcgatgatggggagctcgagggacctggcggtggggacggtggcggtggcgtcgctgctgatcgggtcgatgctgagcgaggaggtgtcggcggcggaggacccggcgctgtacctgcacgtcgcgctcaccgccaccttcttcgccggcgtgttccaggcgctgctgggggtcttgaggctggggttcatcgtggacttcctgtcgcacgccaccatcgtcgggttcatgggcggcgccgccaccgtggtgtgcctgcagcagctcaagggcatgttcggcctcgaccacttcaccaccgccaccgacctcgtctccgtcatgagctccgtcttctcccaaacccacctctggcgatgggagagcgtcgtcatgggctgcggcttcctcttcttcctcctcatcacccgcttcttcagcaagaggaggccaaggttcttctgggtatctgcagctgcgccattggcgtctgtcatcatcgggagcctcctggtgtacctcacacatgctgaaaaccatggcattcaagtgattggttacctgaagaagggcctgaacccaccgtctgccacaagcctgaacttctcgtcgccgtacatgatgctggccctgaagaccgggatcatcactggcgtcattgccctcgctgaggggattgccgtaggaaggagctttgcaatgttcaagaattaccacatcgacggaaacaaggagatgatcgcgtttggaacgatgaacattgtgggatcactcacctcttgctacctcaccaccggtccgttctcgaggtcggccgtcaactacaacgccggctgcaagacggcgatgtcgaacgtgatcatgtcggtggcggtgatgatcacgctgctgttcttgacgccgctgttccactacacgccgctggtggtgctgtcggcgatcatcatgtcggcgatgctggggctgatcgactacccggccgccgtccacctgtggcaggtggacaaggtggacttctgcgtctgcctcggcgcctacctcggcgtcgtcttcggcagcgtcgagatcggcctcgtcgtcgccgtcgggatctccatcctccgcgtgctgctgttcgtggcgcggccgaggacgacggtgctcgggaacatccccaacacgatgatctaccggcggatggaccagtacaccgccgcgcagagggtccccggcgtgctcgtgctccgcgtcgactcgcccatctacttcaccaacgccagctacctgcgtgagaggatcgcgcggtggatcgacgacgaggaggaccagtgcaaggagaagggcgagatgggcattcagtacgtcgtcctcgacatgggtgcggtcggaagcatcgacaccagcgggacgagcatgctggatgaactcaggaagaccctggacaggaggggccttcagattgtgttggcgaacccggggagcgagatcatgaagaagttggacagctccaaggtgcttgaggcgatcggccatgagtggatcttccccacggtgggcgaggcggtggcggagtgcgacttcgtgatgcactcgcagaagccgggaatggtcatgggcagtggagcaccccatgagaacctggtctga

SEQ ID NO: 3326 - DNA, 798 bp, Oryza sativa
atgtcgccggcggagccgacgagggaggagagcgtgtacaaggcgaagctggcggagcaggcggagcggtacgaggagatggtggagtacatggagcgcttggcgcgcgcggcggggggcgcctccggcggggaggagctcacggtggaggagcggaacctgctgtccgtggcgtacaagaacgtcatcggcgcccgccgcgcgtcgtggcggatcatctcgtcgatcgagcagaaggaggagggccgcgggaacgacgcccacgccgccaccatccgctcctacaggggcaagatcgaggccgagctcgcccgcatctgcgacggcatcctggccctgctcgactcccacctcgtcccctccgccggcgccgccgagtccaaggtcttctacctcaagatgaagggcgactaccacaggtaccttgcggagtttaagtctggcgacgagaggaagcaggctgcggagagcaccatgaatgcatacaaggctgctcaggacattgctctcgcagatttggctccgacccaccccataaggcttgggcttgcactcaacttttcagtgttctactatgagatcttgaactcccctgaccgtgcctgcaacctcgcgaagcaggcgtttgatgaggccatatcagaactggacagccttggtgaagaatcctacaaggacagcactttgatcatgcagctcctgcgtgacaacttgactctgtggacttcagatgccaatgatgatggtggtgacgaaatcaaggaagccgcagctccaaaagagcctggggatcagtga

SEQ ID NO: 3327 - DNA, 1128 bp, Oryza sativa
atgggggttgggcgggcggcggatgggctgctcgccggcgcggcgctggtgagcttggaggcgtcgctgcggcggcggaccggggatgagacggcgaggctggcggatttcttcgatgtcgctgctggctccggcgccggcggcgtgctcgcggcgatgctggtcgcgcgcggcggggatgggcggccgatgttctccgccgaggacgcgctggcgttcctcatgaggagcctgcggcgagggtggtccggcggcggcggcggcgcgccgccggtgttcggcgacctgacgctgcgggacacggtgcggccggtgctggtgccgtgctacgacctcgcgtcggcggggccgttcctcttctcccgcgccgacgccgtcgagacggcggcgtacgacttccgcctccgcgacgtgtgcgccgcmacctgcgccgggtcggacggctcggcgtcggcggtggaggtgcggtcctccgacggcgcmacccgcatcgcggccgtcggcggcggcctcgcgctcggcaaccccacggcggcggccatcacccacgtgctcaacaacaagcgcgagttccctttygccgccggcgtcgaggacctcctggtcatctccatcggcagcggcgagtgcgacaaccgccccaccggtggcgccgccgcctcgacatccgagatcgtcaggatcgccgccgaaggcgtcgccgacatggtggatcaagcagtggccatggcgttcggacataataggacaaacaactacatccgtatacaggcgatggggtcgccgcgggcgagccgaggagggatgagatgcggcggcggcggcggcggcgatggcgcggggtggggcgtggcggaggagatgctgtcgcagaagaacgtggagtcggtgctgttccgggggaagaagctggcggagcagacgaacgccgagaagctggagtggttcgcgcacgagctcgtcaaggagcgggatcgccggaggacggccggcgcgctcgcccccgccgtcgtcaagcagcagccgtcggagtcggcgccggcgacggcggccgccgccgatggccacacgccgccgccgacgtcgtactcgaacctggtcagccagatgttcaccaccatcctgtag

SEQ ID NO: 3328 - DNA, 1083 bp, Oryza sativa
atggtcggtggcttcgacaaactgaaagtggagttcatcgaccaagatgagagtgtgcaggtcgttgcagacaccatcagaagctccggtgagattcctgaaaggtatgccaggcctgagatggaggccgatcctgtcatcatcgacaccgatggttacaatctgccggtaatagatatgtcaaggttgatcaatcctgagttctccgaggaggagattgccaagctcggatcagcctgtgaggattggggattcttccagcttgtgaaccatggggtggatggggagttgctgcaacggatcaaggatgacatcacagagttcttcagacttcctctgcaggagaagatgtccgtggcgatcccacccaatggcttgcaggggttcggtcaccacttcgtcttctccaaggagcagaagctggactgggtcgatttgctcttcctcaccacacgcccagtggaggacaggmccacagagttctggcctacaaagcctcccacattcagggactcacttgacaagtactcgctggagattgcaaatgtgtctgctaagctgttcaagttcatggccatcaacctgggcgtcgacgaggaggcactccttgcagcattcaagccagagcaacctcagagtgtaaggatcaaccattacccaccctgcagtcaggctaacaaggtgctgggcctctcgccgcacacggatggcgtcggcatgacactgctcctccaagtgaacgacgtgcaagggctccagatcaggaaggacggcaggtggttcgccgtgaagaacctccctggagccctcgtcgtcaatgtcggcgacgttcttgagatcctcaccaatggcaagtacaagagtattgagcacagagcagtaataaaccctgataaggaaaggatcacacttgctgcattccagagcgttccgctttccagcacagttggcccactccaggagcttctgatgaaaggtgaggcacgctacaagacggttgatggtgctgagttcaccaaaggctactttgccgcgaagctggaaggcaggagatacctggagagcttgaagctgggagtgtga

SEQ ID NO: 3329 - DNA, 717 bp, Oryza sativa
atggcggcggacgtgagctctgtggcgaggctgctgcgaggggaggccgggaggaggggcggggcggcgggggaggtcgtgacgatggatctgctcggcgggtgcggcggcgacagccgcggcggcgtcstcggcggcggcggaggggaggacgaggtggtcgacctcgaggtgaaggttcccgccgggtgggagaggcggcttgatctcatgtcagggaagacgttcttgactcctcggctccagggcgtccatgtcggccaccaagacctcaacctgcctccgccgccgtcctccgccgccgcggccgcgtcgacgtcggccgcggtctgcacgctcgacatggtccgctccgcgctcgagcgcgccacggccgggaggtcggccgccgccgccgccgcgcgtggctccccggccacgtcgtcgtcgtcgtcggcgtccacctcctcgtcctcctcctccatcggcaagcgccaccgcttgccgccctcaggcggcgccgccgcgacgcccgcgagcccgtccatgcgtgcggccgcctgcccgtcctgcctcacctacgtgctcatcgccgaggcggacccccggtgcccgcgttgcgccggcaacgtcccgccgctcgccgggaagccccgggaagcctccgccggcgccggcgacggcagcgggaagaagcccaagattgacctgaatgcggcggccgacgacaccgagtga

SEQ ID NO: 3330 - DNA, 2175 bp, Oryza sativa
atgggcggcgtgtgctcggcggggatcccgggggacaggtcgccggcggagctgtcgttccgggcgatggggctcgtggtggagcaggagctcaaggcgttcccggccgtcgccggcaaggtgcaggggaagcacaagacggcaccggtggaggtggcgccggagcctgatccgccgcgccgcctctcccccgagaaggccccccggctgtccaccggcggcggcggcggcaaggctcgccggtcggtctccaaggagccgcagctggtgcgctcctcgtcggagaagctcaaggccggcaagtccaggacaagcacctccggcaaggcaagtctcccgattctttttcccccctctatttcttcaagcaacaggattagcattgccatttggattaatagatggttaacatcgatcatgaacatttttgcttcaaagttgagagactgcaagatgtggactccgtcttattttgttgacgcttcagacaaaggctcggtgtttggtagagccagcacatctgggattgggaaagcagtggaggttttggacacactgagcagcagcatgacgaatttgagccctgtaggtgggtttgtggcgggcgcgaagatgaaggggagcccacaaaagattcttgcgtttgaggttgccaacacaatagtgaagggcatgagcctgatgcagtctctgtccaaagaaagcgtcagatacttgaaggggaccgtcctccgatcggagggcgtaaagcgtttggtttctagcgatatgagtgagttgatgagaattgctgcagccgacaagaggcaagagctggcgctattttcgcgagaggtgatcagatttggcaatcgttgcaaggatactcagtggcacaacctcgatcgctatttttccaagctagaatcagaaattacgcctcaaccaaacttgaaagaaatagcagaagcagagatgcagcaattgttgacactggttcggcacacggctgatctgtaccatgagttgcatgcattagatagatttgagcaagattatcgccgtaaattggaggaagagaaaaaatcagttgcttttgaaagaggggacactgttcagattataaggcaagaattgaagagccaaaggaggcatgtgaaaagcttgaagaaaaagtccctttggaataagatgctcgaagacgtcatggataaacttgtggatattgtccactttttacatgtagagattcaagaatcttttgggacctatgatggagctttacaattgaatcaaccttcagagagccgtcagacgttaggatcagctggcctctcgctgcactatgccaatatcatttcacagattgacaacattgtttcccgaagcaccgttccaccacaaagcacaagagatgcgctctatcaaggactgcccccaactattaagtctgctcttcgaaaaaaactacataattgcccacaaccacaagaggttccgatcactgaaatcagatcttcaatggagagaaccttgcaatggattatccctattgccaacaatacagccaggaacgatgcgatgcggagggcsgctgggcagccagacgtgatcaagatcgagacattctaccatgcggacaaggccaagacggaggcgtgcatcctggacctcgtcctgtggcttcaccacctcatcagctacagccgcccaagcaacggtggcaggtcaggtcgccgagcaggtcgccggtgcgctccccttcccctcacgccgccgcaccaggtgccgacgacgacgtcgtcgtcctcgccgcmaccgccggcggtggcgaggccgagcggcggcaccggcggtggcctcaccagggaggaccgcgcgatgctccaggacgtgtacgcgggccgccggcgtcgcgctccctgtcacagcaggagccaggagctgtcgtcagctcgcggcggcggcggcgccggcggcgacagctcgtcggcggtggcagccgcggcgcagctgagcaagaacgacaggctgagcaagagcagcaacgatgctccggcgcggagcggcggcggcggcggcggcgggaagctcttcccgctgagcaggaggccctcctccgccgtggtgtcgcccgccgtcgacttcgacatcgacggcatcaaggcgctggcggatgcacagaagcggcagtga

SEQ ID NO: 3331 - DNA, 2535 bp, Oryza sativa
  misc_feature (1)...(2535): n = A,T,C or G
atgaaccatttgntggtgsccccgtcccsttttcccggngnttttgncgcgwcgsggcaagncggcggcttgtccscgttggcsgggcccccgcctgatgccgcgcgccccgctttgccgcttcttcccccscgagcaattggggccgccggagcggcgcgctctgcgctgggcggcgggggtggtagcgggggcggaaactccccgccggagggggtgaagctgaacgagatcgtcggcggcggcatctccgggatcctctacaagtgggtcaactacgggcgcgggtggaggccgcggtggttsgsgctccasgacggcgtgctctcctactataagatccatggtcccgaccgcatcgtcctctcgcgcgagaccgagcgcggcgccaaggtcatcggcgaggactccctccgccgcctctcccgaccctccacctcctcgtcttcctccgcgcactccaacggtcaccacctaccccgcaagcctatcggcgaaattcacctcaaggtgtcgtccgtgcgggagagcagatcggatgacaggaggttctcgatcttctcggggacgaagaggctgcacctccgggcggagacaagggaggacagggcggcgtgggtcgaggcgctgcaggcgaccaaggagatgttcccgcggatgtccacgagcgagatggtggggccaggggacaccgcagcggccgtggctgtctccaccgagcgcctaaggcagcggctgcagcaggaaggagtcagcgaggcggccattgctgacagcgaaaggatcgtgcgcaccgagtttgaggtcttgcacaagcagctcatgctccttaagcagaagcagacgctcctcctggataccctccgtcagctagagacagaaaaggtcgatttggagaatacccttgtagatgagagccaaagacagtcaaaagagtacggatccacttctagatcaaagaatgagaagtatagtgaaggaagtgctagtgaatctgatgattataatgaaccacaagatccagctgaagacgaaactgacgatgatgagaatatatattttgatacacgagatttcctgtcatcaagttcttttaaaagcagtggatctgatttccaaagatcagaagctggttcggatgatgaggatgattatccaatggatggtattgatacctctatgaaatccgttggaattagttacccatatgtcagaaggcgtaagaagctgccagatccagtcgagaaagagaagggtaaatgctttgaagatcttgagtattcctaccttattgatcgcgcttatgaatgggggaaaaggggcaatagtctgatgaggatccttagtgtagcagcatttgctgtttctggctatgcatctacggatggaagaagctgtaagcccttcaatccacttcttggggagacctatgaagcagattatccagacaaaggcctccgttttttctcagaaaaggttagtcaccatcctatggtggttgcatgccattgtgagggaactgggtggcggttttgggcagatagcaacctaaaaagcaagttctggggtcgctccattcaacttgatcctgttggtgtgctaaccttggagttcgatgatggtgaagttttccagtggagcaaggtgacaacttccatttacaatctcatattgggtaaactgtattgtgatcattatggtactatgcgaatacaaggcaataatgaatattcgtgcaagttgaagtttaaggagcagtcaattattgatcgtaacccacatcagagggactatgtgatcagcatggttgttacgctgaagcagcaaggcacacagaagaaggcaaggcagtgcttggccttgcctcacaggagaatgaagggtgcaagggccaaggaaaatgggatggaagctgacttgctgtcacagatcccacacactgccatcagatgtagatccagattgcagttgttgcagcttacaactcttgaatctctggtggtggcagtggacagcgaggtacaaggtgttgttcaggaccgaagtggtcgaactgttgctacactctttgggaaatgggatgaaagcatgcactatgtgatgggtgattgctttggaaaaggcaagggatctgaaaatttctcagaggcccatttgttgtggaaaagaagcaaaccacctaagtttcccaccagatacaattttactcgctttgcaatcacattaaatgaacttaccgctggattgaaggaaaaactgccaccaacagactctagattgcgaccagatcagcgatgcctagagaatggtgagtatgaaagagcaaatgctgagaagttgaggcttgaacagagacaacgacaggcacggaagatgcaggagagcgggtggaaacctcggtggtttgcaaaagataaagctaccgacacataccgctaccttggtggttactgggaatccagagaaaagggcagctgggaaggctgtccagatatcttcggacaagttcctaacgatttgatgataactgactag

SEQ ID NO: 3332 - DNA, 1797 bp, Oryza sativa
atggccaccgccgcatccacctccgccgccgccgtcgccgccgcatcgcgcctcctcgtccgccgcgcgccgccgcgcctgctgcgccggttaccccgcgcggcgctcgccgcctctcgcccgtcgccgccgtcgtcgtcgtcgtacggtgcagcagccgtcgccctcggccggcagccgctcggccaccgcgctaggatgggacacaccgccgccgccgccgccgccgcgggccccgcgctcgggctcaccaagcccaacgccgtcgagccgccgcaggtttcatttgctgctaaagacgtcgaattctccgaatggaagggagacatcctcgcaatcgcagtgacagagaatgatctggtcaaaggatcagactccaaattcgagaatgcggtgttgaagaagctcgacggccagctcggcggcctcctgtcggaggcatcggcggaggaggatttcaccggcaaagccgggcaatcagtggtgctccgcctcccggggcagggtttcaagagggtgggtctgatcggccttgggcagaacgccccctccaccacaacggcttgcaagggcatcggcgaatccgtcgcgtcagttgccaagtctgctcaagctagcagcgcggctattgtttttgcttcagtgggtgggatccaggaagattttaagctgactgctgcggcagcaattgcttcaggaactgtgcttgggctgcacgaggacagcagatacaagtcggagtcgaagaaggtgcatcttaaacaagtagatcttatcggatttggttctggtccagaggttgaccagaaacttaagtatgccaatgatctctcctcgggtgtgatattcgggaaagaacttgtgaactcacctgcaaatgttcttactcctgctgtgcttgccgaggaggcatcaaacattgcttctacatacagtgatgtattcactgcgacaatattagatgtggagaaatgtaaagagttaaagatgggctcctacttgggagttgctgcagcttctgcgaatcctccccacttcatccacttgtgctacaaaccacctggtgggaatgccaagagaaagctggccattgttgggaagggtctaacttttgacagtggtggctacaacattaagactggaccaggctgcagtattgagctgatgaagtttgacatgggaggctctgcagcagtttttggtgcagcaaaagctttgggccaaatcaagccccctggagtagaggttcattttattgttgctgcttgtgaaaacatgattagtggcacaggcatgagacctggtgacattgtgactgcttctaacgggaagactattgaggtaaataacactgatgcggagggaaggcttacacttgctgatgctttggtgtacgcttgtaatcaaggtgttgacaagattattgatctggcaacacttactggtgcatgtgtcgttgcacttgggcctagcattgctggaattttcacgccaagtgatgaactagctaaggaagttgctgcggcatctgagatatcaggagagaagttctggagaatgccactcgaggaaagctactgggagtcgatgaagtctggtgttgctgacatggttaacaccggtggccggcagggtggttctattactgctgcactcttcctgaaacagtttgtggatgagaaggtgcagtggatgcacattgacatggccgggccagtgtggaacgacaagaagcgggcggccaccggattcggcgtctccaccctggttgagtgggttctcaagaactcatcttaa

SEQ ID NO: 3333 - DNA, 942 bp, Oryza sativa
atggccatccccaaggctctgctctttgccatcctcagctgcctctgcctctgcagcgctgtttctagcagctcgcgagcagagcgaccaacgcagccatggttggcgaggccacgagaggtggatggaacagtatgggcgggcaaccacaagttttggctcggcgttaaccagttcgctgacctcaccaactatgagttccgggcgacgaagaccaacaagggattcattcctagcacggttagggttcctaccacattcaggtatgagaatgttagcattgacacgcttccagcaaccgtggactggagaaccaagggcgctgtcacacccatcaaggaccaaggccagtgtggttgttgctgggcattttcggccgtggcagccatggagggtattgtcaagttgagcacgggcaagcttatctccctctctgagcaagagcttgttgactgcgatgttcatggcgaggatcagggctgcgagggagggctcatggatgatgccttcaaattcatcatcaagaatggtggcctcaccactgagtctaagtacccatacacagcggcagacggcaagtgcaatggtggatccaacagcgccgcaacaatcaagggctacgaggatgtgccagctaacaatgaggccgcactcatgaaggccgtggcaaaccaacctgtttctgttgccgtggatggaggcgacatgacattccagttctactctggtggcgtgatgaccggctcatgcggcactgacttagaccatgggattgtagccattggctatggcaaggacggtgatggcacacaatattggttgctgaagaactcctggggcacaacatggggtgagaatggcttcctgagaatggagaaagacatttccgacaagaggggcatgtgtgggcttgccatggagccttcatacccaactgcgtaa

SEQ ID NO: 3334 - DNA, 1845 bp, Oryza sativa
atggtggagtcgcttcgccggarcycgttcmgaargattgcaaaccttgtggttgatgctatgggcggtccggtggatgatgctgatgaaatgaacagggaatggggagtgaagagccgcgcgctatgccttcagcgcaacagtattgttctccctcttggtttgcttcgcattgggttgtcgcgccacagatctttgctatttaaggtactagctgatcgagttaatctaccatgcaagcttgtcaaaggaatatattatacggggacagatgaaggggctattaacttggttaaaattgattttgacagtgttgaatatatagttgatctgatgggagctccaggcacattaatcccttcagatatttctggcagtcagtttcaggactccaacaatagtcaactgagcaatgatgccatcgaggagagtgttgcagaactatgcatagcccttgagcagattagtgctggatgtaagaatacaagtgacatggggggaagttcatctgaacaaaaatctgctttagcacttgcaagttcacagctggaagacatcttccacacagagaacccgcttaaacaaagtaccatatctgatggaggggaaattccgcatctgatgaaagtcaacgatgctcccatgtatttagtgcccacagaagtggacccacagtttgcacaaaatttgcaagacttgctcctggagggcactgcattgctacccacctatgagaaacctgaaatatgcaaacatactgcttctgaagatgacaaaactgcaggatggttggtaatcgctaaaacaggtcaaaatttgccaaatggtcatgtagcggaagattctccattgcaacatggcaataccaaaacactagcagtagtgaattgtttccatgaagatgcacagcatgatgtggggaatacagaagcaattggcagaaatttggatttgcatgatcatacagctcatgccattgccaacgaggaccaaaggttttctgaggactctttggtgaagatgccaggaagtagcaatggaaacttggacaagtcgagctgttctagcacgaaaacaatcagctctgttatagatgacgttgctgactatgaaataccatgggaagatcttcatattggagagcgcattggtctaggttcatatggggaagtatatcatgcagattggaatggcactgaagttgcagtgaagaaatttcttgaccaggatttatcgggtgttgcactagatcaattcaaatgtgaagttgggatcatgtcaaggctgaggcatccaaatgtagttctgttcttgggatatgtgacacaaccaccaaatctttcgatattaactgaataccttccaagagggagcctttaccgcctattgcataggccaaacagtcaaattgatgaaacacgaaggctaaaaatggcattggatgtggcaaaagggatgaactacttgcatgctagccatcctactattgtgcatcgtgacttgaaatccccaaatcttttagtggataaaaattgggttgttaaggtgtcagattttggcatgtcaaggttgaaacatcacactttcctgtcctctaaatcaacagctggaacaccggagtggatggcaccagaggttctacgtaatgagccatcaaatgagaagtgtgacgtatacagttttggagtaatcctatgggaactagcaacaatgcgtgtaccatggagtggactgaatccaatgcaagttgtaggagcagttgggttccagaacaggcgactagaaattcccaaagaaattgacccactggtggctaccataatatcttcgtgctgggaaaagtaa

SEQ ID NO: 3335 - DNA, 500 bp, Oryza sativa
atggacgcccatggacaggaggaggaggaggagccgatgcaggtgcagcaacagcaggcgttccgcggggtgcgcaagcggccatggggcaagtttgcggcggagatccgcgactcgacgcgcaacggcgtgcgcgtgtggctgggcacgttcgacagcgcggaggaggcggcgctggcctacgaccaggcggcgttcgccatgcgcgggtcggcggcggtgctcaacttccccatggagcaggtgaggcgttccatggacatgtccctcctgcaggaaggggcgtcgccggtggtggcgctgaagcggcggcactccatgcgagcggcagcagcggggcggcggcgcaagagcgctgcacctgcaccggcggatcaggaaggcggaggaggggtkatggagctggaggacctgggacctgactacctggaggagctgctagccgcctctcagcccatcgatatcacctgctgcacaagcccaagccaccactccatctg

SEQ ID NO: 3336 - DNA, 980 bp, Oryza sativa
atggagggctcgtcgtcggacggcagcaggtacggcggctccgggaggtgcgcgctggtggcsgarctggtgcagatgcaaggcatggtgaggcaactggaggcggagatgggcacgcatggaggcggcggcgktggggktggtggggcggcgccgatggccgccggagcggacgagcggtgccgcgcgctggtgtccggcctgctgtcgtcgatcgaccggtctataagcatcgcgaggtcgtgctgcacggaggccgccgccgccgggcgcctgacccagcaggccggcgccgcgcctgagtcgccgccgtccgccgacggtagcgccggctcggacctcggcgccgactcccggtgccgcgccaatgcggcggggccgtgcaagaagaggaagacgctgcccaagtggagcaagcaggtgaaggtgaggtccgtgcaggacgtcggccccctcgacgacgggttcagctggaggaagtacgggcagaaggacatcctcggcgccaagtacccaagagcctacttccggtgcacgcaccggcacacgcagggctgccacgccagcaagcaggtgcagcgcgcggacggcgacccgctgctcttcgacgtcgtgtaccacggcgaccacacctgcgcgcatggcgtgcgctccgccgccgccgccatcgacggccaggccgcggcgagcgcggagcaaaagcatcagccgacgccgccgcaggagcagaacgccgtctcggtcgcgttcacctccatggccgtcgtcaacgcatcgacgtcgtcgcccttcgtgtccccggcgatgtcggactgccagattagctacgagctgggcggtggcagcatggccggagtccgcaacgtgcccgacgtggagcttgcctccaagacgaactcctccatgggagacgacatggagttcatgttctcgctggactccgatttcttggacacctacaagtactccagctatttcta

SEQ ID NO: 3337 - DNA, 1344 bp, Oryza sativa
atggcggtggcgtcgcggctcgcggtggcgcgggtggcgccggacgggggagcggcggggaggaggaggaggagggggcggccggtggtcgcggttccgacggcggggagggggcgaggtggggccgtggcggcgagcccaccgacggaggaggcggtgcagatgacggagccgctcaccaaggaggacctcgtggcctacctcgtctccgggtgcaagcccaaggagaactggagaattggcacagaacatgagaagttcggttttgaagttgatacattgcgtcctataaagtacgatcagatccgtgacatcctgaatggacttgctgagaggtttgattgggacaagatagttgaagaaaataacgttatcggtctcaagcaggctacttatatggttgcagggaaaacaaagcatttcactagaactggcggtcagtttgaacttagtgtgctctctgaaacattacatcaaacttgtgctgaggtcaattcacatctttaccaggtcaaagcagttggagaggaaatggggattggatttctcggaattggttttcagccaaagtgggcactgagtgacataccaataatgcccaagggaaggtacgaaattatgaggaattacatgcctaaagttggctctcttgggcttgatatgatgttccgaacatgcactgttcagattgcaacagcaatatttgctaattctcccttcaaagaaggaaaaccaaatgggtatcttrgcttaagaagccatattgggactgatactgacaacaaccgctcagggatgcttcctttggtgttcgatgactcatttggatttgagcgatatgtggactacgcattagatatcccgatgtattttgtctatcgtaataagaagtacattgactgtactggaatgtcatttcgggattttatggttaggctgaagcgatatctagagatgagaggtgctgatggtggcccatggaggagattgtgtgctttgccagtattttgggttgggctgttgtatgatgaggaatcactgcaaagtatttcggacatgacctctgattggacaaatgaggaaagagaaatgctaaggcgaaaggtacctgtaaccggtttgaagacacccttccgggatggatatgtaagagatctagctgaagaaattctgcagttgtctaagaatggattagaaagaagagggtacaaggargttggtttcttaagagaggttgatgcagtgatcagttcaggagtgaccccagctgagaggctgctcaatttgtacgagacgaagtggcaacgcagcgtcgatcctgtcttccaggagttgttatactga

SEQ ID NO: 3338 - DNA, 1917 bp, Oryza sativa
atggcgaaattgtgttggcaggaaatggcagggcaaagatctgattcgcagtcagatgaatcgttcgaatacatgttgcttgagagggaccctgatctttaccgtacagtcttctcgggcccgagccagataagtccgtggattgacccgagcgtgctgactttgcagcaccggatagggagaggtccatttggggatgtttggattgcaacccaccatcagaggacagaggatcatgatcggtaccatgaggtcgctgtgaagatgttgcatccaattagagaggaccaactgcaagccttctcagtgaggtttgacgagatctttagcaaatgccaaggtctaagcaatgtgtgcttcctacatggcatctcaacacagaatggaaggatttgtatagcaatgaagttttacgaaggatccattggagataagatggcccggcttaaaggtggaaggatccctttatcagatgttttaagatatggtgctgatttggcccgtggcattatagacctgcactcaagaggaatattgattctaaatcttaagccctgtaattttctccttgatgaacatgaccatgctgtgctgggtgattttggaattccgtccttgctgtttgggctctcactgcctaatccagatcttatccaacgacttggaactccaaattacatggccccagaacaatggcaaccaagcattagagggccaattagctatgagacagactcatggggttttgcctggagcatccttgagatgttgagtggcattcaaccatggcgtggcaaatcaccagatgaggtttatcagttggttgtcctgaagaaagaaaaaccaatttttccatacaatttgcctccagcaatagagaatgtcctttctggatgctttgaatatgactttagagaccgcccccagatgactgatattttagatgcatttgagagtgcaaaagatgtagattacgaaaatactgaccagggaaattctgaaaatctaaggatggtcagtccagccctgccaagccgcactaactggtcattcttcaaggacaagttgcaagtgggagacaaggttcgctcgagaaagcttaaaaacacttgtagtccaacaaccatggaagtccctgatggaaccatagttggaatggaggataatggagagcgtgatggctacattcttgtaaggatccatggtttacatgatcctttgaaggttcgctcttcaacagtggaaagggtaacctatggtttcgctgctggagactgggtacggcttagggaggatgagaagaagcgatctcaggttggaattcttcatagcattgaccgtagtggtactgtttatgtaggtctgattggagtggacaccctctggaagggtgaatactctgaccttcaaatggctgaagcctactgtgttgggcagtttgtgcggctgaaagccaatatttcaagcccacagtttgaatggcagcgaaagagaggtggaggactggctacaggccgtatttcgcagatactaccaaatggatgccttttcataaaatttccaggcaaatttaaccttggtgaagtatgcagttgcttggcagatccctctgaggttgaggtggtgagctttgacaagtgtgaggggatcgtgaagaagtacgagcacctcgaggatttccattgggcggtcaggccgctgttcattgctgtaggtttcttcaccgctctgaagctaggcatctttgttgggaagggcattgctcggccaagaagtcgaaaggttgccagcgtctctgatcagagtgatcatcagcaactacagcagcaagaagtgcaaaacaatgccaatgcagcatggctccctccaactgtggcaaacatgctgtttagagacggtcctacgctttctggataa

SEQ ID NO: 3339 - DNA, 1254 bp, Oryza sativa
atggagagcccggactcgtcgtccggctcggcgccaccgcgagtactacggcggcaacagcagcagccgggctcggcgccggagctgccgccggggttccggttccacccgacggacgaggagctggtggtgcactacctcaagaagaaggccgcctccgttccgctccccgtcaccatcatcgccgaggtcgatctctacaagttcgatccctgggatctccccgagaaggcgaacttcggggagcaggagtggtatttcttcagcccgagggaccgcaagtacccgaacggggcgcggccgaaccgggcggcgacgtcggggtactggaaggccaccggcaccgacaagcccatcatgtcgtcggggagcacccgcgagaaggtcggcgtgaagaaggcgctcgtgttctaccggggcaagccacccaagggcgtcaagactaactggatcatgcacgagtaccgtctcacggacacgtctagctccgcmgccgccgtcgctacgaccaggcggccrccgccgcccatmaccggcggtagcaagggcgccgtctctctcaggctggatgactgggtgctgtgccgcatatacaagaagacgaacaaggccggtgcggggcagaggagcatggagtgcgaggactccgtggaggacgcggtggccgcgtacgcgccgtcgtcgcagcagcatgccacggctgctgctggcatggccggttcgracggcgccggaggagttgctgcagcgcacggcggcgactacagttcactgctccatcacgacagccacgaggacaccttcctcgacgccgccggcctctcgaccggcgccagctctctcagccagctcgccgcggcggcaagggcggcggcgacaccgtgcgacgccaccaagcagcttcttgctccgtctccaaccccattcaactggttcgaggcattccttccacgggccaaggagtttcctagtgggctaagcaggagtagcagagacatcggcgacatgtcgctgtcatcgacggtggacaggagcctgtctgaggctggcgccgtggccattgacaccggcgacgccgccaatggcgcaaacactatgcctgcatttatcaatcctctcggcgtgcagggtgcaacctaccaacaacaccaagccatcatgggtgcctcgttgccatcggagtcagcagcagcagcagccgcctgcaatttccagcatccgttccaactctccagggtgaattgggattcctga

SEQ ID NO: 3340 - DNA, 1260 bp, Oryza sativa
atgtcgggcggcggcggcggcggcgagggcttcccgttccacgacgagctggcgtcgctgttcgctgagcggccgccgaacggcgccatgccggggatgctgcagcagcagcagccgtggtcgttcatcgactaccaccaccacctgatgcaggagagcgcgccgacgacgccgccgctggactacgaggcattcgccggggagttcgacgacgacgtggcgcctctggaggaggtgaagagggagctggtggtggacggcgtcgggttgttccctgggggtggtgcttctgctgctgcggcggcggcggcggtggcggggccgatgactccgaacagcatgtcggtgtcgtcgacgtcgagcgaggcgtgcggcgtcggcggcggcgccggaggggacgaggagtcggccgggaagtgcaagaaggaggaggagggggacggcggcgacgacgacggcaaggaaggatcgtcgacgaccaagggggatggcgatggagaagacaagaacaagaaaggaggtaaggggaaggggaagggggagaagaggccgcggcagccgcggttcgcgttcatgaccaagagcgaggtcgaccacctcgaggatggctaccggtggcgcaagtacggccagaaagccgtcaagaacagcccatttcccaggagctactaccggtgcacgacgcagaagtgcccggtgaagaagagggtggagcggtcgtaccaggacgcggcggtggtgatcaccacctacgaggggaagcacacgcacccgatcccggcgacgctgcgcggcacggcgcacctcctcggcgccgccgccgccgcgcaccaccacggcggcctccagtaccaccatcccggccacttcgcagccgccgtcggccaccgtttgcctccgcagccgcacgacgcgctcggcggcggcctcctggcgccgccgcatgcgcagcatctccatgccatgcagcaccagatgcagctggcggcggcggcggcggcgagcggcggatcactgcacgccgccgccatgcagcagatgccgcagcctgatcatgctggcttggttgccatcatcgcctctaccaccggtgcttccaccacgccgccgccgccgccggcgacggggagcgctgctgctgctactactcctctccggatgcagcacttcatggcgcaggattacggcctcctgcaggacatgttcatcccgtcgccgttcttgcacaacgacgacgccaacaacaacaaccaccgttga

SEQ ID NO: 3341 - DNA, 765 bp, Oryza sativa
atggccatcgaccacgagtcgccgttcaaggagctccgcctcaagaacaggaggatcatgggaggaggagggcctgagccggaggaggaggaggcggtggcgcacggagagcagtggccgcggtggctgagcccgctgctctcggccagcttcttctcgcagtgcaaggtgcacgccgactcgcaccggagcggcgagtgcaacatgttctgcctcgactgcgccgccgacgccgacgccgccgccgccgcgctctgctccctctgcctcgcccacaaccaccgcgaccaccacaccatccagatccggcggtcgtcgtaccacgacgtgatcagggtgtcggacatccagaggttcatggacatcggcggggtgcagacgtacgtcatcaacagcgcccgcgtggtgttcctcaacgagcgcccccagcacaaggccggcaagggcgccgtcgccaacatctgcgaggtctgcagccgcagcctcctcgacaacttccgcttctgctccctcggctgcaaggtcgtcggctgctccccccacgccgccaccgccgccgccaccgccaccgccaccgccgccaggaggaagagactacgccacgcccacgccatggcctccacctccgactccgacaactccacctcccctgccaagaggagcttcacgccgtccaccccgccgccgccgcccaccctgccgcccaagcgccgcaagggcattccacaccgcgcgccattcggcagcctcatcgtcgagtactag

SEQ ID NO: 3342 - DNA, 1800 bp, Oryza sativa
atggcgtcgtcctcgtcgtcccggctgctcttcctcctctcgtgcagcgtgctcgcgctgctcgccggcgccgaagtgcaccatcatgaattcattgttcaagagacgccggtgaagaggctgtgcaagacacacaacgtgatcacggtgaacgggcagctgccggggccgacgctggaggtccgggagggcgacaccgtggtgatcaacgtcgtcaaccacgcgcagtacaacgtcaccatccattggcacggcatccggcagttcaggacggggtgggcggacgggccggagttcgtgacacagtgcccgatcaagccgggcggcagctacaagtaccggttcaccatcgaggggcaggagggcacgctgtggtggcacgcgcacagctcctggctcagggccaccgtctacggcgcgctcatcatccgccccagggagaacaagacctaccccttcgagaagcccgcgcgagaagtcccccttattctcggggaatggtgggacgcggacccgatccaagtcatcagggaggctcagaggaccggcgccgcgccgaacatctccgacgcgtacaccatcaacggtcagcctggtgatctgtacaactgctccaaggaaggtagaaaatcactcactctagtatgcgtgttctaccagccagtgtgtgtgcgtcagtgcgtggcaaatttacagagacatgataacatgcatgcagagaccacggctgtcccggtgaagcccggcgagacggcgctgctgcggttcatcaacgcggcactcaaccaggagctgttcgtctcgatcgcgcagcacaagatgaccgtggtcggcgtcgacgcgtcctacaccaagccgttcaccacctcggtgctcatgatcgcgccgggccagaccaccgacgtcctcgtcaccatggaccaggcgcccacccggtactacctcgccgcgcgcgcctacgactccgcgcagggcgtggcctttgacaacaccaccaccacggccgtcatcgagtacgactgcggctgcgccaccgacttcggcccctccatcccgccggcgttcccggtcctcccggcgttcaacgacaccaacaccgccaccgccttcgccgcgggcatcaggagcccccacgaggtcaagatccccggccccgtcgacgagaacctcttcttcaccgtcggtgtcggcctgttcaactgcgagcccgggcagcagtgcggtggcccgaacaacactcgcttcacggccagcatgaacaacatctccttcgtcttcccgcagaccacctcgctcctccacgcgcactactacggcatccccggcgtgttcaccaccgacttcccggcgtacccgccggtgcagttcgactacacggcgcagaacgtcccccgctacctgtggcagcccgtcccggcgacgaagctgtacaagctcaagttcggctccgtggtgcagatcgtcctgcaggacaccagcatcgtctcgccggagaaccaccccatccacatccacggctacgacttctacatcctcgccgagggcttcggcaacttcgaccccaagaaggacgccaagaagttcaactacgtcgacccgccacagaggaacaccgtcgcggtgccgacaaacggctgggccgtcatccggttcgtcgccgacaaccctggggtgtggctcatgcattgccatcttgacgtgcacataacctggggcctggcaatggcgttcctggtggaggatgggtatggcaaactggagactctggaggcgcctcctgttgatcttccaatgtgctag

SEQ ID NO: 3343 - DNA, 1332 bp, Oryza sativa
atgggcaactgctgcggaaccaagattagctccgacgccatctcccggaacgcatctggttcaagaagaagaagatcaggaagcaggaggaaggggacggggctgagcagccgggtgtcgtcgtcggtggcggcggtgaccccacggagcgagggcgagatcctgcggtgtgccaacgtgaggagcttcgcgttcaacgagctcaagacggcgacgaggaacttccggcccgacagcgtgctcggcgagggaggcttcggctccgtcttcaagggttgggtggacgagaacaccttcctccccagcaggcccggcaccggcatggtcatcgccgtcaagaagctcaaccaggacggcttccagggccacagggaatggctggccgaagtgaactaccttgggcaactgtcacacccaaatcttgtaaagcttgtaggctactgccttcaagatgagcagaggcttcttgtctacgagttcatgcctcggggaagcttggagaatcatcttttcaggaggggctcacattttcagcctctctcctggaatcttcgaatgaaagttgcccttggagcagcaaagggacttgcctttctccacagcgacaaggccaaagttatctaccgtgatttcaagacttccaatgttcttctcgattcgaactacaatgcaaagctgtctgatttcgggttggcaaaggatgggccaactggtgacmagagccatgtctcaacaagagttatgggcacatacggatatgctgctcctgaatatcttgcgacaggtactctgttggaggctaaaatagtactatcgaagacccattttggatttaggtgctcttatgggtcacttgttggagacagtcttatgtatgcagatgcagtagggcatctgagtgcgaagagcgacgtgtacagcttcggggtggtgatggtggagatgctgtcggggcggcgcgcgctggacaagaaccgccccgccggcgagcacaacctggtggagtgggctcggccctacctcagcagcaggcgccggatcttccgcatcctggacgcccgcctcgccggccagtactcgctcgccggagcccacaaagcggcggcgctggcgctgcagtgcctctccgccgacgccaagaaccggcccaccatgcaccaggtggtcgccgcgctggagcagcttcaggagacgacgaccacgtctcatcatcatcggtcgccgcagagcaggatgttgctcggcggccgtggcttcaacgccagcggcaggtcgtctgctggtgctggtgctcgtccgaggcggctgtcggcgtcgcctctgcctgcctga

SEQ ID NO: 3344 - DNA, 2595 bp, Oryza sativa
  misc_feature (1)...(2595): n = A,T,C or G
atggtttctcggtcctactccaacctgctggacctggccaccggcgcggcggaccaggcgccggcgccggcggcgctcggcgcgctccggcggcggctgccgcgggtggtgaccaccgcggggctcatcgacgactccccgctgtccccctcgacgccgtccccgtcgccgcggccgcgcaccatcgtggtcgccaaccacctccctatccgggctcaccgcccggcgtcgccgtcggagccgtggaccttctcctgggacgaggactccctcctccgcaacttccagcactcgtccacctcccccgccatnggagttcatctacatncggcttccgcttccgcgacgacatccccgctggccgaccaggacgccgtcgcgcaggcgcttcctcgagtcgtacaactgcgttgccggcgttccttgccccccgacaatcgccgaagcgctactaccatggcttcttgcaagcagcatctgtggccgctgttccactacatgctgccgctctcccccgacctcggcggccgcttcgaccgcgcgctgtggcagtcgtacgtgtcggcgaacaagatcttcgcggacaaggtgctcgaggtgatcaacccggacgacgacttcgtgtgggtgcacgactaccacctcatggtgctcccaaccttcctccgcaagcgcttcaaccgcatcaagctcggcttcttcctccactcgccgttcccctcgtcggagatctacaagacgctccccgtccgggaggagctcctgcgcgcgctgctcaactccgacctcatcggcttccacaccttcgactacgcgcgccacttcctctcctgctgcggccggatgctggggctctcctacgagtccaagcgtggccacatctgcttggagtactacggccggacggtgagcatcaagatcctcccggtgggggtgaacatggggcagctcaagacggtgctcgcgttgccggagacggaggcgaaggtggcagagctgatggcgacttactccgggaaggggagggtcgtcatgctgggcgtcgacgacatggacatcttcaaggggatcagcctcaagctgctcgccatggaggagctgctgcggcagcaccccgagtggcgcggcaagctggtgctcgtccaggtcgcgaacccggcgcgcggccgcggcaaggacgtcgacgaggtgaagggggagacgtacgccatggtgcggcggatcaacgaggcgtacggcgcgcccgggtacgagccggtggtgctcatcgacgagccgctccagttctacgagcgcgtggcgtactacgtcgtcgccgaggtgtgcctggtgaccgcggtccgcgacggcatgaacctgatcccctacgagtacatcgtgtccaggcagggcaacgaggcgctcgacaggatgctgcagccgagcaagccggaggagaagaagagcatgctggtggtgtccgagttcatcgggtgctcgccgtcgctgagcggcgcggtgagggtgaacccgtggaacatcgaggccgtggcggacgccatggagagcgcgctcgtgctgccggagaaggagaagcggatgcgccacgacaagcactaccgctacgtggacacccacgacgtgggctactgggcgaccagcttcctgcaggacctcgagaggacgtgcaaggatcacgcgcagcggcggtgctggggcatcggcttcgggctgcggttcagggtggtgtcgcttgacctcagcttcaggaagctcgccatggagcacattgtcatggcgtaccggagggcgaagacgcgcgccatcctgctcgactacgacggcacgctcatgccgcaggcgatcaacaagagcccgagcgccaattccgtcgaaacgctgaccagcttgtgcagggacaagagcaacaaggttttcctctgcagcgggttcgagaagggaacactccatgactggttcccctgcgagaaccttggcttggcggctgagcacggttacttcctgaggtcatcgagggatgcagagtgggagatttccattccccccgcggactgcagctggaagcagatcgcggagccggtgatgtgcctgtacagggagaccacggacggctcgatcatcgagaacagggagacggtgctcgtctggaactacgaggacgcagaccctgacttcggttcatgccaagccaaggagctcgtcgaccacctcgagagcgtgctcgccaacgagcccgtctcggtgaagagcaccggccattccgttgaggtcaagccacagggcgtgagcaagggcctggtggcgcggcggctgctggcgagcatgcaggagaggggcatgtgcaccgacttcgtgctgtgcatcggggacgaccgctccgacgaggaaatgttccagatgatcacaagctccacctgcggcgagtcgctggcggccacggcggaggtcttcgcctgcaccgtcggccgcaagccgagcaaggccaagtactacctcgacgacacggcggaggtcgtcaggctgatgcagggcttggcctccgtctccaacgagctggctcgggcggcgagccccccggaggacgacgacgaatga

SEQ ID NO: 3345 - DNA, 1485 bp, Oryza sativa
atgcagtcgccagagaatgcggcaccgcgcgtgtacttcatcccgttcccgacgccggggcacgcgctgccgatgtgcgacctcgcgcgcctcttcgcgtcccgcggcgccgacgcgacgctcgtcctcacgcgcgccaacgccgccaggctcggcggcgccgtcgcccgcgccgccgccgcgggatcacggatccgcgtccacgcgctcgccctgcccgccgaggccgcggggctcacgggcggccacgagagcgccgacgacctccccagccgcgagctcgcggggcccttcgccgtcgccgtcgacctcctcgcgccgctcttcgccgacctcctgcggcgcagacccgccgacgccgtggtgttcgacggcgtcctcccgtgggctgccaccgcggcggccgagctccgcgtcccgcggtacgcgttcacggggacggggtgcttcgcgctctcggtgcagcgagcactgctgctccaggccccgcaggacggcgtcgcgtcggacgacgagccgttcctcgtgccgggcctccccgacgcggtgcggctcaccaagtcgaggctcgccgaggcgaccctccccggcgcgcactcgcgggagttcttgaaccgaatgttcgacggcgagcgcgccacgacggggtgggtggtcaactccttcgccgacctagagcagaggtacatcgagcactacgagaaggagacggggaagcccgtgttcgccgtcgggccggtctgcctcgtcaacggcgacggcgacgacgtcatggagcgcgggcgcggcggggaacccgtgcgccgccacgacgccgcgcgcgcgctggcgtggctcgacgcgaagcccgcgcggtcggtggtgtacgtctgcttcggcagcctcacccggttcccggacgagcaggtcgcggagctcggcgcggggctcgcgggctccggcgtgaacttcgtgtgggtcgtcgggggcaagaacgcgtcggcggcgccgctgctcccggacgtcgtgcacgccgccgtgtcgtccggccgcggccacgtgatcgcggggtgggcgccgcaggtggcggtgctgaggcacgcggcggtgggcgcgttcgtgacgcactgcgggtggggcgcggtgacggaggcggcggcggccggggtgccggtgctggcgtggccggtgttcgcggagcagttctacaacgaggcgctggtggtcgggctcgccggcacgggcgccggcgtcggcgcggagagggggtacgtgtggggaggcgaggagtccggcggggtggtggtgtgcagggagaaggtggcggagagggtgcgcgccgccatggctgacgaggcgatgcggcggcgggcggaggaggtcggcgagcgcgcgcgccgcgccgtcgaggtgggcgggtcgtcgtacgacgccgtcggcgcgctgctggaggatktgcggcsccgggaratggcggcggatccacggaacktraaggaaktatga

SEQ ID NO: 3346 - DNA, 2442 bp, Oryza sativa
atgagcgtggtgggctttgatctagggaatgagagctgcattgtggccgtcgcgcggcagcgcggcattgatgtggtcctcaacgaggagtcgaagcgggagactccggctattgtctgcttcggcgacaagcagcggttcatcgggacagcgggcgctgcttcctccacgatgaacccgaagaattctgtttctcagatcaagcggctcctcgggcgcaagtactctgatcctgagctccagcgtgatattgcggccttccccttccgtgtctcggaagggcctgatggatttcctcttgttcatgcccgttaccttggtgaagagcgggttttcactccgacgcagctcatggctatggtgctttctaatctgaagggtattgcagagagcaacctgaatactgctgttgttgactgctgcataggcattccggtgtacttcacagaccttcagcgcagagctgtgcttgatgctgccaccattgccggcctctgcccattgcggttgtttcatgagaccaccgcaacagcattggcatatggtatttacaagactgatcttccagagaatgatcaattaaatgttgcctttgtggatgttggacatgccagcatgcaagtctgcattgctggttacaagaagggacaactcaagatcttgtcgcatgcatatgaccggtcccttggtgggagggacttcgatgaagtcctgtttaagcactttgcagcgaaattcaaggatgagtacaagatagatgtttaccagaatgctcgtgcctgcattaggctccgtgtggcttgtgagaagctcaagaaggtgctgagtgctaaccctgagtcaccaatgcacattgaatgcttgatggatgagaaggatgtgagaggttttatcaagagggaagagtttgagaagattagtgcatcaatactggaacgtgttaaggggccactggagaaggctttagcagaagctggtttaacgacagagaatgtccattttgttgaagttgttggttcaggttctcgtgtcccggcaataattaagatactcacagatttctttgggaaagaaccaaggaggacaatgaatgcgagtgaatgtgttgccaggggatgtgcgctggagtgtgctatccttagtcccacttttaaagtgcgagagtttcaggttaatgatggtttccctttctcaattgcaatgtcatggaaaccagactctcagaatggtgataaccaacagactgttgtattccccaagggtaacccattgcccagcgttaaagcattgaccttctataggtccaatacatttcaagtagatgtcacgtatgttgatactggtgatttgcaaatatcaccaaagatcagcacttacacgatgttggaggaggaggaagtggaagttccagtagcagctacaactgagcctccgaaagattctgccaagatggagacagatgatgcacctaatgaagctgcttctggaactgatgtaaacatgcaggaagccaaagcccctgcagatgctgctgccgatggtgctgaaaatggcgcaccaaattctgaggaaaaatcagtccctatggaaactgatgccaaggttgagccatcaaagaagaaagtaaagaaaactaatgttccagttgctgagttggtttatggtgccttggggactacagagttgcagaaggctgtggaaaaagagtatgaaatggctcttcaggacagggtgatggaagagacaaaagataagaagaatgccgtggagtcttatgtttatgacatgcgaaacaagctgtatgacaagtacaatgattttgtgactgctgaagacaaggaagcattcattgctaagcttcaagaggttgaggattggttgtacgaagatggtgaggatgagaccaaaggagtgtatgttgctaagcttgaagaacttaaaaaggtggggggtcccattgaggcaaggtacaaggaatggatggacagaggcccttccatcgaccaacttgcttactgtatcaacagtttcagagatgctgccttgtccaaagatccgaagtttgatcacattgagatggaggagaaacagaaggtgattaaccagtgttccgaagcagaagtctggctgagagagaaaatacagcagcaagatgctctgccgaagcatgctaaccctgtcctactctcttctgatttaaagaaaaaggccgaaacggttgacaggttctgcaaaccgataatgatgaagccgaaaccagctcctaagccacagacgcccccacaaacgccaccgaccgagaccccggctggcggagcccaaacaccagagcagcaacctcagggagctgaagcggctggcgaggccagcgagggcggcgccagcgaatctaccggcgagcaaatggagacggacaaaccggagggaactgaagctgcctag

SEQ ID NO: 3347 - DNA, 984 bp, Oryza sativa
atggaggggctgcacgaggttgggccgccgccgttcctgacgaagacgtacgacctggtggaggacccggccaccgacggcgtcgtgtcgtggagccgcgcgggcaacagcttcgtcgtctgggacccgcacgtcttcgccgacctcctcctcccgcgcctcttcaagcacaacaacttctccagcttcgtccggcagctcaacacctacggcttcagaaaggtcgatcctgataggtgggagtttgcaaatgagggttttctcaggggccaaaggcatctcctgaaaacgataaagagaaggaagcccccgtccaatgcacctccgtcacaacaacagtccctcacatcttgtctggaagttggtgagtttggattcgaggaagaaattgacaggctgaagcgtgataagaacatcttgatcacagaggtagtaaagctaaggcaggagcagcaggccactaaagatcatgtgaaagccatggaagataggctacgagccgctgagcagaaacaggtccagatgatggggttcttggcaagagcaatgcgcaacccagagttcttccagcagttggcacagcagaaagagaagaggaaggagcttgaggatgccatctcgaagaaaagaaggcggcctatagacaatgttccattctatgaccctggggaaacaagtcagactgagcaacttgattcgccgtatttgtttgattcaggtgtgcttaatgagttaagtgaacctggaatccctgagctggagaatctcgcagtgaacattcaggatctggggaagggtaaagtagatgaagagaggcagaatcaaactaatggtcaggcagagctcggagatgacttctgggcagagctgttggttgaagatttcacaggcaaggaggagcagtcagagttggatggcaaaattgacggcatcgacgaactggctcaacagttggggtatctgagctctactagtccaaaatag

SEQ ID NO: 3348 - DNA, 1464 bp, Oryza sativa
atggcgtcctcgacgggggggttggaccacgggttcacgttcacgccgccgccgttcatcacgtcgttcaccgagctgctgtcggggggcggtggggacctgctcggcgccggcggtgaggagcgctcgccgagggggttctccagaggcggagcgagggtgggcggcggggtgcccaagttcaagtccgcgcagccgccgagcctgccgctctcgccgccgccggtgtcgccgtcgtcctacttcgccatcccgccggggctcagccccaccgagctgctcgactcccccgtcctcctcagctcctcccatatcttggcgtccccgaccaccggtgcaatcccggctcagaggtacgactggaaggccagcgccgatctcatcgcttctcagcaagatgacagccgcggcgacttctccttccacaccaactccgacgccatggccgcgcaaccggcctctttcccttccttcaaggagcaagagcagcaagtggtcgagtcgagcaagaacggcgccgccgccgcgtcgagcaacaagagcggcggcggcgggaacaacaagctggaggacgggtacaactggaggaagtacgggcagaagcaggtgaaggggagcgagaacccgaggagctactacaagtgcacctacaacggctgctccatgaagaagaaggtggagcgctcgctcgccgacggccgcatcacccagatcgtctacaagggcgcacacaaccaccccaagccgctctccacccgccgcaacgcctcctcctgcgccaccgccgccgcctgcgccgacgacctcgcggcgcccggcgcgggcgcggaccagtactccgccgcgacgcccgagaactcctccgtcacgttcggcgacgacgaggccgacaacgcatcgcaccgcagcgagggcgacgagcccgaagccaagcgctggaaggaggatgctgacaacgagggcagctccggcggcatgggcggcggcgccggcggcaagccggtgcgcgagccgaggcttgtggtgcagacgctgagcgacatcgacatcctcgacgacggcttccggtggaggaagtacggccagaaggtcgtcaagggcaaccccaaacccaaggagctactacaagtgcacgacggtgggctgcccggtgcggaagcacttggagcgggcgtcgcacgacacgcgcgccgtgatcaccacctacgagggcaagcacaaccacgacgtcccggtcggccgcggcggcgccggcggacgcgccccggcgccggcgccgccgacgtcgggggcgatccggccgtcggccgtcgccgccgcccagcagggccctacaccctgaaatkctcccmamccgccgccggcytttacggcggctacggcgccggcgccggcggcgccgcgttcccgcgcaccaaggacgagcggcgggacgacctgttcgtcgagtcgctcctctgctag

SEQ ID NO: 3349 - DNA, 858 bp, Oryza sativa
atggcccgcctcgccgtcgtcccgggcagcgctgacagcagcggcagcgagcacgaggccgcgctgtccagcctcgtcaacgagtacctcctcgaggcggccgacgacgccaccgtcccctccgccgccgtgctcgccgttggtggaggctccgacgccgaggaggatgacgagcacgagggcggcgtcggcgcggctgaggaggtcgacgagatcgcacgcgttctggacgccgccggtgggggcgacggtgatgatctgcgccgccggatcttcgccgacgtggtggattccatgcgtgagctggagaacgtccgcgcccaacggtcggcgttccggcgcgcggtgatgtccctcctgcgggaacgcggccaagacgctggcctctgcaaggcgccgtggaacaagacgagcagcatggtcgccggaagctacgagtacatcgatgtcgtcgtcgccgccgcaccagatgctgcagaggcgacgagatacatcgtcgacgtcggcttcgccggtgagttcgaggtggcgcggccgacggaagactacgaggccstgsgctccgcgctgccggaggtgctcgtcgcgaggcccgacgacgtgaggaaggtcgtcagggcggcggcgtcggcggcgcggcgttcgctgaagcgccgccgcctcagcgtgccgccgtggaggaagcgcaagttcatgattgccaaatggcttggcccgtacaggaggacggtgaacgccgtgccgacgtctgccggcacggcgatcgacggcggcagctcgttggctgtctgccggacagtccatggtttcgaggcgccgcctctggtcatgacgacgccgaccgggctctggggttga

SEQ ID NO: 3350 - DNA, 1176 bp, Oryza sativa
atggacaccacggcaagctgcagcttgcccgacgcctggccggagcccgtcgtcccggtgcaatccttgtcggaagccggcgtctccgccgtgccgccgcaatacatcaagccgccacaggatcgcccggttctccccgcgccaagcctcgacgtccccaccgtcgacgtcgccgcgttcctcgacctcgacggcgccgccgccgcttgcgctgctgccgagcagctgaagaacctagccgaggcatgctcgaagcatggcttcttccaggttgtcaaccatggcgtgcaggcaagcaccgtggagaggatgagaggcgcgtggaggaggttctttgccctagagatggaggagaagaaggcgtgctccaactcgccgtcggcgccggaagggtacggcagccgcgccggagtcgagaagggagctctccttgactggggtgactactatttcctcaacattttgccgagggagatcaagcgtcgtaacaagtggccaaaatcaccgcatgacctaagggagatcacggaggattacgggcgtgatctgatgaatctctgtgaagtgctactcaaagccatgtcgctgagcttgggattaggtgagaaccaactccacgcggccttcggcagcgacgacggcatctcggcgtgcatgcgagtgaactactaccccaagtgcccccagccggagctaacgctgggcatctcctcccactccgacgccggcggcatcgccgtgcttctcgccgacgaccgtgtgaaggggacgcaggtgctaaagggggacacgtggtacacggtgcagccgatccccaatgcatttctagtcaacgttggcgaccagattcagatcataagcaacgacaagtacaagagcgtggagcaccgcgcagtggcgagctccgatgacgcgcggttcaccgtcgccttcttctgcaaccctagcgggaaccttccgatcggcccggcagctcagctggtgagctcgcagtcgccggcgctctacacgcccatcgtcttcgacgagtaccgcaggttctcccgcaggagggggctcaaagggaagtcccagctcgaggccatgaagaacagcaagatagctcaagtggaacttattgcctaccgagatgcacagatcaacttgaggaacttgtttacttctgataaaaattaa

SEQ ID NO: 3351 - DNA, 1740 bp, Oryza sativa
atggcggcgtccttgcttcttgagctggcggcagcggacgacgtggcggcggtgaggagggtcgtggaggaggagaaggtgtctcttggcgtggctgggttgtggtatgggccttcggcgagcggcgtggcgaggctcgggatggagcggaggacggcggcgatggtggcggcgctgtacgggagcacgggggtgcttgggtatgtcgtggcggcagcgccggcggaggccgcgcgcgcgtcggaracggatggggccacgccgctgcacatggcggctgccggtggcgcggcgaacgcggtcgcggccacgcgcctgttgctcgccgcgggggcgtcggtcgacgcgctctcggcttcggggctccgcgccggtgacctcctcccgcgcgccaccgcggcggagaaggccatccggctgctgctcaagtcgccggccgtgtcgccgtcgtcgtcgccgaagaagtcggcctcgccgccgtcgccgccgccgccgcaggaggcgaagaaggagtacccgcctgacctgacgctgcccgacctcaagagcggactgttcagcaccgacgagttccgcatgtacagcttcaaggtgaagccgtgctcccgcgcctactcccatgactggaccgagtgccccttcgtccaccccggcgagaacgcgcgccgccgcgaccctcgccgctactcctacagctgcgtgccttgcccggagttccgcaagggcggctcgtgccgcaagggcgacgcgtgcgagtacgcccatggcgtgttcgagtgctggctccacccggcgcagtacaggacgcgcctctgcaaggacgaggtcggctgcgcgcgccgcatctgcttcttcgcccacaagcccgacgagctccgcgccgtcaacccctccgccgtgtccgtcggcatgcagcccaccgtatcgtcgccgcgctcctcgccgcccaacgggctcgacatggcggcggcggcggcggcgatgatgagccccgcctggccgtcgtccccagcgagccgcctcaagacggcgctcggcgcgcgggagctcgacttcgacctcgagatgctcgcgctggaccagtaccagcagaagctgttcgacaaggtgtccggcgcgccgtcgccgagggcgagctggggcgccgcggcgaacggcctcgccaccgcgtcgccggcgagggccgtgccggactacaccgacctgctcggctccgtcgacccggccatgctgtcccagctccacgcgctgtccctcaagcaggccggcgacatgcccgcgtacagctccatggcggacaccacgcagatgcacatgccgacctcgccgatggtgggcggcgcgaacaccgcgttcgggctggaccactccatggcgaaggcgatcatgagctcccgcgcctcggcgttcgccaagcgcagccagagcttcatcgaccgcggaggccgcgccccggcggcgcgttcgctcatgtcgccggcgacgaccggcgcgccgtccattctctcggactggggctcgccggacggcaagctggactggggcgtccagggcgacgagctgcacaagctccgcaagtcggcgtcgttcgcgttccgcggccaatccgccatgccggtggcgacgcacgccgcggcggcggagccggacgtgtcatgggtgaactctcttgtcaaggacggccacgccgccggcgacatattcgcgcagtggccggagcaggagcagatggtggcatga

SEQ ID NO: 3352 - DNA, 870 bp, Oryza sativa
atggcggggaggagcgagctggtggtgagcttcggggagatgctgatagacttcgtgccgacggtggcgggggtgtcgctggcggaggcgccggcgttcgtcaaggcgccagggggggcgccggcraacgtggccatcgcggtkgcgcggctcggcggcggggccgcgttcgtcggcaagctgggggacgacgagttcgggcggatgctcgcggccatcctccgcgaaaacggcgtcgacgacggcggggtcgtgttcgacgccggggcgcgcaccgcgctcgccttcgtcaccctccgcgccgacggggagcgcgagttcatgttctaccgcaaccccagcgccgacatgctcctcacccacgccgagctcaacgtcgagctcatcaagaggagtctattggaaatttgtgtgcaattcttcatggctgccgtcttccattatggatcaataagcttgatagctgagccctgccggtcagcacatttgcgtgccatggagattgcgaaagaagctggtgcgctgctatcttatgacccgaatctcagggaggcattgtggccctcccgtgagraggmtsgcacsaagatcttgagcatctgggaccaggcagacattgtcaaggatttccgcggagctgtcccatcctacaaagtacagcaagttgatacaacaggtgcaggtgatgcgtttgttggtgctctgctgcgaagaattgtccaggatccatcatcgttgcaagatcagaagaagcttgaggaagcgattaaatttgccaatgcgtgcggagcaatcaccgccacaaagaaaggggcaatcccatcactgcccaccgaagttgaggtcttgaagttgatggagagtgcttag

SEQ ID NO: 3353 - DNA, 1095 bp, Oryza sativa
atgggttgcttttcatgctgcggagcggatgatgtcggcaagaagaagaagcgcgacgatccttacgtcccgatccctgatccagatttgatgcaaaattttgatgttagcaggcactgtttgttggttgaactttgcaaaagggatactgtcctcttttatccaataaaaaaaggaataaccaagaacttcagcagtgatgctctcatcggagaaggctcgtacgccagagttttctttggtgtgctgagagatggcaggagatctgcggtgaagaagctcgactccagcaaacagcctgatcaagaattccttgtgcaggtttcagccgtttcacgactgaagcatgagaatattatccaacttatcggatattgcgctggagggagcatccgtgttcttgcttatgagtatgcaccgaggggctccttgcatgacattctccatggtaaaaagggtgtgaagggagctcagccaggaccagctctatcatggatgcagcgagtgaagattgccttgagtgctgcaaaggggcttgagttcctgcacgagaaggcggagcctcgtgtcgtccaccgtgacatcaaatccagcaacattatgctctttgacaacgatgttgcgaaagtaggagacttcgatgtatccaatcagtccccggacatggcggctcgcctccactccactcgtgttcttggcaccttcggttatcatgctcctgagtacgcgatgacagggcagcttagcacgaagagcgatgtctatagcttcggagtcgtgttgctggagcttttaactggtcgcaaaccggtcgatcatacgctgccccgtggccagcagagtcttgtgacatgggctactccaaggctaagtgaagacaaggtgaagcaatgcgtggatccaaggcttgaaggggattatcctcccaaggctgttgccaagatggctgccgtagctgcgctgtgcgtgcagtacgaggcggacttcaggcccaacatgagcatcgtcgtcaaggctctgaacccactcctcaacagccgcccgaacaatcgccccgcctccttcaccgacgccggcgagcgatccggattatga

SEQ ID NO: 3354 - DNA, 534 bp, Oryza sativa
atggaggtgaccctccgccggttcgagctctccgacgtggacgccatgatggcgtgggcgtcggacccggcggtggccgccttctgccgctgggagccgtaccagtcgacggagcccctgctcgcctacctccgcgacaccgtgctcccgcacccgtggttccgcgccatctgcctcgccaccggcgctggcgccggcgacggcgacggccgccccgtcggcgcggtgtcgctggcgcagacggcggacgcgtgccgcggggagctcgggtacgtggtggcgcgcgcgcactggggcaagggcgtggcgacggcggcggtgaggcgcgccgtcgccgcggtgctcggcggcgaggtgtccgggctggcgcgcgtggaggcgctcgtcgacgtggacaaccgggcgtcgcagcgcgtggtggagaaggccggattccggcgggagggcgtgctccggcgacactactggcacaagggccgcgtcagggacttggtcatgtacagcttcgtctcctccgatcaactcgccgagtaa

SEQ ID NO: 3355 - DNA, 489 bp, Oryza sativa
atgatggtctgggcgtcggacccccaggtcgccgccgtctgccgctgggagccgtacgagtcgacggagcccctgctcgcctacctccgcgacaccgtgctcccgcacccgtggttccgcgccatctgcgtcgccgccgccttcgacggcgacggcggcggcgaagaccgccccgtcggcgcggtgtccgtgtccccgacggcggacgcgtgccgcgcggagctcgggtacgtggtggcgcgcgcgcactggggcaagggcgtggccacggccgccgtgaagcgcgtcgtcgccgcggtgttcggcgaggtggaggggctggagcgcgtcgaggcgctcgtcgacgtgcggaacgcggcgtcgcagcgcgtgctggagaaggccgggttccggcgggaggccgtgctgcgcagctactgcgtgctcaaaggggaggtcagggacatggtcatctacagcttcatctccactgatccgctcgtcagctga

SEQ ID NO: 3356 - DNA, 3042 bp, Oryza sativa
atggctacagagagcgctgtccggttaattggaggaacggggtctggtaactggagcaaggacttcggtgcatttgactcatcactgggtagtctttcaggagaaggtctggggtttgtggacaataacagtggcgtttatgggggctggagggagtctgtcccaaatcgcagtggaagtgcgccgcctagcatggaagggtctcttgctgctcttggtcatatgataggtcagcagagtgggaacttggaagccactttaggggggaagctgggaaacgtagcggacagttccaaatctgaggagcagctacgtgctgatccggcatactgtgactattatggctccaaggtcaatttgaacccaaggcttccgccaccacttatgtctagggagagcagacgcttcatgaaccgggttggcaaagttaaagaatggagagtggtttctcaagatgacagcaacaaaggttccttgtttattcctcgatctactctgtcaacacacagagaagagcctgaggacgataggtcaccaaggttggattcaagttcagcagaggatgcccaaggttctggtaaaagtggatccaactttgatagccattatacttgtatgaatcttggagattttgcatcggagagttttcagcagaaagccgcttctttgtatgacagttctactcatccatcaaatagcaatactggtgatggtatatctgaccattctgacattaactcatcaacgaatttttcaattgatgctgtcaagacatctgggttgaattcatggacacctgttcctgtgactaacacagtgagaagtacacatagcaacagtatttcatctacatctgttcccagttcatcaagtcctgataacaaccccagtatgcaaacttctcagcaagagaagcctagcatagacatcaagcatgggaatgatgtgcctggcagcggttctattctgactgaactagatactgtgaactccaatatgaagaatctgaggataagtttggatagccatgataccatacatgttaagcagcagtggccggacaatgtcttgcagcagtttggcccctcacctttagtccagggtgatcctattcaaatgattcctcaaggaacacatcttccccatgttccttttgttgagaacttgtcgcatactcaattaaaattaccaactggtgacatgcagcaatttttaccaccgcctggtatgacaacacctttttatgcaccaaattcttttggaagcccttactatcaaaatttgcatccggctagtgtattgccaacaccatttggaactgctggatatgctttgagtggttcagctttaccacctgttatgactagctatgctccccaggtttctgttgctacacctgttgacagccctattactccaagctttagtggtagaccatctggttttccttcaccagggaatcttagtgcaggagcagaatttgttcagccatataaaatgtatggacaacaacttggggttaccatgcagccatccgttcctgacccaaacttctttcagttctttcagcatccttctttactttcatatgctggtataaatcaatacaatacaatgggaccaagggttagtgttgttgggaatcctgctgatagttttgatccccaaaaggtattatcccagcctgcgtatccatctgatcagaggcttcaacttccaagaactggaatttataactctcctgcagccagaagaggaggggccgctccaaattatcaaggcatgacaccatatgttggagcaccaatgacttacccaacaagcccagtgtttcagggacagactttcactggagtattttctcctggtaggagaaatgattctgtgagattccaaactccctcaagaaatatgaccgcttattctggtgttcaagggcagcgagaaagggagaaattcgatgacccaaaggcatgttccttcctggaagaactcaagtctaacagggctcgcagggttgaactatctgatattgcaggccatatagtagaatacagcgctgaccaacatggcagccgattcatccaacagaagttagagaactgcactgctgaagagaaggcatctgtgttttcagaagttctccctcatgcttcatcattaatgactgatgtgtttgggaattatgtgatccaaaagttcttcgaacatggaactcctgaacaaaggagggatcttgccactaagcttgttggtcatgttttacctttgagccttcaaatgtatggatgccgagtaattcaaaaggctcttgaagttatggaacttgaccaaaaaatagaactagttcgtgagcttgatggaaacattatgcgatgtgtccgtgatcaaaatgggaaccatgttatacagaagtgcattgaatgtgttcctacagaacatattggctttgtagtatctgcttttcgggggcaggtggccagcctttcaatgcacccatatggttgccgtgttattcagagagttttggagcactgcggtggtgattcacaaggccagtgcataatagatgagatactggagtcggcttgcgtcctcgcacaagatcagtatggcaactatgttacacagcatgttttggaaagaggaaggggacatgaaaggacccaaattatcagtaaattggctgggcaggttgttaccatgagtcaaaacaaattcgcatcaaatgtgatagagaagtgctttcaacatggggatatgacagagcgagatcttctgatccgggagattgtgaagcagactgagggcaatgataacttgctggcgatgatgaaggaccagtatgcaaactatgtagttcagaagatacttgaaacatgcaacgagcaacagagagagctcctgctcagccgtgtgaagggccatctgcaagcattaaggaagtacacctatggcaagcatattgagacaccgagtcagattcttgaaaaattagcatatttcttcactggaggtgtatgcctggagccctcaagatga

SEQ ID NO: 3357 - DNA, 1734 bp, Oryza sativa
atggcsgaggtcgccgccggcaccgggcagctcattggcgtcgccgtggccacgctcctcgcggcgatcttcctcgccgccgcgcttcttggccagccgccggcgccggcggcgggcgccgttggcagggaagcctgcggccgtgggtggctgcggggtggccgacggcgaagggatggccgtcgtgtgcatgttatagagagagacctaacagagcctgatagaattgtcggtgaactgttacaacctggtggctacctgaaattgatcgagttgggtctcgaggattgtgttcaagaaatagatgctcagcgtgtccttggttacgcgttattcaaagatgggaaagacacaaaactctcctatcccttggagaagttccactcagatgttgctggtaggagctttcacaatggacggtttatacagaggatgcgccagaaagctgcatctttgcctaatgttcaattggagcaaggaactgttacatcattggttgaagaagatggtacagttaagggtgttaaatacaagaccaagtcaggtgaagaattaaaagcatatgcacctctgacaattgtatgcgatggctgtttctcaaaccttcgccgcgccctttgctctccaaaggttgatgtaccatcttgttttgttgggctggtcctggagaattgtcaacttcctcatgcaaaccatggccatgttgtcctggccaatccttcacctatcctattttacccaataagcagcactgaagttcgctgtttggttgatgtccctggtcagaaggtgccttccatagcaaacggtgaaatggcaaaatatctcaaaacagtggttgcacctcagattcctccagaaatctatgattcattcatagcagccattgataagggaagcataagaacaatgccaaacaggagcatgccggctgctccacatccaacccctggtgcacttttgatgggtgatgcattcaacatgcggcatcctttgactggtggcggaatgactgttgcattatctgacattgttgtgctacgtaatcttctcaagcctctccgcaatctgcatgatgcatctgctctttgcaaataccttgaatcattctatacactgcggaagccggttgcttctaccataaacacattagctggtgctctatacaaggttttcagtgcctcacctgatcaggctaggaatgagatgcgccaagcctgctttgattacttgagccttggaggtgtcttttcaaatgggcctattgctcttctgtctggtctgaatcctcgaccattgagtttagtggcacatttctttgctgtcgctatctatggtgtcggtcgcctaatgcttcccctcccttcacctaaacgcatgtggatcggcgtaagactgatttccagtgcatgtggtataattttccccatcatcaaagctgaaggtgtgaggcatatgttcttccccgccactgtccctgcctattatcgtgctcctcgtccaatggagcggcgcaaatcgaggtgggacagggccgacgagatcccggaggacgtagagatggggatgggtgagatcgaggcggccggcgagctcacagcgacacggatcgagactgccggcgagctcccggcgccacggatcgagacggccggcgaactcccgaagggggcgcagatcgggatgggtgaagtcgtggtcgtcatcgccgtcattcgccggtttacctggtaa

SEQ ID NO: 3358 - DNA, 1365 bp, Oryza sativa
atgtcatccttccagcttctcctccactccttgctcttgcttctcgtcgttggcggcgtcgcgggcggcggcggcggaggtggtcgcctgagggcgccttcgctggaattccaccaccggttctcttctccggtgcagcggtgggcggaggcgcgcgggcacgtgctccccggaggctggccggagcacggcagcgccgattacgttgcggccctgaacgggcacgaccgccgccgcgcgctctcagcagccggcggcracgtggaggaggaggagacaagcccccggcgctcacgttttctgagggaaacgccaccctcaagcttgcactatgcgcttgtgacggtcggcacgccgggccagacgttcatggtggcgctggacaccgggagtgacctcttctggctgccgtgccagtgtgatgggtgtacgccgccggcttcggccgcttctggatcggcttccttttacatccctagtatgtcgtcaacaagccaagcagttccttgcaacagccaattttgtgagctgagaaaggaatgctctacaacatcacagtgtccatacaagatggtttatgtttctgcagacacatcttcttctggttttctagtagaggatgtgctctacttgtcaacagaggatgccattcctcaaattctcaaggcgcaaatactatttggatgtggacaggttcagacaggatcatttctggatgctgctgctccaaacggtctatttggacttgggatagatatgatatcaattcctagcattctagcacaaaaaggtctgacatctaattccttcgcaatgtgctttagccgtgatggtattgggagaattagctttggagatcaaggcagctcagatcaagaggagacaccactagatgttaacccacaacactccagtgaagataggattcaaactcctagtataagtttgagaacagtgggtggaagtgtatttcccgttattgatgaagggcaggttatctccattcagcaacatgagtatgtttattgcttggcgattgtcaagagtgcaaaactcaatataattgggcaaaatttcatgactggtcttcgtgttgtgttcgatcgagaaaggaaaattcttggttggaagaaattcaattgttatgacactgatagttcaaatcctctttctatcaattcacggaattcttcaggtttctccccttcagcacctgagaattactcccccgaggaaacaaagggtgggaacccagcaagcgttacacagttgagaccccttagtaattccaacccagtaatgtggtatgatagtttagtcttcaggtttcttttggtcaatttggccgctctgatcctcttctaa

SEQ ID NO: 3359 - DNA, 2352 bp, Oryza sativa
atggtggacgcggcggcggcggcggcggagttcggcgagctggacgggacggacgccatggcctacggcgacgaccggacgccgcgggacgggatggtgttcaagtcgtacgaggaggtgctcaacttctacaagcgctasgccttcggcaccgggttcggggtctgcgtcaagaagtcgtccttcaccaaggccggcctctgccgccgcctggtgctcgtctgcaacaagtggggggacgggaaggaggacgcgtgctaccaggcgaggccgacggccaagaccaactgccaggccaccgtcgtcgcgaggctctggagcgatggcctgctgcacctcatggatgtcaatctggagcacaaccacgcgctgaatccctccgcggcgcggttcctgaggtgctacaagacgttgcctagtgggatgagtaaagatctggtggtgagggctgccagaggggaatgctcgacctccggcgacatcgaggtcccgatattcgatgattgggggaggctcaagattggggaagatgatgtagcggccatcaatggctttttcgcggatatgcaggcgaagcaggcgaacttcttctatctcatggatttctacggggaaggccatctgaggagtgttttttgggccgattcgaggtccagggcagcgtaccaatatttcaacgacgctgtttggattgatacaacctgcttaagaaataggtttgatacaccccttgttttgttcctaggggtgaaccatcatggtgagcttgttctgttaggctgtggcttgttttcggatgagagtacggaaagcttcttatggctgctgaagtcgtggttgacttgtatgaaaggatggcctccgaatgccatagttacggatgattgtgccgcgataaaagccgcagttcgtgaagtatttccaaatgcacgccatcgaataagtgattggcatgtgttaagaagtatctctgaaaagttaggagaatcagcacaatttgaaggaatgaagaccgaattggaaactgtaatatatgattccttgaaggatgacgagtttgaggcaaggtggaataacttgatcagtagatttggccttcaggataatgaatggatcacttttctgtatgaaaatcgccatttctgggtccccgcctttctgaaagataccttctgggctgggttatctactgttaaccaccatgagagtccaaatgccttctttgaagattcaatcaacccagagaccaaattggtgacattccttagcagctatgtgaatcttttacagaacaaatacaaaatggaggaagatgatgatcttgagtcattgagtagaagcagggtgctagtatcgaagtttcctatggaagaacagctatctagactatacacctttaaaatgttcactaaactccagaatgagctgaacgcaaccatgaattgtgaagttcagttggatgattcaacatcctccattgtagttattgatctagctgagtcaagcggagaaatggtgaataaaaaatatgaagtcgttcactgtatggagaccgacaggatggaatgcaactgtggcctgttccagttcagtggcattgtttgtcggcatacattatcggtgcttaaatgtcagcatgtttttgatatacccccctgttatgtgcttaacaggtggcggaatgactttaagcagcttcacgccttagataatccatggaaggatttggtaacaagtaatcatattgagcgctatgattatgtttctttgcagtgcctccgtcttgttgagattggagcatcatcagatgagaagcatcagcatgcattaaaattaataagagacatacgacggacccttcttgatgataatttgtgccgggaattggagcagaaacttacaccatctgaacgtgctattaatggtgacagccacatgcaagctggctcatctgagggagggccagcaaaaaagcgccgtggccgtcctcccaaaaagagtaaagatacaaatgtggagtccgtgtcaaatcaatatgcccataaggattctttactggtatcatcggacgttagtcagaaggatgcttttcattcttcttctactgcctcaaatcttggtactcatgtcaggacaaatggtgttgttgaccttatggaagaagttaatccaaatgagctatcttttgatagccgttatggggtgcagtctagccacccacaccattatggcaatcagctgcatccaagcaacactatgcaggttttcatcagacatacagaaggaaagaactctttctcaagaaaacaaactcaagggaggcattcccctctggatgtagagcagatctaa

SEQ ID NO: 3360 - DNA, 740 bp, Oryza sativa
atggcgtcggcgatcgtcgacgtcgccggaggcggccggcagcaagccctcgacggctcgaacccggcggtggcacggctgcgtcagctcatcggcggcggccaagaatcgtcggatgggtggagcaggtgctgggaggaaggcgtgacgccgtgggatctcggccagcggacgccggccgttgtcgagctggtgcactccgggaccctccccgccggcgacgccaccaccgtcctcgtccccggctgcggcgccggatacgatgtggttgcactgtccggccccggccgcttcgtcgtcggcctcgatatctgtgacacggccatccagaaggcgaagcagctgtcggcggcggcggcggcggcggctgacggcggcgacgggagcagcagcttcttcgccttcgtcgccgacgatttcttcacgtgggagccgccggagccgttccatctcatcttcgactacacattcttctgtgctctgcatccgtcgatgaggccagcatgggcgaagagaatggccgacctgctacgaccggacggagagctcatcaccctcatgtatttggctgaaggacaagaggccgggccaccattcaatacaacagtgctcgattacaaggaggtgctgaacccgttgggtttagtcattacttctatcgaggacaatgaagtcgcagttgaaccacgaaaggggatggagaaaatcgcaaggtggaagaggatgacaaaatccgacta

SEQ ID NO: 3361 - DNA, 1503 bp, Oryza sativa
atggaggcgcgcgggaactgcgctcgatcctgccctaacttcccgtcgtgctccgcggcggcgcgctcttctggcgccggcggcgcaggaggcgctcaaggcgctggcgctgggccccgactccttgccgaagcccttaccgaccttcgcctyggggttaacctcgacccaattccgcgccgcgccgccgagggcttcgcgctcttcttcgacgacctcctgtcgcgggcgcaggcgcgggactggttcgaccacgtcgccccctccctcgcccgcctcctcctccgcctccccacgctgctcgagggccactaccgcgccgccggcgacgaggctcgcgggctccgcatcctgagctcgcaggatgccgggctcgtgctcctcagccaggagctcgccgccgcgctgctcgcctgcgcgctcttctgcctgttccccaccgccgatagggccgaggcgtgcctcccggcgatcaatttcgatagcctatttgcggcactgtgttataattcgaggcaaagccaggagcagaaggtgaggtgccttgttcactattttgacagggtgaccgcttctacacctactggttccgtttcgtttgagcgtaaggttcttcctcgccgtcctgaatctgatggcattacgtaccctgacatggatacttggatgaaatctggtgttcccctttgcacattccgggtattttcctcaggcttgatagaagatgaggaacaagaagcccttgaagttgactttgcaaatagatatttgggaggtggcgcactttccagaggctgcgtgcaggaagaaatccggttcatgataaacccagaattgatcgtgggcatgctcttcatggtttcaatggaagataatgaagctatagaaattgttggtgcagaaaggttctcacagtacatggggtatggttcctcattccgttttactggtgactacttagatagcaaaccctttgatgcgatgggtagacggaaaactaggatagtggcaattgatgctttggactgtccaactaggttacagtttgaatctagtggtcttctaagggaagtgaacaaggctttttgtggatttttggatcaatcaaatcatcagctctgtgcaaagcttgtccaggatttaaatacaaaggataactgtccaagtgtcattcctgatgaatgcataggagtttcaactggaaactggggttgcggggcttttggtggaaaccctgaaatcaagagcatgattcaatggattgctgcatcacaggcactccgatcttttattaactactacacttttgagtccgaatcactgaaaagattagaagaggtgacccagtggatattgcgccataggtggacggttggcgagttgtgggacatgcttgtggagtattcatcccagaggctaagaggagacaccaatgagggctttttaacatggctacttcccaaggacatccccaatggtgatgtagattacatgtgtgaatag

SEQ ID NO: 3362 - DNA, 549 bp, Oryza sativa
atggccggaaaagggagctacgttccgcctcagtacattccattatatggcctggatactgaggaggatcgcgtttctgcggaggagaatgatgccgcgcgccacaagttaacccgggatcctacacaatggtcttcaggcatctgtgcttgttttgatgatccacagagctgttttattggtgcaacttgtccttgcttcctttttggaaggaatgcacagttcttgggatctggaactcttgctggatcatgcactacacattgcatgctttggggccttctcacaagtctctgctgtgtgtttactgggggccttgtattggcagttccaggatctgctgttgcttgttatgcttgtggatatcgacaagcactaagagcaaaatacaatcttccggaagcaccatgtggcgatttaacaacgcacttattctgtcacctgtgtgctatatgtcaagagtacagggagatccgcgagaggacagacagcggctcctccgctccgaccgtcacgccacctgcaatacagacaatggatgagccttga

SEQ ID NO: 3363 - DNA, 890 bp, Oryza sativa
atgtctggacctggaggaggaggtcatggcctctacgaggatcatcctgcagccgccggcttcctccccttcgaccacgacgacgacgtggtggccagcttcttctttggcagatcggcggcgtccggaggaggagccggcgccggcgccggcgctggagacgatgatggtgttgggctcatcacgccctactccagcatcacggattatctgcaaggcttcctgcaggaccccgtgtacgcgtcgtccccgttgggcggcgatgctgccgtgaagcacgaaacggtggtggatcatcccagtcaggccggcggcgtggcggcggcgccggmcacgccgaactcgtcggtgctgtcgtcgtccagcgaggcggctggaggggacgatctgcgccggtgcaagaaaggtcgtcggccggaggacgaggaggaggaggagattgacgatgagggatcggccgttcagagttgcaagacgaacaaaatgaagaataaaaaaggggcgaagaaggagcgtgagccacgtgtggcgttcatgaccaagagcgaggtcgaccacctcgaggacggggctaccgggtggcgcaagtacggccagaaagccgtcaagaacagctcctacccaaggagctactaccggtgcacggcgccgcggtgcggggtgaagaagcgggtggagaggtcggagcaggacccgtccatggtgatcaccacatacgaagggcagcacacgcacccgagccccgtgagctaccacatgcacaggcagcaggggctcatgcatgtgagcgcgcgcggtgtcatgcccggcgccgccggcgcctaccagttcggcgcgccgccgccgcggctccttggcttcgacgaagccctcgccgctcgggtgcaatg

SEQ ID NO: 3364 - DNA, 1464 bp, Oryza sativa
atggccgtggaggagtcgccgccgccgccgccgtcgtccccgccgccgccgccgtcgtccccgcagccagcggcgaaggtcggcgcgggggacggcgcgcggacaagagcgggcgccgcctcgaggtgtacagcgaggtacgcgctggatgtgcacgcggatagggcggaggacgtggtgacgcaccaccggttgctggaggaggcgcgcgatccggaccggcggcccgccttgtcggtgcgcgtcgtccaggtttctaggattcttgatggtgatatggatgattgttctgagcttgggatggagccggttcataccaaccacttggcaagacaaatggttcatccccctcctgcctttggttcttgctccaacttagaggcacttgcgctcgaggcgagtgaggctaatctaaggagcagtaacaatgatgaagatagcagtgttcatctcatttccaggccaatgcatgagataacttttgcaacaactgataagccaaaggtccttagtcagctgacttgcttgcttagtgagcttggtcttgacatccaagaagcgcatgcattttcaacaagtgatggttactcattggatgtatttgttgtcactggttggcaccttgggggtactgagcagctaaaagaaaagttgctggagaagtttcatgacattgagacacaagcttggccaacatcaaactcatcgtcacaatcattggaaggtccgtcaggtggagagagtatgccatctaccagtgtggaaataccaacagatgggacggatgtttgggagatagatctcaagcttctcaagtttggaaccaaggttgcttctggatcaaatggcgatctgttccgtggatcatactgcagtcaggatgtagctattaaagtagtgagacctgaacgcattagtgcagatatgtaccgtgattttgcacaggaagtctacattatgagagtgtgcagagtgatatttgctcctgtcattgaacttctaaatgagagcgatcatatttttcaggtcgtaaaggttgcagattttggtgttgcacgtgtcaaagatcaatccggagtgatgactgcagagactggaacttatcgttggatggcacctgaggtcattgaacataagccctatgatcataaagcagatgtttttagctttggtattgttctatgggagctgctaactggcaagataccctatgagtacctaacaccactacaagcagccataggtgttgttcagaagggccttagaccaacaattccgaaagatacgcaccccaagctgtctgagctgcttcagaaatgctggcatagagatcctgctgaaaggcctgacttctcccagatactggagattcttcagagactccccaaagaggtgagagctgataccgagggtcgccagaaatcaaaggcaggatttctttcagcattgaagagaaaccactga

SEQ ID NO: 3365 - DNA, 906 bp, Oryza sativa
atgctcgggttcaggtcgcagacgccgtggtcggggscgggggcggagccgatttgcggcgacgcggcggcggccgtggtggcggcgcggaaggggatggagacgccgctgacggcgktggcggaggcgttcgaggagctggcccggaggatggaggccgacggcggggagctccgcctcgggcccttcggcgacacgtgcgcgctcgtctccgtcctcttcagctgcctcggcatggccttcaggttcgccgagatcgagtacgtcgccaaggtgaacgacctcatcggagcggcgaagtcgtacggcacgctgaacgacatcctggacaaagacgtcgagaacgactgcgtcaagaagcagggcagccactcccgcaacctgcgcagggtccgcctcggcctcggcctcatcaaggttctcttcgagcagttcctctccacccaggaatgttcgctgtatgatgctgctacgacagcttacgggcaggtttgcgcgccgtttcacagctgggcggtcaggaargctgttggtgctgggatgtacactcttccaagcagggagcagctgatcgtgaggctcaacgaaactgattgctccgtgcagaaggagatgaggagatacatcgatgcctctagccctatcatagactacatcgacaaccttttcctctcgaggagcattagcctagactggggggaggaggatgaaggacgccttagggttaggaacgacgtcaattggttctccggtgaccggacatgggatcgatatgggttggaggagtcggggaagggagggaggtggaggatggcgatcagctcagggaaagatggggaagaaaacggatctgagaaatggatctggaaaacagtcgtgctctattatattgagtcattccgttag

SEQ ID NO: 3366 - DNA, 2060 bp, Oryza sativa
atggacgcggcggcgccgccgccgcgggggcaggaggggcaaggagatcgcagcggcggcaataagggcgggagatacggggtgctcctctactacaagtacgccgargtgcccgaagccgcggcgytcgccgccttctacgagtcccaatgccgcgcttttgccctcgtcggccgcgtccgcgtcggccccgacggcgtcaacgccacactcggggggaggatggcggcgctggagaagcacgtcgccgagatgagctccaacgccttgttcgacggcaccgacttcaagctggcctcctgcgacgaccccgtcgacgagcgggtcgccagggagtgcggcttcacctcgctctccgttcggctcgtcaaggtgtttctcctcttaccattcaggaattcgatgcaacctcgtagctgtcccaattacatttacattttgagttgtttcttgcaattggcaggagctggtaacgctttgtgcaaacccgtcgttggcaaccccgcagattacatgcgccgggaggcatttgtcggctgcggagttccattcggtactccaaagtgttggtcagtggattctgagactgatgtttgccccatattgcgattctctggattaaaattgagtactgaatgtttaaggtggggttttgttatagcaggagctacttcggactctgaagcaaccgtggagaagagtgaagtggttgtcttggatgcgcgaaatgtctacgagacacggattggcaagttccgtgtaccgaacgtggagacgctggatccagaaatcaggcagtacagtgacctgccgttgtggatagatgagcatgctgagaagctccgcggcaaatcaattatgatgtactgcactggaggtatacggtgtgagatggcatcggcatatatccgctcgaaaggtgaaggctttgagaacgtatttcagctatatggtggcattcagagatatctggagcgattcccagatggtggctattttgaagggaagaattttgtatttgaccataggatttcagtgggaagcctaaaagagaacatacttggaacttgtttgctatgtggttcttctttcgatgactactcgccccgttgtcgttgcagccattgtagaatgctggtgctagtgtgctccacatgtcaggattccactaaggattatgtttgcgagttgtgccaaaagaacggaaagcaatgctgccaaacgtcaccaaggcaaggttgcaaaacagagtcagagctaatagattcttctgactttggaataccaatgattattaatcaaagtgcaacttcaaccattcccaggagtaatggtagtgagcagctgaagaagctaaagatcctctgcttgcatggtttccgtcagaatgcatcaaattttaagggaagaacatcagcacttgccaagaagctaaagcacattgccgatcttgtctttatagatgctccacatgagctttcgtttgtgtacaaaccaaatccagatcactgctctggcagatcttcactgccatctggcacaccaaagagaaaatacgcatggctagttgctccaaactcaattttttacgctgagcatgactggaagattgcagatgcaccattcgaccctcttcagtatcagcaacaaactgatggattcgaggaatcatacgcataccttgaacatgctatctctcagatggggaacattgacggcattcttggtttctcccagggcgcagcaatggcagccttgttctgcagacagcagcagaagacttgtggctccctcaaattcaggtttgggatattctgctctggttatccagcaccgatcataagtgattttgacggtgagccaattaagctcccctcgcttcattgctttggcaactctgaagatcatgacaggcagatagcaaacagggcaagcaccgaactcgcgaatcgatttgataagagttgtcgctctgttattgagcatgatatgggccatataattcctactcggccgccctttattgataaaataaaagagtttctgtccaattttatttg

SEQ ID NO: 3367 - DNA, 1416 bp, Oryza sativa
atggcggtgcactatggattaggtcaatttcagtcgttttggactgtcatgtgggcccttccaatccttgtgctcccatatgattggtcgaagtggttccgtaggcggcagaagaaggccatgggcgacgccctcgacaagatcaaagcagagctgatgctgctgggcttcatatccctgcttctcaccgtggcacaggcgcccatctccaagatctgcatccccaagtcggctgccaacatcttgttgccgtgcaaggcaggccaagatgccatcgaagaagaagcagcaagtgatcgccggtccttggccggcgccggcggcggggactactgctcgaaattcgatggcaaggtggcgctgatgtcggcaaagagcatgcaccagctgcacattttcatcttcgtgctcgccgtgttccatgttacctactgcgtcatcaccatgggtttagggcgcctcaaaatgaagaaatggaagaagtgggagtcacagaccaactcattggagtatcagttcgcaatcgatccttcacgattcaggttcacgcatcagacgtcgttcgtgaagcggcatctgggatcattctcaagcacccctgggctcagatggatcgtagcattcttcaggcagttctttgggtccgtcaccaaggtggactacctgaccatgcggcaaggcttcatcaatgcgcatttgtcgcagaatagcaagttcgacttccacaaatacatcaagaggtctttggaggacgacttcaaagttgtcgttggcatcagcctccctctgtggttcgtcggaatccttgtactcttcctcgatatccacgttgggaccaagctagagatggtgatcatgcagatggcccaagagatacaggacagggccactgtgatccagggagcacctgtggttgaaccaagcaacaagtacttctggttcaaccgccctgactgggtcttgttcttcatacacctgacactcttccatgcaacacctggtctgaagaaatgcttccatgaaaatatttggctgagcatcgtggaagtcattgtggggatctctcttcaggtgctatgcagctacatcaccttcccgctctacgcgctcgtcacacagatgggatcgaacatgaagaagacaatcttcgaggagcaaacgatgaaggcgctgatgaactggaggaagaaggcgatggagaagaagaaggtccgggacgcggacgcgttcctggcgcagatgagcgtcgacttcgcgacgccggcgtcgagccggtccgcgtcgccggtgcacctgctgcaggatcacagggcgaggtcggacgacccgccgagcccaatcacggtggcctcacaccggcaccggaggaggacatatacccggttccggcggcggctccgtctcgccagctgctag

SEQ ID NO: 3368 - DNA, 888 bp, Oryza sativa
atggcgaagcgggcgggcggcgcgaggaagaagctgaggagagggctgtggtcgccggaggaggacgagaagctgatgaaccacattgccaagtatggccatggctgctggagctccgtccccaagcttgcaggccttgagagatgtgggaagagctgcaggctgaggtggataaactacctcaggccagacctcaagaggggagcattctcacaggaagaagaagacctcatcatccatctccattccatgctaggaaacaagtggtctcagattgcggctcagctgccgggtcggacggacaacgaggtcaagaacttctggaactcttacatcaagaagaagcttcgccagcgcggcatcgatccggccacccacaagccgctcgccgaggtcgtcgccgccgccgcctgcgcccgcacgccggcggtgttcagcgacgccgagctcatcctgtcctccatcggcgcccagccgccgccggagagctatgatggcagccggtacagcacggagtgcggcgccgcgagtgtcggcggcgacgggtcgctgtcgtcgctgtccggctccagcacgctgaactcratggttggcctaagccccgccgcmaccaccaccaccaccaccaccgacgagcagtacggsaacaccaaccacctcccatggctggagctgggcccaagcaccaccaccccytcctcctccgccgccgccgccacgttcgaccactacggcgccgcgctggacgagctcaagtggtccgattacgtgttcgacggctacaaccaccaggtacctccgtacaaccatggcggcatctatggcggcggcgacagcaaggacacggcggtgcacttcgacgcccacgccctcggcaactggtgctag

SEQ ID NO: 3369 - DNA, 1550 bp, Oryza sativa
atgacccgcgacaagttagggttggatcctaggttgggatgggggtgggaaggggtatggggatgggaggcagcggcctgcggcttggcggttggtggtggacatgatatgtatggtggcaacgaaacgctgaaagcaaggggagctctatccatagcagttccaggggaaattgcaggtctgtatgaggcatggaagcgccatggcaagcttccttggaagaggttagtgatgccagcagcaaagcttgcccgtgcattcagagtgtcaccttatctgaggaagcagatggaggcaaccagagatggaattctccaaaataagggaataagtggagtgtacacctcaaatggagatatccttaatgttggagatgtatgccgcaacattaggcttgcaagaacactggtggctgtcgcggagaaagggccggatgtgttctacaaaggcgcagttggtgatcagctggcgaaggatattcaggaagttggagggatcataacaatggaagatctgaagaaataccaagttaagatacgtcggccacttttagagaatgtattgggactgacagtattaagcatgcctcctccttcagctggtggtgctgggctaatgcttgttctgaatatccttactcagtatggcctccctgctggtttttctggctcacttgggatccatcgtctaattgagtccttgaagcattactttgcaataaggatgaaccttggcgaccctgagtttgtaaatgttaacgaagtcgtctctgatatgatgtcccctaaatttgctgctgacctgaagaaaaccatctatgataacatgacatttgaccctaaacactatggtggcaggtggaacatccttcaggaccatggaacaagccacctgtccatcgtcgacagcgagaggaacgccgtttcgatgaccaccactgtcaacgcgtactttggatccctgatcctgtctccgagcacaggcattttgctcaacaacgagatggacgacttctccatgccggcgaacacgtcggccaactctccgccgcctgcccccgccaatttcgttaggcctctgaaacggcctctctcctcgatgactccgacgataatactcaaggatggcaatctgaaggctgcggttggagctagtggtgggagcatgatccctgctggaaccatggaagtgctcctcaaccatttcgtcaagaacatggacccgttgtcctctgtcatggcgccaagagtgtatcaccagaaattcttctttctgatgagctttggtttgattcttgccatggctgtttgccctctctggctggctgcagctgatcccgaacgtggtccagtacgagaactggacgacggtgaccggcgaccacttcgagctggacgccgcgacgagagccgacctgcggaggaaaggccacgtcttggagccgctcgccggaggaccatcagccagctcgtcgtggacgacgtcgagcgccacggcggtctgaccgccgtcagcgaccccaggaaaggcggcttcccggccggctatta

SEQ ID NO: 3370 - DNA, 1035 bp, Oryza sativa
atgtcgtcggckgcgtcggcgtcggcggccggaggggcaggcgaggagggcgccgccgccgccgcgcagccgcagcaggaggggccggtggtgacctgcaagggcgtgaacgggctcgacaaggtcgtcctccgggaggtccgaggcagctctgccgaggtgtacctgtatggcggccatgtcacatcatggaaagatgagcatggagaggagctgctttttgttagtaataaggctattttcaaacctccaaaagctatacgtggagggataccaatctgctttcctcagttttccaacttcggaaatctggacccacatggctttgcaaggaacaggacctggagtgttgaaaatgatccaccaccatttccagtaccaacttctaataaagcttacgtcgatttaatccttacgcatactgaagaagatctaaagatctggccacatagttacgagttccgtctgagagttgcacttggacctggtggagatctgatgctgacttcacgtataagaaataccaatgcagatggaaagccattctcatttacatttgcatatcacacatacttttcaatatctgatatcagcgaggtgcgagtagaaggcctggaaactctggattacctagacaacttacaagagagaaatcgatacactgaacaaggggatgcaattgtttttgaatctgaattggacagaatatatctgggcacaccgtcaaaaattgccattattgatcatgagaagaaaagaacatttgttgtgaggaaaggtggccttcctgatgctgttgtttggaacccttgggacaagaaggctaaggctatgtcagactttggggatgacgaatataaacgcatggtctgtgtggaggcagctgctatagaaaagccgattactttgaagcctggtgaggagtggactggaaagttggaactgtctgctgtcccatctagctattacagtggtcagctggatcctgatcgtgttcttcaggattcaagtgtcccggaggactcaatcagctag

SEQ ID NO: 3371 - DNA, 1308 bp, Oryza sativa
atggctggtgcttcgacggccgcggcgcctgccagttcatcccccaggcccccgccctcggccccgcggtactctcctcctcctcttcttcttcatcccctctcctccatctcaaatcaatcaagattaatcgagctttcgcatcaatggcaggtgcacaagaacagcaaggcgtgcgtggcatcatacccatgcgtggtgcagaacaacatcctgtggttctacccgagatcggagccggagtacaaggagatcctgcagaggaagcggccgccatacatcccgcagatcgacgacccgtccttcgtcaccgtctatggcgtcagggatctcccctatgggtacgatgtgttggtggagaatctcatggaccctgctcatgtcccctacgcgcacaaggggttgatgcgcacccgcaagaaggaagatccaggaagatataacattcatctcctctacacagttgagttcgacaaggaaggcggcgggccgctcaagatggagatagaggaaaccaacgtcgaggggttcctgtcaatgctagacaggggcttcttcaagttcgtcgcgccgtgcacgttctacggctcgccacttcagactccatctcaggcattgttcaagctcatagaaccatcttacaagatcagtattgatgatcagggcaaggagaagaagaagaagcaacccacagtgatgctggtgttcttgtgcatcccggtgtctccggggaggagcaggttggtctgggcattcccgcggaacgtcggcgtctggatggacaagatcataccacggtggtactaccacattgggcagaatgccatcttggattcagacatctacctgctccacattgaggagcgcaatttcgctacggttggtcttgataactggcagaaagcttgctatgtgcccacatcatctgacaacatgatcatcaccttcagaaactggttcagaaagtactgcaagcatcagattggctgggcaaccccaataactaatcagctgccaccaactcctagcaaagatcagctcttggacaggtattggtcgcacgtcatgcagtgcacgagctgcagcggtgcactgaagaagatgaaggcgctggaggtcgccctgcaggtggcgtcggtcgccgtcgtcgggttcctcgccgtcgccaaggggacggtggtcacgtcggttgtgcagagatccgccgtcgtggctgcggccgtgctgtgcttcgccgcctcccgctggctcgccaacttcatcgagaagaacttctatttccaggactacgtccatgcttacaagtga

SEQ ID NO: 3372 - DNA, 1242 bp, Oryza sativa
atggtgctgggcctccgcgtcgtcgcgtggttcgacggcggcggcgagtggcgcgtggtggacgacgcgtgcccgcaccgcctcgcgccgctgtcggagggacgcgtcgacggcaagggccgcctccagtgcgcctaccatggctggtgcttcgatggacatggctcctgccagttcatcccccaagctcctgcccttggccctcccgtgcacaagaacagcaaggcgtgcgtggcgtcgtacccgagcgtggtacagaacaacatcctgtggttctacccgagaacggagccagagtaccgcgacgtgctgcagaggaagcggccgccatacttcccagatctcgatgatccgtccttcaacaccgtcttcggcgtcagggacttcccctacgggtacagaaatgctcaagccattcttctccgaaacggacacataggcatgcagcttgatatactatgccgtggctccattgcaatgcagaacattcatctcctctccacagttgagtttgatcaggaacgcggcggcccggtcaagatgaagatagaggaggccaacatcgacgggttcctgtcaatccagggggagaattggggccacttcaggttcatcgcgccgtgcacgatcaaccggtcagagttgcccctcgagacactggcacattttgatcaggagaagcagcagcagcagcctcaggggatgctggtgttcttgtgcatccctgtggctcctggaaggagcagggtgatatgggtgtttccacagagcgtcagcgcctggcctgacaagttcataccacggtggcttcaccacatggtgacgaacaccgttttggattcggatttgtacctcctccatatcgaggagcgcaatttcgcggcggttggcgttgataaatggcagaaagcttgctatgttcccactttatctgacaacatgatcatcaccttcagaaactggttcagaaagtactgcaagcatcaggttggctgggcaactccaatggttaatcagctgccaacaactcctaccaaagatcagctcatggagaggtgscgtcggtcsccgtcgtcgggttcctcgccgccggcargggagacgtgtacggtggtcacgtcggcggttcagagagccgccgtcgtggctgcggccgcgctgtgcttcgctgcctcccgctggctcgccaacttcatcgagaaaagcttctacttccaggactatgtccatgcttacaagtga

SEQ ID NO: 3373 - DNA, 1458 bp, Oryza sativa
atggctccggtctcccttcccctgctctcccgcgctcgccctcctctcctgctccgcgacgccggcgtcaagctgagcacggtcaggctacctcctccatggcgccaacagtggaaacacaccagcggcgagcggcggcgacggctatcaatgccggcgtcggccgtggcggccgagacgccgccgccacacgcgcgcgccgaggaggaggaggaggccgccccggccgtgggcggcggcraggaggggcggttcgagtggctggaccagtggtatcccgtggctccggtgtgcgacctcgacccgcgcaagccgcacgggaagatggtgcacaagaacagcaaggcgtgcgtggcgtcgtacccgagcgtggtgcagaacaacatcctgtggttctacccgaggtcggagccggagtacaaggagatcctgcagaggaagcggccgccgtacttcccagacctcgatgacccgtccttcaacacagtcttcggcgtcagggacctcttctacgggtacgacgtgttggtggagaatcttatggaccctgctcatgtcccatacgcgcacaaggggctgatgcccatacagaacaaagaagatccaggcagatattgttcaactgttcatctcctctccacagttgagtccgatcaggaaggaggctacccggtcaagattaggacggagcaggcaaagatcgacggcttcctgtcggtacaggaggatgacgtatgctacatgaagtttgatgcgccctgcacgctctatggcaagccctttcgcaccaaagaaccacagattgatcagggcaaggagaaaaagaagaagaagcaacctgaggcgatgacggtgttcttgtgcgtcccggtggctccgggaagaagcaggttgatatgggcgttcccgcggaatgttgatgcgtggctcgacaatataataccacggtggttgtaccacattgtgacgaacatcgtcttggattcagattcctacctcctccatattgaggagcgcaacttcgccacggttggccttgataactggcacaaagcttgttatgtgcccacatcatctgacaacatggtcatcaccttcagaaactggttcagaaagtactgtaagcatcagatcggctgggcaaccccaatggctaatcagctgccaccaactcctaccaaagatcaggtcttggagaggtacaggtcgcatgtcatgcagtgcacgagctgcagcgctgcactgaagaagatgaaggcgctggaggtcgccctgcaggtggcgtcggtcgccatcgtcggattcctcgccgtcgccaaggggagtctagcaccgtcggttgtccggcgagccgccgccgtgtctaccgccgtgctgtgcttcgccgcctcccgctggctcgcgagcttcattgagaagagcttctacttccaggactacgtccatgcttacaagtga

SEQ ID NO: 3374 - DNA, 1458 bp, Oryza sativa
atggaggatttgccttcaacgctggggcagccttctacttctgcatcatcggttgatgctagatattcagccgacaggactgaagattcacagctcttcctctccgtcccagctttaaaccaagctgcgtcttatctggcccagacggcctcatatcttacccagtgcctccctgtatctggttacacagctatttctgaggaagggcaagaactagcaactctgccacctgcgtcaactgttggtggatcctcttttcaggcttcttccgaacagtcagcagactcatctcctggtgaaattgataatactggaagctcatctcaagaaatcacagaacagatggcacctttgcgcgtcttccagaatggggcttcactgtttcaaggtcttgtagaacgtgctcggaaaactgttcgtggctcagccaatgatattggatggcttcagcaggatcaaagcttacctccaactgaggacggaactgccagattcttggaaattcttgatgctgtgaggcaagtttgctgccactttggttgtgaattcgcaatttggcaattttttgtgctgacattagcttttctattgtttgcagtcttcagtagtaaaaatgcaagggagataaaggaatatatagaagaaatataytggggatcgaagaagcgggtgctacttctcggccatagcaagggtggtgtagatgcagcagcagccctctccctttactggccacaactgaaagacaaggtcgcaggtttggctttagctcaaagcccatatggaggaagcccggttgcttcagatatcttgcgagaaggccagcttggtgactatgtcagggtgatctttcaggctctggaagacctgacatatgagaggaggaaagaattcctgcggcagaacccattgcctcctgaggttcccattgtctcgttccacacagaggctagcatcactcccagtgtgcttacagccctctctcatgttgcacacttggagctcccagctgcagctgatgggaatcctactaggatcccagttgtaatgccactttcagctgcaatggcagcatgctcacaacttctggtggcaaggtatggtgagaagagtgatggtcttgtgacaaggaaggatgctgaagttcctggatcagtagtggtccggccagagcggaagttggaccatgcatggatggtttattcctcactcaatgaggaacctagggatcaggcagacacatcgcagaagcttcatatatcaactgaatctgaaaggaaattgtatgatttggtcgtttctcatgtctcatggtattccccttcccaatcaggtgattcgtctactaggtctgaatttgattatggttggaatggtccaataatagtgttcagaacagctcctgctaggccccatggggaagtctccattctggagcgtgtccatggtgtctgttga

SEQ ID NO: 3375 - DNA, 1476 bp, Oryza sativa
atggtggtgcaatccggcgagggaagcgtccatgtcgtcctcgtgccatacccgtcccagggccacatcaacccggtgctccagttcggcaagcgcctcgccggccatgacggcgtccggtgcaccgtcgccgtgacgcggttcgtcgtcggctcgaccaccaagccctgcagcctcggytcgtcgccgktgcgcktcggcgtgttctccgacggctgcgacgagggcggcccggcggagctcggcggccaccgcggcccgtacttccagcggctggaggaggccgggtcggtgtccctggacgagctgctccgcggggaggcggascgggggacgccggcgacggtggtggtgtacgacacgttcatgccgtgggtgccccggctggcgcggcgccacggcgcggcgtgcgcggcgttcctgacgcagacgtgcgccgtggacgtggtgtacacgcacgcgcgctccgggcgcctcccggtgccggtkggggaggcggacgggccgctccggctgcccgggctgccggtggagctcgacgccggcgacgtgccgacgttcctggccgcccacgacacgcaccacccgtccatgcgcgcgctgctgatgaaccagttcgtcggcctcgacaacgtcgaccacgtgttcgtcaactcgttctacgagctcgagcctcaggtgagaccaaaactagtcgccaatggcgtgtgctcgccgtcgccgcgcgtgcctgacattttgtttgttgctcaggaagcggagtacatggcggcgacatggggcgcgaggacgatcgggccgaccgtgccatcggcgtacctcgacaaccgcctcccggacgacgcgtcgtacggcttccacctccacacgccgatggcggcggcktgccgggagtggctggacgcgcggccggcgggctccgtggtgtacgcctcgttcgggagcatcgcggcgccggggccggagacgatggccgaggtccccgagggcctctacagcagcggcagcccattcctctgggtgttccgcgccacggaaaccgggcgaagaacaacgggcctcatcgtgccatggtgcccgcagctggaggtgctcgcgcacgccgccgtgggctgcttcgtgacgcactgcggctggaactccaccgtcgaggcgctcagcgccggcgtgccgatggtggcggtgccgcagtggtcggaccagacgacgaacgccaggtacatcgaggacgtgtggcgcgtcggcgtgcgggttcgcggcggcggcggcggcgacggcggcgcggtggtgaggagggaggaggtggagaggaaggtgagggaggtgatggagggggagaggagcaaggagttcatgaggaacgcggcgagctggagctccaaggcgaggagcgccatgggcgaaggtggcagctcggacaggaacatcgccgagttcctgtccaagtatcggttgccgccgcatgggaccaaatga

SEQ ID NO: 3376 - DNA, 1152 bp, Oryza sativa
atggcggcgtccgggcgagccgccgtcacgggcgccgtccacgtcgccgcctactccgacggctacgacgccggcggytcacgaggccgcagcgccggcgagtacctgtcccggctggagtcgcgcgggtcggacaccatggacgcgctcttcsgcgccgaggcggagcagggccggccggtggacgcggtggtgtacgactcgttcctgagctgggcgccgcgcktggcggcgcgccacgktgcggcgaccgcgtccttcttcacgcaggcgtgcgcggtgaacgcggcgtacgagagcgtgttcacgggccgggtcgagctgccgctcgccgccgacggcgaggagccgctacggctgcccgggatttccgtcggcctcacgctggacgacgtgccgacgttcatggcgaacacggaggacagcccggcgtacctcgacctcctggtgaaccagttcaagggcctggacatggccgaccatgtcctcgtcaactccttctacgagctccagccacaggaagcggagcacatggcgtcggcgtggcgggccaagacggtggggctgaccgtgccatcggcgtacctcgacaaccgcctcccggacgacacgtcgtacggcttccacctcttctcgccgacgacggagacgaaggcctggctggaggcgagaccaccgcgcaccgtggcgtacgtctccttcggcagcgtggcgacgccgagcccggcgcagatggccgaggtggcggagggtttgtacaacaccggcaagcccttcctctgggtggtgagggcatcggaaacctccaagataccggaaggcttcgccgccaaggcggcgaagcaagggagagggctcatcgtgacgtggtgcccgcagctggaggtgctggcacacccagctgtggggtgcttcgtgacgcactgcgggtggaactcaacgacagaggggttgagtgccggtgtaccaatggtggcggtaccgcagtggtcagaccagacaatgaatgccaagtacattgaggacgtgtggcgtgttggggtgcgggtgcggcccgacggcgagggggtggtgaggaaggaggagttggagaggtgtgtgagggaggtgatggaaggggagaggagcaaggagtttcatggagaatgctaa

SEQ ID NO: 3377 - DNA, 465 bp, Oryza sativa
atggctgaggagcagaggtggcaggagggctgccaccgcctgtgcgccaacaactgcggcttcttcggtagccccgccacgctcgacctctgctccaagtgctaccgcgaccgccaaggccgggagagtactgcacccgtcgtcgtcgccgccgcagcctcggcctgcccggctactcatccttcctcgccatcctcgtcgtcttgtccggcgttcttgccttcctccactgccgccgaggctggcgtcgtcgtcgcggcggtggcgaaggcgagcaggtgcgcgagctgtaggaagcgggtggggcttacggggttcgcgtgccggtgcggcggcacgttctgcggcgcacaccggtacccggagcggcacgcgtgcggcttcgacttcaaggccgccggccgcgacgccatcgcgcgcgccaacccgctcatcaagggcgacaagctcaaggacaagatctga

SEQ ID NO: 3378 - DNA, 966 bp, Oryza sativa
atggcgtctctggccgtcgtggtggtggtggtggcggtggtgtgcgccgccggtgtggcggcggcgggcaagttcgacgacgtggtggagccgagctgggccaacgaccacgtcgtgtacgagggcgacctcctcaagctccgcctcgacagctcgtccggcggcgggttcgcgtcgaagagcaagttcctgtacggcaaggcgaccgccgacctgaagctcgtggcgggggattccgccggagttgtcactgctttctatctgtcgtccggcggggacaagcacaacgagttcgacttcgagttcctgggcaacgtcaccggcgagccgtacctggtgcagaccaacctgtacatcgacggcgtcggcaaccgggagcagcgcatcgacctgtggttcgaccccaccgccgacttccacacctacgccgtgctctggaaccccagccaggtcgtcttcctcgtcgacgacacccccatccgcgtctacgagaacaagaacgccaccgccgccccgatgtcggtgtacagctccatctggaacgcggacgactgggcgacgcagggcgggcgggtgaagacggactggtcgcacgcgccgttcgtggccacgttccgcgacgtccgcgtcgagggttgcgcgtgggcggcgaacgccacggactcggacgccggcgaggtggcgcggtgcacggggagctcgtggggcaaggaggggaggtactggtggaaggagaaggacatggaggagctcaccgtgcaccagaaccaccagctcgtgtgggcgcgcgcgcaccacctcgtctacgactactgcgtcgacaccgaccgcttccccgtccagccgccggagtgcgccggacgtcttccgatctggacgatgctcacttttaacttcaaatcgaaatgcaaatgcccaatgccatcattcattcatttggtcctcctcacggtgaaaaatcaatga

SEQ ID NO: 3379 - DNA, 650 bp, Oryza sativa
atggcgtacagggcggaggacgactacgactacctgttcaaggtggtgctcatcggcgactccggggtcggcaaatccaacctcctctcccgcttcacccgcaacgagttcagcctcgagtccaagtccaccatcggcgtcgagttcgccaccaggagcatccgcgtcgacgacaaggtcgtcaaggcccagatctgggacaccgccggccaggagaggtatcgggcgattacaagtgcatactatcgaggggcagttggcgcacttgtcgtgtacgacgtgacacgccatgtcacctttgagaatgtagagaggtggttgaaggagctccgggatcacacagatgcaaacatcgtcatcatgcttgttggcaacaaggctgatctgcgtcaccttagggccgtatcggttgaggacgccaagggcttcgccgagagggaaagcaccttcttcatggaaacgtccgcgttggagtccatgaatgtagaaagtgccttcactgaggtgctaactcagatctatcgcgtggtcagcaagaaggccctcgacatcggcgatgaccctgctgctccaccaagaggacagaccatcaatgttggtggcaaagatgatgtttctgctgtgaaaaagtctggatgctgttcatccta

SEQ ID NO: 3380 - DNA, 1143 bp, Oryza sativa
atggcaactgcagggaaagtgatcaagtgcaaagcggcggtggcttgggaggccgggaagccgctgtcaatcgaggaggtggaggttgcgccgccgcaagccatggaggttcgcctcaagatcctctacacggcgctctgccacaccgacgtctacttctgggaagccaaggggcaaactccggtgttccctcggatcttcggccacgaagctggagggattgtggagagtgtgggcgagggggtgacggagctttcccccggcgaccacgtgctgccggtgttcaccggcgagtgcggcgactgccggcactgcctgtcggaggagagcaacctgtgcgacctcctccgcatcaacaccgaccgtggcgccatgatcggcgacggccagaccaggttcaccgccaggggagggcagccggtgtaccacttcctcggcacctccacgttcagcgagtacaccgtcgtccatgtcggctgcgtcgccaagatccacccagcggcgccgctcgacaaggtctgcgtcctcagctgtggcatctccaccggatttggcgcgactgtgaacgtcgccaagccaccgaaggggtgcacagtagccatattcggcctgggtgcagttggtcttgctgccatggaaggtgcaaggatctctggtgcttcacggattattggcgtcgatttgaacccggccaaattcgaactagctaagaagtttgggtgcacagactttgtgaacccaaaagattacgacaagcccgttcagcaggtgatcatcgagatgaccaacggcggcgtggaccgcagcgtggagtgcaccggcaacgccgccgccatgatctccgccttcgagtgcgtccacgacgggtggggagtggccgtgctggtgggcgtcgccggcaaggacgcggcgttcaagacgcacccgaccaacttcctcaacgagaggacgctcaggggcacgttcttcggcaactacaagcctcgcaccgacctgcccggcgtcgtcgagatgtacatgaacaaggagctggagctggagaagttcatcacgcacagcgtgcccttctccgagatcaacacggcgttcgacctgatgcycagtggggaaaacctccgctgcatcatcaggatggaggactag

SEQ ID NO: 3381 - DNA, 1128 bp, Oryza sativa
atggcgacagccgggaaggtgatcaagtgcaaagcggcggtggcatgggaggccgggaagccgctgtcgatcgaggaggtggaggttgcgccgccgcaggccatggaggtccgcgtcaagatcctctacaccgccctctgccacaccgacgtctacttctgggaggccaaggggcaaacacctgttttccctaggatcttgggccatgaagctggaggcattgtggagagtgtgggaaagggtgtgaccgaactcgcgccgggcgaccatgtcctcccggtgttcaccggccaattgcaaggaaktgtgatcactggcaaatcggaggaragcaacatgtgtracctcctcaggatcaacgtcaaccgcggcgtcatgatcggcgacggcaatcccattcaccatcaaggggaagcccatcttccactttgttggcacatccacttcagcgagtacaccgtcatccatgtcggctgcctcgcgaagatcaacccggaggcgcctctcgacaaggtctgcattctcagctgcggtttctctaccggttttggtgcaacagtgaatgtcgcgaaaccgaaaaagggccagaccgtggctattttcggtcttggagctgttggtcttgctgctatggaaggtgccaggctgtctggagcatcgaggatcattggtgtggacctgaaccctgcgaaattcgaacaagctaagaagtttggctgcactgacttcgtaaaccccaaggaccacagcaagccagtgcacgaggtgctgattgagatgaccaacggtggactcgacagggccgttgaatgcacgggcaacatcaacgccatgatatcctgcttcgaatgtgtccatgatggatggggcgttgcggtgctggtcggcgtgccgaccaaggatgatgtgttcaagacccacccgatgaacttcctcaacgagaagacgctcaaggggacgttcttcggtaactacaagccgcgcaccgacctgcccaacgtcgtcgagctgtacatgaagaaggagctggagctggagaagttcatcacgcacagcgtgccgttctcggagatcaaacacggcgttcgatctcaatgctcaagggggagagtctccgctgcgtcatga

SEQ ID NO: 3382 - DNA, 483 bp, Oryza sativa
atggccccggttgccgtgggcgacaccctccccgacggccagctggggtggttcgacggggaggacaagctgcagcaggtctccgtccacggcctcgccgccggcaagaaggtcgtcctcttcggcgtccccggtgccttcaccccgacctgcagcaatcagcatgtgccaggattcataaatcaggctgagcagctcaaagccaagggtgtagacgacatcttgcttttaacgacccctttggtcatgaaggcatgggcaaagtcataccctgagaataagcatgtgaaattccttgccgatggtttgggaacatacaccaaggcacttggtcttgagcttgacctttcggagaaagggcttggtattcgttcgagacggtttgctctccttgctgacaacctcaaggttactgttgcaaacattgaggaaggtggccaattcacaatctctggtgctgaggagatcctcaaggcactgtaa

SEQ ID NO: 3383 - DNA, 1095 bp, Oryza sativa
atgcagctcaaggctccaacaagggcgaaatattcccaaggctttatgcccataggagaatccgacgcatactgtgctctaatacctggcttacctgaagatctcgcaaagatatgtcttgctcttgttcctcggagccagttccctgttatgggttcagtgtccaagaggtggatgtcattcctcgagagtaaggaattcattgctgtaaggaaagaggttgggaagcttgaggagtgggtgtatgtcctgactgctgatgctggatcaaaggggtcccattgggaagttttggggtgttcagggcaaaagcacagccctcttccacccatgcctgggccaaccaaagctggttttggtgtggttgttctagatggaaagcttttcgttattgctggctatgctgctgatcatgggaaggagtgtgtttctgatgaggtttaccgatacgattcttgcctaaacaggtgggttgagctttctaagatgaatgtggctcgttgtgactttgcttgtgcagaggtcaacggtatgatatatgttgctggtgggtttggtcccaatggtgatagtttatctagtgttgaagtttatgacgcagaacagaataagtggacattgattgagagccttcgccgtccaaggtggggctgctttgcgtgcagctttgaaggcaaattgtatgtcatgggcggtcgttcgcgcttcacaattggtaacacgcgttttgttgacgtgtacaatcctaatgacaactcctggggtgaggtgaagaatggttgtgtaatggtcacagcccatgctgttcttgacaaaaagctcttctgcatcgagtggaagaaccagaggtcactcgcagtcttcaacccggctgataattcttggcagaaagtcccagtgccactcacaggtagttctagtactcgtttttgtttcggcatacatgatgggaagctgctgctgttctctctggatgaagagccctgctataagacactgatgtatgatcccgctgcaccaacgggatcagagtggttcacatctgagctcaagccaccaggattatgtctgtgcagtgtgaccatcagagcctga

SEQ ID NO: 3384 - DNA, 3456 bp, Oryza sativa
atgagagtaaccattgaaattctaacacagatagggtaccaaataattaatcgtgacaaccctgatgatccactcttttgttcttttggttatccagttacacatggtgcctttcctccagatgtttctgttccagcgctgatgcttgagccttgtgctgggcaaaaactaggactatttgtttctgcgcctgaagttgctatccgtatgttgagggatcagggcaggccatcaccttttgagccgaatttcggtcgtccagraccmaggcaagatacgaaggggacgtgcgtacaggagatggggattctgaatatgtcctggaaatggaggaagcggattcgtcagggggtggtcggtgtcatctctcctgtcctgcggttgagggggcgaagatatactctagaccttaaaaaggaggaagagaaagagatgataagaagaaaaatccgagcacatgcacaagtgatacgggcagcatttcttttcaaagaagctggggaaaaagatctcagagaagcttatactggtataaaacttgaaacggcctctcgcagttttccaattgaactggaaaagcttacagcattgaatagggatcatgatagtgttttgcttcaggaagtcggaggatcgcttgtctcaactactctttttgttcaggttaaggggctgtcagatttattgaagagtaatttagagaagggaatttctctaaatgcggatgacttgttgcaaaggaggggtatttttggagcaaacacatatccacgcaagaaaaggaaaagcatactgcgtttcatatttgaagcatgcaaagatttaactcttatcattttaatggtggctgctgccatatcacttacattgggcatgaccacagagggcgcagatgaaggatggtatgatggtggaagtattttcttagctgtttttcttgtgatacttgttacagctatcagtgattacagacagtctcttcagtttcgacatctaaatgaggagaaacagaacatacaagtggaggttgttagaggtggtaaaagatgtggaacttcaatatttgaccttgttgttggtgatgtggttcctcttaaaattggtgaccaagttcctgccgatggtgtcctgatatctggccattctcttgcaattgatgaatcaagtatgactggggaatcaaaaactgttcacaaggataaaaaggaacccttcttgatgtctggctgcaaagttgcagatggctatggttctatgttggtaacaggtgtaggcaccaatactgaatggggtcagttgatggctaacctttccgaagataatggtgaagaaaccccgttgcaggtgcgcttgaatggcgttgcaacttttattggtatggtgggtttgacagtggctggtgctgtacttgtagtcctttggataagatattttactggacataccaaggatccggatggcactactcaatttgtggctggaactactcgggcaaaaaaaggatttatgggggcaatcagaattttgacaattgctgttactattgtggttgttgctgtgcctgagggactcccattagcagtaacattaacacttgcatactcaatgagaaagatgatgcgagacaaggcactggtgagacgtctctcatcctgcgaaacaatgggatctgcaactacaatatgcagtgataaaacagggacacttaccttgaataagatgacagttgttcaagcatattttggtggaacaatgttggatccttgtgatgatattagggcagtgtcatgtggggcaacagaacttcttattgaaggaatagcacaaaacacaactggaactatttttgtgccagaggatgggggagatgctgaactttcaggatcgccaactgaaaaggctattctttcttggggccttaagttcttccactttgaacagataggaatggatttcaatgatgcacggtcaaaatctcaaattcttcatgtctttccatttaattcggagaagaagcgtggtggggttgcagtacagtcagatgctggtgttcatgtccattggaaaggtgcagctgagcttgtgttatcatcttgcaaaagctggcttgccctggatggttcagttcagcccatgagtgctgagaagtataatgaatgcaagaaatcaattgaagacatggcaacgagttcattacgatgcgttgcttttgcatattgtccttgtgaaattgaaagaatcccaaaggaagacatagctgattggaagttacctgaggatgacctgactctgctttgtattgtgggtataaaggatccttgtcgcccaggagtgaagagtgctgtacaattatgcaccaatgctggtgtaaaggtgcgcatggtcactggagataacattgaaacagctaaagccatagctttggagtgtggaatattagatgcaaatggagcttttgtggagccatttgtaatagagggaaaagtgtttcgcgagatgtctgaagctgctagaggagatattgttgacaaaataacagtgatgggaagatcatctccaaatgacaaacttttgcttgtccaagctttgaaaagaaagggtcatgttgtggctgttactggtgatggcacaaatgatgctcctgcattgcatgaggccgatataggtctctcaatgggcatttcagggacagaagttgccaaagaaagttctgacattataatcttggatgacaacttcacatcagttgtgaaggttgttcgctggggaaggtctgtctatgcaaatattcagaaattcatccagtttcagcttactgttaatgttgccgcactcgtgattaatgttgttgcagctgtgtcctctggtgacgtgcctctaaatgctgttgagcttctctgggtaaatctaatcatggatacactgggagctctggctttagcaactgaaccaccgacggataaccttatgaagagacagcctgttggtcgaaggcatgccatttaccaaatagcgatccttcttatctttgatttttctggaagaagcatactgcggttacagaatgatagtcgggaggatgctgagaaaacacaaaacacctttatcttcaacacctttgtcttttgccagatcttcaacgagttcaatgcacgcaagcccgaggagaggaatgtcttcaaaggaataacgaaaaaccatctcttcatgggaataattgctataactactgtatttcagatactaattattgagttcctgggaaagttcttcaaaactgtgagacttaattggagattatggttggtctcagttgctattggcattataagttggcctctggcatatctggggaaattcattcctgtgcctgtaagacctctccaggattatttcaagcctacttgttggagaagagcttcacggcgagatgaagaggagagtggacagagctaa

SEQ ID NO: 3385 - DNA, 930 bp, Oryza sativa
atggcttccaggcttcagctcttgtacttcattgccattacagtgctcgcttcggtgttccaaccttgcacgtccattgagctccaccgtgagctctctggctggtcgaatggcattgctacatggtatggcgatcctaatggtgcaggaagtgaaggcggtgcatgtgggtaccagtatgctgttgaccagccaccgttctcatccaggattgctgctggtagcccctacatctatgactctggcaagggatgtggttcgtgctaccgggtggtgtgtgctggtaatgaagcttgctctggtatccctgtaaccgttgtcatcactgaccaggggcctggtggcccatgcttggaagagctagtcgatggtcaatgcatgaatgaagcagctcactttgacatgagcgggacagcattcggtgccatggcgaggcctggccaggctgatcaactccgtggtgctggcctcctccaaattcagtacacccgtgtggagtgtgaatggactggagtagggctaacctttgtcgtggactctggctccaacccgaactacctggccctgctggtggagtacgatgacaacgacagtgaccttgcggctgtcgacatcatgccgattggtgctggtgcttcggggtcatggattccgatgcagcagtcatggggcgcagtgtggaggctcaactccggctccgccctgcagggcccgttctccgtccgcctgacgttcagctccggccagatgtttgttgccagcaacgccataccggcagggtggaaccccggcatggcgtaccagcccggcggagtggcgatgagggttaggggaagaaatggtggtcgccggggctacgaggccgtcgggatgctgggtggcttgtgtcaccttctactgctgctgttgttaatgttgttcgagttgtga

SEQ ID NO: 3386 - DNA, 999 bp, Oryza sativa
atgagctcccggatggccggatcggcgatcctccgtcacgtcggcggcgtccgcctcttcaccgcgtcggcgacctctccggcggcggcggcggcggcggcggcgaggccgttccttgcaggcggagaagccgtccccggggtgtgggggttgcggctgatgtccacgtcgtccgtggcgtcgacggaggcggcggccaaggcggaggccaagaaggcggacgcggagaaggaggtggtggtcaacagctactggggcatcgagcagtcgaagaagctggtgcgggaggacggcacggagtggaagtggtcttgctttaggccatgggagacctacaccgcggacacttcgatcgatctgacgaagcaccacgtgcccaagacgctgctcgacaagatcgcctactggaccgtcaagtcgctgcgcttccccactgatatcttcttccagaggaggtatggctgccgcgcgatgatgctggagacggtggcggcggtgccggggatggtgggcggcatgctgctccacctccggtccctccggcgcttcgagcagagcggcggctggatccgcacgctgctggaagaggccgagaacgagcgcatgcacctgatgaccttcatggaggtggcgaacccaaagtggtacgagcgcgccctcgtcatcaccgtccagggcgtcttcttcaacgcctacttcctgggttacctcctctcccccaagttcgcgcaccgcgtcgtcggctacctcgaggaggaggccatccactcgtacaccgagttcctcaaggacctcgaggccggcaagatcgacaacgtccctgccccggccatcgccatcgactactggcgcytccccgcmaacgccacgctcaaggacgtcgtcaccgtcgtgcgcgccgacgaggctcaccaccgcgacgtcaatcacttcgcatcggacatccattaccagggcatggagctgaagcagacccctgcgccgatcggatatcactga

SEQ ID NO: 3387 - DNA, 1008 bp, Oryza sativa
atgagctcccgaatggccggagcgacgctgctgcgccacctgggcccccgcctgttcgccgccgagcctgtgtactccgggctcgccgcgagcgccaggggcgtcatgcccgccgccgcgaggattttccccgcgcggatggccagcaccagcagcgccggcgcggacgtcaaagaaggcgcagccgagaagctgccggagccggcggcaacggcggcggcggcggcgaccgacccgcagaacaagaaggccgtcgtgagctactggggcatccagccgccgaagctcgtgaaggaggacggcacggaatggaagtggctcagttttaggccatgggacacgtacacgtcggacacgtcgatcgacgtgacgaagcaccacgagccgaagggcctcccggacaagctggcgtactggacggtgaggtcgctggcggtgcccagggacctcttcttccagcggcggcacgcgagccacgcgctgctgctggagacggtggccggggtgcccgggatggtgggcggcatgctgctccacctgcgctccctccgccgcttcgagcagagcggcggctggatccgcgcgctgctggaggaggccgagaacgagcggatgcacctgatgaccttcctggaggtgatgcagccacggtggtgggagcgcgccctcgtgctcgccgcgcagggcgtcttcttcaacgcctacttcgtcggctacctcgtctcccccaagttcgcgcaccgcttcgtcggctacctcgaggaggaggccgtgagctcgtacaccgagtacctcaaggacctcgaggccggcaagatcgagaacacgccggcgccggccatcgccatcgactactggcgcctccccgccgacgccacgctcaaggacgtcgtcaccgtcatccgcgccgacgaggcgcaccaccgcgacctcaaccatttcgcatcggacatccagcaacaggggatgaagctgaaggatacgcctgcgcctatcgggtatcactga

SEQ ID NO: 3388 - DNA, 1197 bp, Oryza sativa
atggggagcgcgctggagacgctatgcgggcaagcttttggcgcgaagcagcatcacatgctgggcatctacttgcagcgctcatgggtgatcctcaccgccatgagcgtcatcctcctccccatctacctcttcgccaccccgatcctccgcttcttccaccaggacgacgagatcgccgtcctcgccagccgcttctccctctacatgatcccccagctcttcgcctacgccctcaacttccccatccagaagttcctccaggcccagagcaaggtcatggccatggcggccgtctccgcggcggtgctgctgttccacgtcgcgctcacgtggcttctcctcgtgccgctccggatgggcctcgtcggcctcgccgtcgcgctcaacgtgtcgtggtggctcgtcgtgctcggccagctcgcctacatcgtcatgggctactgccctggagcttggaacgggttcgactggctcgcgttcaccgacctcctcagcttcgcccgcctctccctcggctccgccatcatgatctgcctcgagttctggttctacatgttcctcatcgtcattgtcggtaacctccccaatgcccaggtcgccgtcgccgccgtctccatctgcacgaacctgtttgggtggcagatcatggtgttcttcgggttcaacgcggcgatcagcgtgagggtgtcgaacgagctgggcgcggggcggccgcgggcggcgaggctcgcgatcgcggtggtgctcgtgtcctcggtcgccatcggcgtcgccttcttcgcggcggtgctgctgctccgcgacgtgtacggcgcgccgttcacgggcagcccggaggtggtgcgcgcggtggcgagcctgggcgtggtgttcgccttctcgctcctcctcaacagcgtccagccggtgctctccggcgtggccgtcggcgccgggtggcagtggctggtggcgtacatcaacctgggctgctactactgcgtcggcatccccgtcggctacgccatcgcgttcccgctccgccgcggcgtgcaggggatgtggggcgggatgctcactggcgtcgggctgcagacggcgatcctggtggcgatcacggcgcgcaccaactggaacaaggaggccagcgaggcgcacgccaggatccagcactggggtggcacggccaagctcgccgtcgacgaccccatctag

SEQ ID NO: 3389 - DNA, 1944 bp, Oryza sativa
atggccggcaagggagacgggccggcgatcggcatcgacctcgggacgacctactcgtgcgtcggcgtgtggcagcacgaccgcgtcgagatcatcgcaaacgaccaggggaaccgcaccacgccgtcgtatgtcgcgttcaccgactccgagaggctcatcggcgacgccgccaagaaccaggtcgccatgaaccccatcaacaccgtcttcgatgcgaagcgtctcatcggccggcgtttctctgacacgtcggtgcagagcgacgcgaagctgtgcktcagtgctwaccggcccggcgacagcgatgatcggcgtgcagtacaagggagaggagaagcagttctccgccgaggagatctcgtccatggtgctcaacaagatgaaggagacggccgaggcctatctcggaagcaccgtcaagaacgccgtcgtcaccgtcccggcctacttcaacgactcccagcgccaggccaccaaggacgccggcgtcatctccggcctcaacgtcatgcgcatcatcaacgagcccaccgccgccgccatcgcctacgcctcgacaagaagtcgagcagcgtcggcgagaagaacgtgctcatctttgacctcggcggcggcacattcgatgtctccctcctcaccatcgaggagggcatcttcgaggtgaaggccaccgccggtgacacccaccttggaggcgaggacttcgacaaccggatggtgaaccacttcgtgcaggaattcaagaggaagaacaagaaggacatcacgggcaacccgagggcgctcaggcgtctgaggacggcgtgcgagagggcgaagaggacgctgtcctccaccgcccagaccaccatcgagatcgactccctctacgagggcatcgacttctacaccaccatcacccgcgccaggttcgaggagctcaacatggacctcttccgcaagtgcatggagcccgtggagaagtgcctccgcgacgccaagatggacaagagcaccgtccacgacgtcgtgctcgtcggaggctccacccgtatcccccgcgtgcagcagctgctccaggacttcttcaacgggaaggagctctgcaagagcatcaaccccgacgaggccgtcgcgtacggcgccgccgtgcaggccgccatcctcaccggcgagggcaacgagaaggtccaggacctgctcctcctcgacgtcacgccgctgtctcagggcctcgagacggccggaggcgtcatgaccgtgctgatccccaggaacaccaccatccccaccaagaaggagcaggtcttctccacctactccgacaaccagcccggcgtgctcatccaggtgtacgagggtgagaggacgcggaccaaggacaacaacctgctcggcaagttcgagctctccggcattccgccggcgcccaggggtgtcccccagatcaccgtgtgcttcgacattgacgcgaacggcatcctgaacgtctcggcggaggacaagaccaccgggcagaagaacaagatcaccatcaccaacgacaagggccgtctgagcaaggaggatatcgagaagatggtgcaggaggcggagaagtacaaggcggaggacgaggagcacaagaagaaggtcgacgccaagaactcgctcgagaactacgcctacaacatgcggaacaccatcaaggacgacaagatcgcgtccaagctgccggaggccgacaagaagaagatcgaggacgccatcgacggtgccatcagctggctcgacagcaaccagctcgccgaggccgaggagttcgaggacaagatgaaggagctggagggcgtctgcaaccccatcatcgccaagatgtaccagggcgccggagctgacatggccggaggcatggacgaggatgctccggcggccgccggcggaagcagcggaccagggcccaagatcgaggaagtcgactaa

SEQ ID NO: 3390 - DNA, 1460 bp, Oryza sativa
atggcgccctccttccggctctcttctgcacccgagtcggccgacgaagcaacagctcataataaggagatatacgaccaactccgacgagtcgcagagacctttccgtcggctcccagcctcatcggcctcccgtgcagtcgccacccggacgggtggtacacgttcacgaatggggttgtgagctccatggtgatcaaggagcacctgacggcgcgcgccaccgacatcttcctcaccaccttccccaagtccagcaccacttggctcaaggcgcttctgtactcgactctccaccgcggaactgacgagctggtggcgcacagcccgcaccagctcgtccctttcctcgagtcccaggtgttcgccaatgaccggatccctgacctgagctccttaccttcgccgcggttgtttatgacgcacatcccatcccagtcactgccagactccgtcgctgcatccggytgtaakgtggtgtacctttgtcgggaccccaaggactgcttcgtctcgctctggcacttttggaacaggttcatgccgtgggacatcgacgaggcgcaccggcaattctgcgatggcgtctcgcagtttgggccgttctgggagcatatcctcggctactggaggtggcacgtcgagaagccgaaccaggtrctcttcttgacctacgaggagctcgycgccracacrctcggccagttgagacgccttgccgagtttgtcggatgtccattcacgacggaggagcagaagcacggggtggataggaatatcgtggaggcctgcgcattggagaacatgtccggattagaggtgaatcggtcgggaacgatcaccatagtcgatagcactgtcccaaacaacacgttcttccggcgtggcgtggtcggagattggagaaaccacctgacgccagagatggcaaggaggattgatgagattacaaagagcaagtttaaagggactacacacacttcatggcttcctcctcaactgccgaagcggccgacggaacgtctcacatggaaatctatgaccaactccggcaagtcgtggagaccttcccggcggcagtcagcggtcatcggccaaccatactgtcgccaccctgacggatggtacatgtccaggcggggggttgtgagcgccatggccatcaagaggcatctgatggcgcgcaccacggacgtcttcatcgccaccttccccaagtccggcaccacatggctcaaggcgcttatattcrtrtcatggaacattgatgtggctgtccggcaattctgcratggcatctcgcatttcgggccgttttgggagcacgtcctcggctactggcggtggcacgtcgagaygccaagccaggtgttcttcttgacctacgaggagcttgcagctgacacgcttggcctattgagacgtttggccgagtttgttgggcacccgtttcacggttg

SEQ ID NO: 3391 - DNA, 1875 bp, Oryza sativa
atgatgctgctgagttcctcctactccggcggacaattccccggagtttcaccccttgggacgcgaccaaagagatccaccacagtagtgcctcgtccagtggtcacaagagcaacagcaggtggtgtgaggaataacctggaagtagtgggaaatgcaggaaccctgcaaggcatggacatagatgaactgcgggtgatagtgaggaagcagctgcagggagttgagttatcaccatcttcatacgacacggcatgggtggccatggtgccagtgcaggggtctcgtcagtctccatgcttcccgcagtgcgtcgagtggatacttcagaaccaacaggaggacggatcatggggccattctgcagggccatcaggagaggtaaacaaagatattctattgtctacattggcatgtgttcttgcactcaacatatggaatgttggtcaagatcacatcaggagaggactgagtttcattggaagaaatttctcggttgccattgatgggcaatgtgccgctcctgtcggttttaacattacattttctggtatgcttcgccttgccattgggatgggtttgaaattccctgttatggaaacggatatcgatagtatatttcgcctccgggaggtcgaatttgaaagggatgctggtggcacagcttcagcaaggaaagccttcatggcatatgtatcagaagggttggggagagaacaagattgggatcatgtaatggcatatcaaaggaagaacggttcattgttcaactcgccttccacaacagcagcgtcagcgatccacagctgcaatgacagagctctagactatttggtctctcttacatccaaattgggtggcccagtgccagcgatatwtccagacaaggtatactcccagctctgcatggtggatacccttgagaagatggggatctcttctgattttgcttgcgacatacgcgacatattggacatgacctacagttgctggatgcaagatgaggaggagatcatgttggatatggcaacgtgtgcaaaggcatttcgcctccttcgtatgcacggttatgacgtcagctcagagggaatggctcgatttgctgaacgatctagcttcgatgattcaattcatgcatatctcaatgacactaagcccttgctggagttgtacaaaagttcacaagttcacttcttggaagaagatttcatactagagaatatcggttcctggtcagctaaattactcaagcaacaactctcgttcaacaagatatcgaaatcattaatgccagaggttgagtatgcccttaaatatcccttctatgcaaccgtggaagtactagagcacaaggggaacatagagcgattcaacgtaaacggcttccagcgtctgaaatctggatactgcggctccggggcagacaaagaaattctagctttggctgtcaataaattccactacgcccagtctgtttaccaacaagaactccggtatctcgagagctgggtggcagaatttaggctggacgagctgaaattcgcgagagtgattccactgcagtcgcttttgtctgctgttgtccccttgttcccctgcgagttgtccgatgcccgcattgcttggagccagaacgccatactgacggctgtggttgatgacttgttcgacggcggagggtccatggaggagatgctgaatttggtcgcgttattcgacaaatgggacgatcacggtgagattggcttctgctccagcaacgtagagattatgttcaatgctgtttacaacacgaccaagcgtatcggcgcaaaggccgcactggtgcagaagcgttgtgtcatcgatcatattgccgagcaatttaaggtatag

SEQ ID NO: 3392 - DNA, 1842 bp, Oryza sativa
atgcggatggaggggtggctgtacctgatccgatccaaccgcctcggcctgcagtactcgcggaagaggtacttcgtgctcgaggacgccgcgctccgctgcttcaaggccccgccgccgccctcctcctcctcctcctcctccaagcgcgaggatcctgttagaagtgcaataattgattcttgtatacgtgtcacagacaatgggagagaaagtgttcatagaagtgttttttacatattcamactctacaatgcctctaatcattatgatcaacttaagttgggtgctcgaagttcagaggaagccgctaggtggatcaggtgtttgatggagtctgccttaaagtccccaagaaaagatgagcatattgttgcttgttcacatagaagatggcaagcttttaggctaagccgccgcagtaaccgcatgcactcaatagattggactgtattttcttctgtccataacgatcctatggcatctgatgttattgcgccttctccatggacaatatttggctgcaaaaatggattgcgtttgtttactgaggcaaaggatggtggttcagaggggaagtattgggatgatcatccagctataatggctgttggtgttgttgatgcgaattctgaggctgtattccagactgtaatgtcccttggtcaatcaagatcagagggaatgagaaagagggatctattacttaggcgatattggaggagagaagacgatgggacttatgccctgcgggaattcttccgagcaaaaaatggaaattgtgcttgcatagagttctcgtcaggtgagttgacaagggatatgcgtctgcaacaaggtgaaaatgagcggataaaaatcgaaatgctgtcagcaagtgaaaataacaggctagaagatcctacagaaggatcactgggtggttctaatagacacttaagtagcgctggttccttcattcaactgaacgatgcagcggatgagttttttgatgtcccggatgattcagaatatgatcaaagagaagccatgtggccttccgatgagagcacacattctgtggaccaacgacatgctaaattgtccaccgctgctgtcttcgtaaaaaagttgcatgatcttgcagtgcaaaagagaggatatgttgacttacaaggagctgctgatttcgataatggtccattttgctatggatatactcttccaaaagattcgaactgtacaatgccttctacttgggcaatgacagatcctacaacattcttaatccgaggggagtcatatttgcaggatcgtctaaagatcaaggcaaacaatacattgatgcaaatggtaggtgctgactggataaaatctgataagcgtgaagatgacctttctggccgccctggaggactagtacaggttcctggttcatccacatacagcttagccttgtattatatgatggataccccattggaaaaggttcctctacttgaaagatttgtaaatggagatgacgcattcagaaattcaaggttcaaactcatcccgtacatctcaaaggggtcttggatagtaaagcaaagtgtgggaaagaaagcctgtttggttggtcaagcactagagatcaattatttccgtggaagcaattatttggagcttggagttgatataggctcgtcaacagttgcacggggtgtggtgagccttgtgcttggctacttgaacaacctggtgattgaaatggccttcctggtacagggcaacacgcaagaagagctcccggagttcctcctgggcacctgccgactgaactacctcgacgcgtccaaggcagtgtccatagacgagtgctga

SEQ ID NO: 3393 - DNA, 957 bp, Oryza sativa
atgagtgatgacgagctgattccggggctaccggaggaagtggcccgggaatgcctgctgcgcgtgggattcgaccagctgccgtcggcgaggagcacgtcgcggcggtggaaggcggaggtcgagtcgccgttctaccaccgcctccgcagggcccgcggcatggcgcgcccgctcctcgccctcgcccaggccgagccgccgctcgccgccgccggcccggctaacaagtacgccggcctgtccacctcctaccgcctcgtcctccacgaccccgtcgccggcggctgggccgcgctgccgccgctccccggcgccggtgggctgccgctcttctgccagctcgccgcggtggcggcttccggcggggagaggaggcggctggtggtggtcggcgggtgggatcccgagacgtgggcgccgacggacgcggtgcacgtgtacgacttcctgtccgggtcgtggcggcgcggcgcggcgatgcctggaccgaggcggtcgttcttcgcgtgcgccgcggttgggaagtgggtgttcgtcgccggcgggcacgacgaggagaagaacgcgctgcggtcggcggtcgcgtacgacgccgaggccgacgcgtgggtgccgctcccggacatggcggcggaccgggacgaggccaggggcgtctgcgtcggcggcaggttcgtcgccgtcggcgggtacccgacggaggcgcagggccggttcgccggctccgccgaggcgttcgacccggccgcgtgggcktggggccccgtgcaggagcgtgtcctcgacgaggggacgtgcccgaggacgtgctgcgccgcgccggcgcccgcggcgggcgcgacgatgtacatgctccgcgacggccacctcgcggcgcgcgaacgccacggaacaacggcggcgccgcsttggcgggccgttggcgaaccctgcccgaggacggccgcgcggtaa

SEQ ID NO: 3394 - DNA, 1542 bp, Oryza sativa
atggggccattcctcatcagcagggccaacaaggagctcgtcttcgtccacaactgcaccaccacgaagcggcggccgccgcaggggttccgccgtatgccctgcagccccgacgagtcgttcgtcttcctcggcgacggccgccctcgtctcttgctgccgggatgctccatgtccgtcgtgccggtccttgggttgcaggacggggactacgtcgcgagcatgaggcsarggcttctgctcgagtggatgctggtgccgggtgattgccagaagtgctcggcgaatggcgggcaatgcgagtacagcagcgacggcatggggttctcgtgcaaatgtcccagcggcgtccacaaccccaccagctgcgttgcaggcgatagcaagagcaatggcaggaagaaaacgctaatagttttgataccagtagctgtaagcctgctctttccatgtgcttatgtgctgatatggcatagaaaggggcaaatattgtgctatctcctatgcaacaagactcgcagcagaaatgaaagtaacattcagaaattaatagtatcgtacggatccctagctccaaaaagatacaagtattcggaggtagcaaagataacatcatttctgagtaataagcttggagaaggtggttatggtgtggttttcaaaggaaagctacaagatggtcgtctggttgctgtgaaattcttgcatgactccaaaggaaatggggaagaattcgtaaacgagggctcaaaacgagctcttatatatgactacatgcccaacagttctctggataactacatttactcagaaaaacccaaagaaactttaggatgggaaaagctctatgatatagcaattgggattgctcgtgggctagaatacttgcaccatggttgtaatacacgaatcgtgcattttgatatcaagcctcaaaatatccttctagaccaggatttttgcccaaagattgccgattttggtttagctaaattgtgttgtaccaaggagagcaagctttcaatgaccggtgctagaggaacaattggattcattgctcctgaagttttgtatcggtcttttggggttgtttcaataaagtcggatgtttatagttacggaatgatgttgcttgagatgattggaggccggaaaaatgtgaaatcaatggttcaaaactctagtgaaaaatatttcccagactggatttatgaccacttttatcaaggtgatggattgcaagcttgtgaagtcacaagtgaggttgaggaaatcgccaaaaagatgactttaattggcttgtggtgtgtacaagtattacctatgcatcgcccaacaataacccaggttttagatatgtttgagaaagctttagacgaactggacatgcctccaaagcaaagcttctgtgaatcactagaacatccggttcacaagttaaatgcggaaagcacaagctctgctactgacaaagcatatgctgttagtgaaatactgaatgttgaagagattagccttgtgaattcagaattcctacaatga

SEQ ID NO: 3395 - DNA, 1722 bp, Oryza sativa
atgccgcctcctaccttgttgctgttattcatcacctacctcgcttgggagagccaagcatttaggacgtcggcagatgcaaatccagaagaaggctgcgcggccagtactgtcctcgacatcttctacggcaacaattcattgctcgtctctgacgtccacaagctcggtggcttcgatgtcttctccggcgccagcaaagaatactcctgccatgttccgaggaccaacacctcctccaaggtcgccctcccgttctccatcagcaccaccaatctcaacctcttcctgtacagttgcagtaaggcgcttgtgccgcgggacggagacggcgacctcgtggagacgaggtgcggcaacaagacgtttgctcgcgtaggagggaattacagtgattcgggcgactacccggcgttttacatggaaggctgcaatgctaccgtcgtgccggtgctgggcacggacgcgaggagctatgagcagctcatccgcgacggcttcctcttgacatggcaagggccgccatcatctggagccgtattttaccgttcttttctgatctctcaaactctgcacacctccgagggtgcatcccgtcggagcagttgcaggagaatcccaggtcgttgccgaaatagcaggaggtcaaagctcaagttgattgtgattgtttcactgtctgctacaaccagcttgattctcacatgtcttgtttggattacatgtcgtcagaaggaaaagggcagtttattaaccctccagaagtatgtggccaatgaatcaaaaatagaggaagcacttaaagaatatgattctctcgctccaaagaggtataactactcagagcttaagaaaataacaagatctttcaaggataaacttggacaaggtggctatggcatggtattcaaaggcatcctacaagatggccgcattgtagcagtgaagctcttgacaggaacaaaaggcaacggggaggagtttctgaacgaggtaatcagtataggtaggacatctcatgtgaatattgtcagtctgcttggtttttgtttacaaggatctaagcgagcacttgtttatgaatatatggccaatggttcattggataattatatttattcagaagaatcaaaaattgtcgttggatggggaaaattgcaacaaatagcaattggcattgcacgtggattggaatatttgcattgcaggtgtaatacacgtataatccattttgatatcaagccccagaacatccttctagatgaggacttctgccctaaagttgcggattttggattggcaaaactgtgtcgcctcaaggatagtgccctctcaatggctgaagcaagaggtacagttggatttattgccccagaagtattttctagaggttttggagttgtgtccactaaatcagatgtatacagctatggtatgctactgctagaattggtaggaggaaggaggcatgctaatgaattaactaccagccattccactggaaattattttcccaacaggatttatgattgtttagtgaaagatttgcaaactcatgcaatcattactgaggaggaagagattgccaaattgatgacattagttggtttatggtgtatacaaactaacccagggaatcgcccttccattagtagggtcatagaaatgctggagaagaacatcaatgaaatggaagtgccacccaaaccattcctgtcatga

SEQ ID NO: 3396 - DNA, 1890 bp, Oryza sativa
atgcataccaagttgctcctgttgccaatcttggcctctttgcagctactaccaggcgctgccaatggcgccaccgtggacccaagctgcccaccggcgacatgcgggaacctgactatcacctacccattctggctgggcagccagaaccagtcgtcttgcggcccaccgtcgttccagctcacgtgcaatgacagagcatcaggtcccttcctaagaaactcctacatcaaggtcctcggcttcgattatggccgccgctccctcgtggccgtgcacgccctcctcgctgccgatgctgcgtgcaccgtcatgttcaacgtgtcctccgccttcgcgatcactgacaggttcagtatcagccagagcaaccgggagctctatgtgctgtccaggtgcagagagagactgccaccgccagacgctgtcccggtgaccaactgcagagccaacagtagtggcatgtacgcctaccttgggggaagctatggcacaggccagacaccggtgaacaatggtggttgcgagctttcagtgttcctggtgcttgggtccagcaacgccgccgacatgacagcggcaaattacagacagcttatagcgggcgggtttctgttggagtgggaacctgttggcgactgcaacgcctgcacagcgagcggcgggaggtgccggtacgatgccagcacatcggcgttcgcatgcctttgctcggatggtggcatgagaccatcgatttgcgatggtaagaacaggggcaagttggctttgatagtatctctgtctgctgcggctggcttggttttcgcctttcttgcttggctgatgtaccgtcagaggcaaaagttcagatcagcaatctgcggagtttactctggcaatacgaaaaatgaagaagaaatgttgaaaaaatgtgaatctcttgctctcaaaaggtacaagtactcagagttgaagaaaataactaaatcatttgaagataatttaggagaaggtggctatggtgtagtattcaagggaagactacaaaatggcagaatggttgcagtgaagatcttgacagtatcaaaaggcaatggagaggatttcctaaatgaagttatgagcatcagtcggacatctcatgttaacattgtcactctactcggtttttgtttagagggaccaaagcgagcgcttgtctacgagtacatgcctaatggttctttgaagaattacattcattcagaaagttcaaatctagctacaggatgggagatgctgctaaaaattgtgatcggcatcgcacgaggactggagtatctgcaccagggctgcaacacccgcatcatccatttcgatatcaagcctcgcaacatccttcttgatcatgagttttgtccaaaaattgcagattttggattagccaagctatgccacctcaacgagagcatcctttcgatggcggaagcgagaggaaccattggttttattgctccagaagtattctccagaggattcggagttgtgtcaaccaaatcagatgtctatagctacgggatgctgcttttggaaatagtcaaagtaagaaaaaacataaaaggaattgcagataatttcagtgaaacatttttcccacattgggtttatgacagtctggtgagtgagatgcaatgttgtgaaacggcatatggaaccgaagagattgcaagaaagatgaccatagttggactgtggtgcatacaaatgacacctgaaactcgtccttcgatgagcagggtcatagagatgttggaaaggagtatcagtgaactagaaatgccgcccaaaccattcctctgctcccccatccactcaacgaatgtttcgtcttataaatcagtcaattttacgatgtctgcatcatcatga

SEQ ID NO: 3397 - DNA, 945 bp, Oryza sativa
atgtccgcccgagccgccgccggcggcgktaacggcgatggcgggggccgccgcaagacccttgccaaggtgtccctctcctcgctttccgccgccgcggcggaggcggccacgttccccatcgacgccgtcaagacgcgcctcgagctccaccgcggtacagggggcagcggcggggaagscgggggcgtcatgcgcgtcgctggcgagctcgtacgcgacgggggaatctaccggggcctttcccccgccgtactccggcacctcttctacaccccgctccgcatcgtggggtacgagcacctccggtccaccttcgccagcggtggacgagacgcgggcctcctcgagaaggcgcttgctgggggtgtctccggcgttgtcgcacaggtggtggcaagccctgctgatctcatcaaggtaaggatgcaagcagacagcagactgttgagccaaggtatccaaccacggtatacaggaatctttgatgcctttacaaaaattgtacgggccgaaggatttcgaggactttggaagggtgttgttcctaatgcccaacgagcctttcttgtcaatatgggtgaattgacatgctatgatcaggcaaagcatttcatcatccggaagcaaatctgtggcgataacctgtatgctcacacacttgcctctgtcgcatctggactgtctgcgacaaccttaagctgcccagcagatgtaatcaaaactaggatgatgaaccagggcaaggatgcaaaagttctatacaggaattcttatgattgtttggtcaagactgtcaaacatgaggggttgacagcattgtggaagggattcttacctacatgggccaggcttggtccatggcagtttgtgttctgggtttcctatgaaaaattgcgccaagcatcagggagcatccagaataagattttgttaattgtttag

SEQ ID NO: 3398 - DNA, 699 bp, Oryza sativa
atggattactggaagaccaaggttctgccgaagattaaggtcgtcttcgccaagggcggcaacgccaagaaggctgccgccgccgaactcatcaagtcgtttgatgaatctaaggaggggatcaacggcgagttcgaggagaagaaggctgacctccagcccaaggtcgtcgagatctacgaggctgctcctgcgccgctcaaggttctgatcaaggacagggccaaggtgtccgggatcaagaagaactccgccgccgtcaccaagttcgtcgacgatctcgccaaaatcgagttccccggagcgaagcaactgagcgaggggatcgccaaggtcggcccggcgctgctctccggcccggtgttcgccaccttcgagaaggtctccacgttgctccccgccgacgaggaggagatcaagcccaaggaggctacggccgccgccgccgaagaggagaagaaggaggaagccgccgccgccgccgccgccaccgacgccgccggcgaggagaagaaggaagaagccgaggagaagaaagaagaagaggccgccgcccccgccgacgagccagctgcagccgccggtgagagcgcacctgccgccgccgaggccgagcccccagtcgaggccgcagcgacgccggcggccgctgaggcggcgccggcgaaggccgaggaggaggaggcaccaaaggcctaa

SEQ ID NO: 3399 - DNA, 1584 bp, Oryza sativa
atggcgtcgctggcgtccctctcgctcccggtctccaccgcctcgcagggccgcgcgcgcggcgcgggacccgtcacggcggcgccgcggcggcgaagggttagcgtcgtgcgggcgaaggtgcgggagatcttcatgccggcgctgagctcgacgatkacggaggggaggatcgtctcctggacggcggcgaagggggaccgcgtcgccaagggggaccccgtggtggtggtggagtccgacaaggcggacatggacgtggagaccttctacgacgggatcgtcgccgtcgtcctcgtcccggccggtgagtccgcccccgtcggcgcccccatcgccctcctggcggagtccgaggaggaggtcgccgtcgcgcaggcgcgtgcacaggctctcccgagaggcccgggccaagaaccccttcctccccacgttcccaaggctgcgccgccgccgccgccgccaccaccaccacatgcccctcctggaccgccgccgacgaagggcgtcgccacgccgcacgccaagaagctagcgaagcagcacagggtggacatctccatggtcgtcggcaccgggccacacggccgcgtcaccggagccgacgtcgaggcggccgctggcatcaagccaaagctaaagggcccaaagggcgctccacctccgcctccgcctccacctccatcgccacacagacaccccgctgctcaccctccgcctccgcctcaccaccccgctcctcgccctccgccgccgatggcggcggcaccccggcaaccagcagcgctgccaccggtgcctggcgcgacggtggtgccgttcacgacgatgcaagccgcggtgagcaggaacatgatggagagcctgtcagtgccaacattcagagtcggctacgccgtgtgcactgacaagctcgacgcactatgcgagaaggttaaatcgaaaggggtcacaaagacattgttgctggtgaaggccgcggccatggcgctcacgcagcacccggttgtgaatgccagctgcagggatgggaagagcttcagttacaacagtagtatcaacattgctgtggctgtcgcgatcgagggcggccttcttacgcctgtcttggaggatgttgataagttggatgtataccttcttgcacaaaagtggagaggcctgctcaagaaggcacgcatgaagcagctccaaccagacgaatacagttcagggacttttacgctgtctaatttgggtatgtttggtgtggatagattcgatgcaatccttccacctggtcaagaattgtatttgagcaatatgagaactaagaacaactgtttgtcgatggctcgctcaatgcagggggctattatggctgttggaggatcgagacctactttggtggccaacaaagatggtttctttagcatcaagaacgaaatgctgagatacttctctgaagcttctgaactatgtttctcccaaccttttcaggtcaatgttactgctgaccacaggattatatatggtgctgatttggcagcattcctgcagacatttgcgaagatcattgaggatcctgagagcctaacattgtag

SEQ ID NO: 3400 - DNA, 915 bp, Oryza sativa
atggcggtttacatcgctcgggaggctaccaagctatggagraaggtgtgtgcggagatagcggtggagctgcagcttcttttcgagaagtggcgcttgctccttgccggattggtgtttcagtacattcatggactggctgctcgaggagtacattacttgcatcgacctgggccactgctccaggacttgggattcatggctcttccggaacttggacaggacaaaggatatgttagtgagagcgtgttcacattcatcttcatttccttcctgttgtggagttttcacccttttatttatcatagcaaacgtttctacactgttctactctggcgcagggtgctggcctttttagttggctcaaaaatggccactcttccaccgccccataatgtacttgaagtgctcctgatcaactttcctcgtggagtgctttttggttgtggcgatctgattttttcatctcacatgatctttacacttgttttcgtgcgtacatatcataaatatggatccaaaaggttgattaagattcttgcttggctgatggctataattcagagtcttcttataattgcttctcgaaaacactacagcgtggatgttgttgttgcttggtatactgtcaatttggttgtattctttattgacaataagctaccaggggaatctgctaggagacaaagaatgcttggtttcctctgtatgatgactggcttctcaggtgcctctgcccctgcattttgtctgtccgccatggcaatatgttcacggatgaatgagacagagccaggtgccatagcaccagcattgctatggactgcaaaggaatcagagtctcaactctcaagtctcccagcgacttttctcaggctgccattacagttttgcacccttgtatcgaatctctag

SEQ ID NO: 3401 - DNA, 1719 bp, Oryza sativa
atgggcaacgcatgcggcggttcccttagatccaagtacctgagcttcaagcagaccgcgtcgcagcgccacgacaccgacgacaacaacaacgccgccgcggccgactcgccgaagaagccctcccgccctccagcagccgccaagacggacgaccacccagtctccgcgtcggcgccggccgccgccatgaggcgcggccaggcgcccgccgacctcggctcggtgctcggccaccccacccccaacctccgcgacctctacgccatgggcaggaagctcgggcaggggcagttcggcaccacctacctctgcaccgagctgtccactggggtggactacgcctgcaagtccatttccaagcgcaagctcatcaccaaggaggacatcgaagacgttcgccgcgagatccagatcatgcaccatctctcgggccacaagaacgtcgtcgccatcaagggcgcctacgaggaccagctatacgtgcacatcgtcatggagctctgcgccggcggcgagctcttcgatcgcatcatacagcgcggccactacagcgagcggaaggccgccgagctcacgcggatcatcgttggggtcgtcgaggcctgccactcgctcggggtcatgcaccgggacctcaagccagaaaacttcctgcttgccaacaaggacgatgacctctcgctcaaggccatagattttggtctctcagtcttcttcaagcccggtcaaacttttaccgatgttgtcggaagcccatattacgtagctccagaagtgttgttgaaacactatggaccagaagctgatgtatggactgcaggtgtcattctctacattttactaagtggtgtacccccattctgggcagagacacaacaaggaatatttgatgctgtactaaaaggtttcattgattttgattctgatccttggcctgtgatctctgagagcgcaaaggatcttataacaaaaatgctcaatcctcgcccaaaggaacgcttaacagcacatgaagttctatgccatccatggattcgtgatcacggagttgctccagatcggcctcttgatccagctgtcctatctcgcatcaagcagttctctgcaatgaataagttgaagaagatggctttgcgggtaatagctgagagtctctcagaggaggaaatcgctgggttgaaggaaatgtttcagactatggatgctgataacagtggtgcgatcacatatgatgagcttaaagaaggcttgagaaaatatggctcaacacttaaggacaccgagattcgtgatcttatggatgcagctgataacttcagcctcatgattgtctttctactgcaaacatttcaaaaacaggttaacatggcagatatagacaacagcggaacaattgattatatcgaattcattgctgcaacattgcatctcaataaactggagcgagaggaacatcttgtggcagctttttcatattttgacaaagatggaagtggttacatcacagtggatgaactgcagcaagcttgcaaagagcataacatgcccgatgcttttcttgatgatgtcatcaatgaagctgatcaggacaatgatgggcgcattgactatggagaatttgttgccatgatgaccaagggcaatatgggagtcggacgaagaacaatgagaaacagcttgaatatcagcatgagggacgcacctggtgcactctag

SEQ ID NO: 3402 - DNA, 1650 bp, Oryza sativa
atggctgccgctgctgcaaggaggggctcatcgctgctctctcgctgcctgctgtccaggcccgccgccgccgcctcgcctgctgtcccctctgcgctccgcagggcagatgggacacaaggattgttgccgggaatccttcagaggttcagcactgcagcagtagcagaggagcccatatcacccccagtccaagtgaactacactcagctcctcattgatggaaaattcgttgattcagcatctggcaaaactttcccaactctggaccctcgtaccggggagctgattgcccatgtggctgaaggcgatgcggaggatattaaccgtgcggttcatgcggcccgcaaggctttcgatgaagggccatggccaaagatgactgcctatgagagatcccggattctgttgcggtttgctgacttgattgagaagcacaacgatgaaattgctgcattggagacatgggacaacggcaagccgtatgcgcaagctgccaacattgaagtgccaatggtggcacggctgatgcggtactatgctggttgggctgacaagatccatgggcttgtcgtgccggctgacggcccacaccatgtacaggtgctgcacgagcccattggtgtcgcaggtcagatcatcccatggaactttccgcttctgatgtttgcgtggaaagttggccctgctttggcttgtggaaacactgttgtgctcaagacggctgagcaaactcctctgtctgctctatttgcttctaagctgttgcatgaggctggactcccagacggtgttgttaacgtggtatctggttttggacctactgctggtgctgctcttgctagtcacatggatgtcgataagattgcattcactggatcgaccgatactggaaaagtcgtccttgagttggctgcaaggagcaaccttaagtcagtgacactggagctaggaggcaagtctcctttcatcatcatggatgatgctgatgttgaccatgctgttgagcttgcgcattttgcactgttctttaaccagggacaatgttgctgtgctgggtctcgtacatttgtgcatgagcgtatctatgatgagttcgtggagaaggccaaggctcgtgctctcaagcgtgtggttggtgatccattcaagaatggtgttgaacagggccctcagattgatgacgagcaattcaacaagatcttgcgctacatcaagtatggtgttgacagtggagccaaccttgtgactggtggcgacagattaggtgacaaaggttactacatccagccaacaattttctcggatgtacaggataacatgaggattgctcaagaagagatatttggccctgtgcagtccattctgaagttcaatgatctgaacgaggtcatcaagagggcaaatgcaagccagtacgggctggctgctggggtcttcaccaacaacctgaacacggccaacaccctgacccgcgcgctcagggtcgggaccgtgtgggtgaactgcttcgacgtcttcgacgccgcgatcccgttcggcggatacaagcagagcggcatcgggagggagaagggcatcgacagcctgaagaactacctgcaggtcaaggccgtcgtcacgccgatcaagaacgccgcgtggttgtaa

SEQ ID NO: 3403 - DNA, 1605 bp, Oryza sativa
atgaaggcgggcgagcggccgaagctggtccggggcgtccggcaggagtcgcggcggttccggctgctggtcatcgtcgtcggcttcttcctcgtctccctcaccttcgtcttcgtttccaagcccgacgccatcctcttcagcttgaacggcaagcttccggtggaacaggcgccgacgtccatcctgatccagcagaaggtcaacgagccctccggcgagtcccggaaaacctccaccgacgctctccgtggtgaccccaaagtggtcgacgacgaagctgatgcgaaaccaaaaggcggtggaggagacggggagagtaaagggaatgacgaggagggcgaacacgcggagcagaagcataaagtcaccctcccaacagtttccaattacacaattcatgatgctgctgaggacactgaaaatgccaagcaagaaggtatgaataatgtccagcagggtagcaagcccttgtgtgatttctctaatttcagagcaaatgtctgcgagatgcgtggtgacgttagaattcatccaactgccacttcggtcttgttcatggagcctgaaggttcgcagagggatgaggtgtggaagattaagccgtaccctcggaaaggggatgaattctgcctcagccatatcactgaggtaaccgtgaaatcgagcaaagtggcgcctgaatgcaccaaataccacgatgtgcctgctgtgatcttctcactgaccggctacacggggaacctgttccatgatttcactgatgtgctcgtccctcttttcacgactgcaagcgagttcaatggagaagttcagttccttataacagacatggcactttggtggacgatcaagtaccagacagttctccagaagttatccaagtatcctgtgattgatttcagcaaggatgaccaagtgcactgcttcaagcatgccattgtcgggctgcatgcctatatggagttcacaatcgactcaaccaaggcaccgcacaactattcgatggctgatttcaacagattcatgcgtggagcttactcgctgggcagggacagtgtgaccgtgctcggtgagtaccccaagatcaagccaaggttgctcatcatcaagaggcaccgtacaagaatgtttctcaacctggatgagatcatttccatggcagaggagcttggctttgaggtggtgattgacgaggccaatgtgagctccgatatctcccggtttgcgcggctggttaactccgtcgacgtgatgatgggtgtccatggtgctgggctcacaaactgtgtgttcctgccacagcatgcgacgctcattcagatagtgccatggggtggcctggactggatatcacgcaccgatttcggcaaccctgcagagctgatgggtctgaggtacaagcaatacagcatcggcgtcgacgagagcagcttgacagatcagtaccctagagaccacgagattttcaagaatcctatctcattccaccagcgcggattcgatttcatcaggcagactttcatggacaaacagaatgtgaagctggactgcaagaggttcaggcctattcttctggaggcactggataatctaaacccgtag

SEQ ID NO: 3404 - DNA, 1134 bp, Oryza sativa
atgacggcgacaacaggattagcgagctccacaagcgaagagagtcaagaaactactatccctttgcgtggatcttttgcaggagatgttggaagaagaagaggaagtggttgcgccgacgacgaggttgtcgctgacatactgctgagcagaaaaccagcacccatcggcttagtacctgtctgctctgctgtctcagcctctcaggttgcaaaccccatatcccagagctcgacgccacccatgtggtttttcaacttcaaccgaaatggcccctctggcttctccggcgcctccaccgccgaggaggtcaccgccggcgtcgacgcccggggcttggccgccgtcgtcacaggcgcgtcgagcggcatcgggctggagacgacgcgcgtgttggcgctgcgcggcgtgcgcgtcgtcatggccgtgcgcaacgtcgccgccgggcacaaggcccgcgaggcgatccgggcggagatccacggcgccatagtccatgtgctggagatggacctcagctccatggattcggtgaggaggtttgcctccgagtttgactctctgaacctacctctcaacatactcatcaataacgctggaatcctgtccaaggactgcatacgctccattgacggcctagaattgcattttgcaactaatcacattggccattttcttctaacgaatcttttactggagaacatgaagagcacaagtaggacaactggtgtcgaaggaaggatcataaatgtgtcgtcttcggggcacattttgacctatcctgaagggatatgtttcgatagtgtaaaagatctttcgagacacaaggagggagatggtgtgaacatttcagcaaatgcgatccatcccggttttgttggaaccaacctattcaagaactggactatggctaatgctgtggtgaacaccattggaagaatcgtatgtaaaactgtagaacagggtgctgcaacgacatgttatgtggcattacatcctcaagttactggaataagtgggaagtacttcagcaactgcaatttagagaccccaagctcacaggcttcaaatgcagagttggccaagaaactatgggaatttagctccaacattgtgtcggctgccaaactgtag

SEQ ID NO: 3405 - DNA, 1269 bp, Oryza sativa
atggaccgcccgtccgsgccagcgccagcggtggcgctgctcctcgtcgtcgtcgtcgtcgcggcggcggtaatgctggcggcggtggagggagcsggggcggaagcaacaggggtgttccacgtgcgccgcagcctccccgccggtggtgcgggggcggcggcggaggcgtaccgagcgcacgacgggagccgcagggggaggctcctcgctgccgccgacatccccctcggcggcctcggcctccccaccgacaccgggctgtactacacggagatcgggatcgggacgccgaccaagcggtactacgtgcaggtggamaccggcagcgacatcctctgggtaaactgcatatcctgcgatcgatgcccacgcaagagcggcctcgggctagagctgacgctgtatgaccccaaggactcgtctactgggagcaaggtttcgtgcgatcaggggttctgcgccgccacctacgggggcttgctgcccgggtgcaccaccagcttgccctgtgagtacagcgtcacgtatggtgacggtagctccaccacagggtacttcgtgtccgacctcctgcagtttgatcaggtgtccggggatgggcagacacgacccgccaactccaccgtcacatttgggtgtggttctcagcaaggtggggatttaggcagttcaaaccaagcccttgatggaattatagggttcggtcaatcaaatacgtcaatgctatcacagttatctgctgcagggaaggtgaagaagatatttgctcattgtttggatactataaacggcggtggaattttcgctattggaaatgtggtgcaaccaaaagtcaaaacaacaccattggtgcccaatatgccacactacaatgtaaacctcaagtcaattgatgttggtggtactgcactaaagcttccgtcacatatgtttgatacaggcgaaaagaagggtaccataattgatagtggtacgaccttaacataccttccggagatagtttacaaggaaataatgcttgcggtatttgccaagcataaggatataaccttccataatgttcaagaattcctgtgtttccagtatgttgggagagtggatgatgactttccaaagatcactttccattttgagaatgatcttcctttgaatgtgtatccacacgattacttcttcgaaaatggggktaawtgtaacatctcactccmagtgatggtcactataattkggtatttctttgccaacttaagttgttacaacttatga

SEQ ID NO: 3406 - DNA, 710 bp, Oryza sativa
atgccggcattcttatcagacaccaccatccgccgtttcctaagggcaaggaactggagcacggaacaagcaaccaagtcgctcaaagaaactgtcaagtggaggcgtcagtacaggccagaaagcatttgctgggagtatgagggtaggagagcatatatagctgactaccttgatgccaaaggaagatctatactaatcacaaagccgacaattaaggggagagtttcagggaaggagcagataaaacactttgtatatctcctggagagtttggctatgaactctgcagatgaacaagaagaacatgttacttggctgatagacctcagaggctggagtatatcaagtacgccattatcgacatcccgtgaatccatgcacatagttcaaaactactatccagggattattgcagtagcaatactcagcaacactccaaggatttttgaatctttctggaagattataaagcacttcttggaagcaaagatgagcgagaaggtgaagtttctatatactaacaatccagagagccacaagatagtgtctgaaatgtttgacatggatctgctggagactgcatttgggggcagaaattcaattaccattgatatagacaattatgctgagagaatgaggagatcagatcttgcgagaggagttttaatcatccaaacggacataaatctgattagtcgacatcactg

SEQ ID NO: 3407 - DNA, 876 bp, Oryza sativa
atgaccttactgagtaatctatttacatttgctgcacatgacaaatttatacagagcttgaagttcgacgtgtatagccctgcgcaatcgactactagccggaaggtcccgtgcagtagcaacttgtgtgatctccaaaatgcctgccgttctaagagtaacagctgcccctacagtatccagtacttgtcggataacacctcatcctctggggtattagtggaggatgtcttgtacttgacatctgactccgcgcaatcgaaaatcgttacagctccgataatgttcggctgtggacaggttcagacaggatcgtttctaggcagtgctgcgccaaacggtctgcttgggcttgggatggacagcaaatcggttcctagcttgctagcaagcaaaggacttgctgctaattctttctccatgtgctttggcgatgacggtcatggtaggatcaattttggggacacaggaagctcggatcagaaggaaactccattgaatgtttataaacagaatccatattacaacataactatcacgggaattacggtgggaagtaaatcgatcagcacagagttcagtgctattgttgactctggcacgtctttcacggctctgtctgatccaatgtatactcaaatcactagcagttttgatgcacaaatccgttcgagccgaaacatgcttgactcttccatgccgtttgaattttgctactcagtaagtgccaacggaattgttcatccaaatgtaagtctgacagcaaaaggtggaagcatatttcctgttaacgatccaataattmccatamcggacaatgcttttaatccagtkgggwackgctkggctattatgaagrgkgrgggtgtwaactwa

SEQ ID NO: 3408 - DNA, 1452 bp, Oryza sativa
atggcgtaccagggcatcgaccttctctcgacgaaagccgcaggcgatgaccacggcgagaattcatcgtacttcgacgggtggaaggcctacgacacgaacccgttcgacctgcggcacaatcgcgggggtgtcatccagatgggtctcgccgagaaccagctttctctggacctgatcgaggaatggagcaagaaccaccccgaggcatccatttgcacaccggagggcgtctcgcagttcaagaggatcgccaatttccaggattaccacggcctcccggagttcagaaaggcgatggcccagtttatggggcaggtgaggggaggcaaggcaacgtttgaccccgaccgtgtcgtcatgagcggcggcgccaccggcgcccaggagacgctcgccttctgcctcgccaaccccggcgaggccttcctcgtgcccacgccatactacccagctttcgaccgcgactgttgctggaggtcaggaataaagctgctgccgatcgagtgccacagcttcaacgacttcaggctcaccaaggaggccctcgtgtcggcgtacgacggcgcacggaggcagggcatctccgtcaaggggatcctcatcaccaacccgtccaacccgctcggcaccatcaccgaccgcgacacgctggccatgctcgccaccttcgccaccgagcaccgcgtccacctcgtctgcgacgagatctacgcggggtcggtgttcgccacgccggagtacgtgagcatcgccgaggtcatcgagcgcgacgtgccgtggtgcaacagggacctgatccacgtcgtgtacagcctctccaaggacttcggcctccccggcttccgcgtcggcatcatctactcgtacaacgacgccgtcgtggcggccgcgcgcaggatgtccagcttcgggctcgtctcgtcgcagacgcagtacttcctcgccaggatgctctcggacgaggagttcatcggccgcttcctccaggagagcaagtgtcggctggtggcgcggcacgagcggttcacctctggcctccgcgaggtcgggatcggctgcctgcgcggcaacgccgggctgttctcgtggatggacctgcgccgcatgctccgggagaagacggccgaggcggagctggagctttggcgggtgatcgtacaccaggtgaagctgaacgtgtcgcccggcacgtcgttccactgccgcgagcccgggtggttccgcgtttgccacgccaacatggacgacgagaccatggaggtcgcgctcggccggatccacgacttcgtgcgccagcaccagcagcgcagggtcaaggccgagcgctgggccgccaataggcagctccgcctcagcctgccgcaccaccaccacctcagcccagcccatctctccagtccattggcgctcctgtcgccgcagtccccgatggttcgcgccaccagctga

SEQ ID NO: 3409 - DNA, 1785 bp, Oryza sativa
atgtctgttgaggcggtgaagcagattgtgcctgcacacctggttaaacctgctgttgatcctgttcatgcaaaggcgagcaaggccggaaaagatggcaggtcagaccttattgctaaggagattttagaggagcaaaagccggctcatcggcggcaagagtcttctgaatctatattggacaagggtccttctaacgttggttcagactctggtgtcttggatgtgccactaaccccaaaaggagactctggggagctgaaagaaatccaaggcttggattgcaacgggaatcaggagaagaagacggcgcaaaagagcagcactagcgagagctttgcttctgctaaagttagcgacgggacgaatggtctgaggaagacatgtggaagtggcaaggtcagtgatacagctgattctactgagagtgggaagagcagcatgtgccgtccgagcacgagcagcaacgtcagtgatgagagctcgtgcagcagcctgagcagcagcacaacgaagccgcacaaagggagtgattcaaggtgggaagcaatccggatgatcaggtccaaggatggtattctaggtttgagccattttagattgctcaagaaattgggctgtggtgatattggtagcgtctacctctctgaattgagtggtacaaggagttactttgcaatgaaggtcatggacaaggggtctctagcaagtcggaagaagctgcttcgagcgcaaacagagcgggagatcctgcaatctctggatcatccatttctgccaacactgtatacccacttcgagacagataagttctcatgcttggttatggagttctgcccaggaggggacctgcacactcttcgacaaaggcagcctggaaagcatttctcagagcaagcagcaaagttctatgtggcagaggttcttcttgcattagaatacctgcatatgcttgggattatataccgtgatctgaaaccagaaaatgtccttgtccgggaggatgggcacataatgctgtctgattttgatctctcccttcgttgtgctgtaagccctactgttgtcaagtccgcgaatcctggaccagatgcgttgcagaggaacaatcaagcttattgtgtccagcctgcctgtattcagccatcctgcatccagccatcatgtgtagctccaacaacctgctttggtccccgttttttctcctccaagtctaagtccaagtccaagaaggagaagaaatcaaagcctgaggttgtcaaccaaattagcccactgccggagctcatcgctgagccgactgatgctcggtccatgtcctttgttggcactcatgagtacttggcaccagaaatcatcaagggagaggktcacggcagtgctgtggattggtggacctttggcatattcctgtatgaactcttgttcggtaagacccctttcaagggatcaggaaaccgggctacactcttcaatgttgttggccagcccctgcggttcccggaatccccaatggtgagcttctcagccagggacctgataagaggattgctggtcaaggacccgcagcaccgtcttgcctacaagcgtggggcgacggagataaagcagcatccattctttgagggcgtgaattgggcgctcatacgatgtgcaagccctcctgagatacccaagccagttgagctcgagcgcccaccaaagccagcaccagctactgagaaggttgccccggctgccaaccagaagggctcagacaattatctagagttcgagttcttctag

SEQ ID NO: 3410 - DNA, 1455 bp, Oryza sativa
atggcgccgccggcggggacggaagcggctggcgctggccaccgcaagaactggcggggcgagtccgggaacctgtggcgcatcgccgggccggtgattctgacggagatcttccagttcctcatcgggttcgtcaccgcggccttcgtcggccacatcggcaaggtcgagctcgccgccgtctccgtcgtcaacggcgtcgtcgagggcctcgccttcggcctcctggtaaaaaatcacgccaggacgcttggcatggggagcgcgctggagacgctgtgcgggcaggcggtgggggccgggcagccgcggatgctgggcgtctacctgmagcggtcgtgggtmatctgcctcgccacgtcgctcgcgctgctcccgctctacctcctcgcgtccccggccctgcgcctgctccggcagtcggcggccatctcgtcggtggccggccggtacgcgcggtggtgcgcgccgcagctgttcgcgtacgccgtcaacttccccatgcagaagttctaccaggcgcagagccgggtgtgggccstgacggccatttccgccgccgcgytcgccgcgcacgcgctgctcaactggctcgtcgtcgccaggctcggccacggcgtcgtcggcgcggcgctcgtcggcgacgtgtcctggtggctgctcaacgcggcgcagttcgcgtacctcgtcggcgggtcgttcccggaggcctggagcggcttctcgcggaaagcattcaccagcctcggcggcttcgtcaagctctccctctcatccgccgttatgctgtgcttggagatgtggtattacacagcagtgctgattctggtgggttgcctgaagaacccagagattcaagttggtgcgatttcaatatgcatgaactatcagctctggacactgatggttgcagttggctttaacgctgcagtgagtgttcgcgtggcaaacgaactcggcgcgaaccacccgaaagcagccaaattctcggtcatcgtcgccgtggtcacgtcggccgccgtcgggctagttttcactctggtcgctctcgtggcgaggaagcagctgccgaggcttttcacggacgacgacgtgctcgtcagggagactgcaaaactgggctatcttcttgcagccaccatattcctcaacagcatccagccggtgctatcaggggtggcgattggggcagggtggcagtcatcggttgccttcgtaaacattggctgctactatctcgttggtctgcctattgcagccgtttttggcttcaggctgagccttaatgcaacagggatttgggtggggatgctgatcggaacaatcctgcagactgttattctgcttgtcatcctctacagaaccaaatggcagaaagaggccatgctagcagaggagcggataaaggtgtggggagggggtgttgagctgccaaccattcaagaagcaagttga

SEQ ID NO: 3411 - DNA, 1790 bp, Oryza sativa
atggctccggcggcggtggctgcggcggaggcggggtcgaaggcggcggcggtggcggggaaggccgtggcggcgtgcgagcgcgacgcggagaagctggagttcatcgaggagatgacgagggggttcgacgcggtgcaagagcgggtgctggcggcgatcctggcgcggaacaacggcgccgagtacctccgccgccacggcatggaagggcgcaccgaccgggaggcgttcaaggcgcgcgtccccgtcgtcacctacgaggacctccgcccggagatcgagcgcatcgccaacggcgaccgctccaacatcatctcctcccaccccatcaccgagttcctcaccagctcggggacttcggcgggggagaggaagctaatgccgacgatagaagatgagctggacaggaggcagatgctctacagcctcctcatgcccgtcatgaacttgtacgtgccagggctggacaagggcaaggggctctacttcctgttcatcaagtcggagacgaagacgcccggcgggctgccggcgaggccggtgctgaccagctactacaagagcgatcacttcaagcaccgccccttcgacccctacaacgtgtacacgagcccgacggcggccatcctgtgcaccgacgcgttccagtccatgtacgcgcagatgctgtgcggcctcgtggcgcgcgccgaggtgctccgcgtcggcgccgtcttcgcctcgggcctcctccgcgccatccgcttcctccagctccactggagggagctcgcccacgacatcaggaccgggacgctgagcgccaaggtgacggagccgtccatccgcgacgccgtggcggaggtgctcgcggcgcccgacgccgagctcgccgcgttcgtggaggccgagtgcgggaaggacaagtgggaggggatcatcaccaggatgtggcccaacaccaagtacctcgacgtgatcgtcacgggcgccatggcgcagtacatccccacgctcaagttctacagcggtgggctccccatggcgtgcaccatgtacgcgtcgtccgagtgctacttcggcctcaacctgcgccccatgtgcgacccgtcggaggtgtcgtacaccatcatgcccaacatgggctacttcgagcttatgccgcacgacccggacgcgccgccgctgccccgcgaagcgccgccgccgcggctcgtcgacctggccgacgccgaggtcgggaaggagtacgagctggtgaccgggttccacaacgcggcgccgcagttccggttcgtccgccgcaagaacgtgctcctcagcatcgactccgacaagacggacgaggcggagctgcaggccgcggtggagcgcgcgtccgcgctgctgtccccctacggcgccaagcatcgtggagtacacgagccaggcggacgcgaccaccatcccggggcactacgtggtgtactgggagctgatggtgcgggagggcggcgcgtggccgcgccggcggaggaggagggccgcggcgtgttcgaacggtgctgcctcgagatggaggaggcgctcaacgccgtgtacaggcagggacgcaacggcgaggccatcgggccgctcgagatccgggtggtgcgcgccggcacgttcgaggaggtgatggactacgccatctcccgcggcgcctccatcaaccagtacaaggcgccgcgctgcgtctccttcggccccatcatcgagctgctcaactcgcgcgtcatctccaagcacttcagcccggcttgccccaaatacagcccgcacaagaagtg

SEQ ID NO: 3412 - DNA, 830 bp, Oryza sativa
atggcgttccggctgagcaacagcctgctcgggatcctgaacgcggtgacgttcctcctgtcggtgcccgtgctgggcggcggcatctggctggcgacgcgcgccgacggcacggagtgcgagcgctacttctcggcgccggtgatcgcgttcggggtgttcctcctcctcgtctccctcgcgggcctcgtcggcgcctgctgccgcgtcaactgcctcctctggttctacctcgtcgccatgttcgtcctcatcgtcgtcctcttctgcttcaccgtcttcgccttcgtcgtcaccaacaagggcgccggcgaggccgtctccggcagagggtacaaggagtacaggctcggcgactactccaactggctgcagaagcggatggagaacagcaagaactggaacaggatcaggagctgcctccaggactccaaggtctgcaagaaactgcaggacaagaactgggatcggacccagttcttcaaagccgacctctccccgctcgagtccggatgctgcaagccacccagcagctgcaacttcctctacgtcagcggcacgaactggacgaaggtgcccaccaactcgtcggacccggactgcaacacgtgggtcgacgacggcacgcagctgtgctacaactgccagtcgtgcaaggccggcgcggtggcgaccctgaagcgggactggaagcgcgtcgccgtcgtctgcatcgtcttcctcgtcttcatcgtcatcgtctactccctcggctgctgcgcgttcaggaacaaccggagggacaaccgcggcgcctatcgcggtgccgcgtggaagggcggatacgcctg

SEQ ID NO: 3413 - DNA, 3312 bp, Oryza sativa
atgaccctgcctccctccgtctccggctccggcggcggcggcgacctcgaggcccacctcgacggcgacgtgggaaacggcaatgccagatcagactccgcggcggcggcggcggcgccggagctccggtaccgggggtggaaggcgatgccgttcgtgatcggcaacgagacgttcgagaagctgggcagcatcggcacggcggcgaacctcatggtgtacctcaccaccgtcttccacatgtccagcctcgacgccgccgtcgcgctcaacgtgttcgctggcaccaccaacctcgccaccgtcgtcggcgccttcgcctccgacctctacctcggccgctacgccaccgtcgccgccggctgcgtctccaccttcatcgggatggtcatcttgacgatgacggccggcgtgccggcgctgcacccgccgccgtgcggcgaggggaggtgtttgggcgcgacgagggggcagctcgcggtgctcgggctggcgttcgcgttcatcgtggccggcgccggcgggatccggccgtgcagcctgccgttcggcgccgaccagttcgacccgcgcacggagtccggccgccgcggcatcaacagcttcttcaactggtactacttcacgctcaccatcgccgtctgcgcctcgtcgacggcgatcgtctacgtgcagagcagcgtgagctggtgggtcgggctcgccatcccggcggcgctcatgctcgcctcctgcgccctcttcttcgccggcgcggggctctacgtccgcgtgcgccccgaggggagccccttcgccggcgtcgcgcgcgtcgccgtcgccgcgttccggaagcggtcggccgccgcgccctccgacgccgacgagtccctcttccggacgcgccacgccagcggcgtcgtgtcgaggctcccctacaccgaccagttcaggttcctcgacaaggccgccgtcgtggtcgacgccaagagcgaggtgggcggcgacgggcaccccaagaatccatggcggctgtgcagcctccagcaggtggaggaggccaagtgcatcctccgcgtcgtccccgtgtggctcacctgcatcgtctactacgtcgcgttcgcgcagacgaacacctacgtcatcctccaggcggcgcagtccgaccgccacctcggcggcggcggcggcgccgggagcttcgaggtgccaccgggctcgttcaccgtcttccccatgctggcgctcgccgtctggatcccgctctacgaccgcctcgtcgtgccatgggcgcgccgcctcacggggcgcsarggcggcatcacgccgctccagcggatgggcgtcggcatggcgctgtccgtcctcgccatgctcgtcgccgccatggccgagaagcggcggcgcgacctcgccgccggctcgccgtcgaacaccggccgggtgtcgcggcagtcggcgttctggctggtgccgcagctcgccgcgctggggctatcggaggcgttcaaccaggtgagccagacggagttctactacagggagttcccggagagcatgcggagcgtcgccgggtcggtgctgttcagcgggctggcgctgtcgagctacctgagcggggtgctggtcgccgccgtggagcgcgccacgaggggcgccagcgccggggacgacggcgggtggctcgccgaggacctgaacaaggggaggctggactggttctacctcctcatcgccgccattggggcggccaacttcttggcgttcgtcgcgtgcgccaagtggtacaggtacaagggctctgatgatgatgacgatgatgaccatgagcatgagcagaggaaattatgttttatggatagtacgccgcccacaggtcgaaaaagaaagcgtgcgtccggaaagcaagctattcttacaacaggtgtgagttcacactctactgggggcacaatacgtgaaaggcagcaacgttggagatccataataaaagcaaagaaagttgccattgcagatgagatttcctactacggacctcctgcccacgtgtgtcgatattgtggtgcccagttttggtatcaggagcgtgtgaagaggtcttattcaagtgaccagggtcatattcgctttcatctgtgttgtaggggtggtaaggtttgcttgccatatttgaaacatcctccaccttttttggctaaattgctagatccaaatggtgacattttatccaaatacttccttaagtctattagatcatacaattctatgttcgctttcacgtcattgggtgctaaaattgactatggtataaacaaaggcccggggccatacgtgttcaaaattaatggccaggttcatcataggattggatctttacttcctgaagaaggtgagtctctagggtatgcacaactttacatcgttgatactgagaatgaggtccataatcgcatatcaatttttgatagagatagggattgtgatgatgataatggagtcgacaaaaagatagttgaaggtttaataagaatgttcgacgaatcaaatgagttggtaagatcatttagggctgctagggatcttctacaagaagggcagagtgaacctttgcgtcttaggctattgcatgaccgctctagaactgcggcacagtatagtgcaccgactggatctgagatagctgctctagtgtatcctattcttttcccatatggtgagcaagggtttaagctaaaaattaaatacaaccgttctggggcattgcgggttggaaagagggacgaggttacaatgcttgaatattatgctttccggttgcagcagcgtagatgtgaggcaataacattgattagtggtggccggctgttccagcaatatatagttgactcttttgcatcagtggaggaaaatagacttaggtttgtcattagaaacaacaagaatttaaggtcagagatttacaaggggatccaagatgccttgcacaagggtgatgtcgatggaaacaatgttggtaagaaagttattttgcctgctagctttacaggaagtaaaagatatatggtacaaaattaccaagatgcaatggcaatttgtaggttttatgggccaccagaccttttcattacttttacttgtaatccaaagtggcaggaaatagctgatgctcttgcatttattttagggcaaaaaccagaagatagacctgatatagtaagtagagttttcaaattgaaggtggacgaacttgtttctgtgttgaagaagggtacttattttgggaaggcacgggcaggtatgattactattaatggtgttccagaatttttttag

SEQ ID NO: 3414 - DNA, 1632 bp, Oryza sativa
atggtggcggcggcggtggcggcggcggagcaggtggtggcggcgctgcgggaggagtgcgcgacgccggcggcgcggctggatggggtggcggcggcgatggccggcgagatggcggcggggttggcggaggagggcggcagcaagatcaagatgatcgtttcctacgtcgacaacctccccaatggctctctcctacttggaaatttcttagtaattgtgtggttcttggatgccatgaacactttaatatcagcagctacagatgattcggatactctgattgaaaataaaaattgcggaaaatatcttttgctattctcgttactaaaacaacagaatagtggaacagcaatgtgtgcggtactgtatttctgcataaaaaggaccgaagagggcttgttctacgcgctggatcttgggggaacaaacttccgagtcctgcgtgtgcagcttgctggaaaggagaaacgggtcgtgaagcgcgagtcgagggaggtctcgatccctccccatctcatgtccggcaactcctcggagctgtttggcttcatcgcttccgcgttagccaagttcgtcgctgatgaaggacataatgccgtgttcaacgacaggcaaagggaactggggttcaccttctctttccctgtgcggcaaacatcgattgcgtctgggactcttatcaagtggaccaaggcgttttctattgatgatgctgtaggtgaagatgtggtggccgaattgcagatggccatggagaagcaaggtctggacatgcgcgtttccgcattgatcaatgacactgttgggacattggcggcaggcagctactacgacgaagatattgtcgtcggtgtgatcttaggcactggctcaaacgccgcatatcttgagaaggcaaatgctatccctaagttggaaggcgagttaccaaaatcaggaaacatggttattaatacagaatggggtaacttctcctcatcctgtcttccaataacagaatatgatgaagcactagataaagagagcttaaaccctggagagcaggcaagtttctctagaagattgcatactcctcacatgtcaaaaatcttcgagaaattgatttcaggaatgtatctaggtgaaatcgtaaggagagtgcttcttaaaatatctttgcagtcttcaatttttggcaatctagatcagaccaagctcaaaacccgctttattctgaggactcctgatatttccgtgatgcatcatgatggaacacctgatctcagaattgtggctgaaaaacttgcagataacctgaagatcacagacacatccttagaaacaaggaagatggttgtcgaaatctgtgacatcgtcacccgaagatcagcccggctggctgctgctgggatcgtagggatcctcaggaagatcggcagaggcgtcccaggcgacaagcgaaagtcggtcatcgccatcgatggcggtctatatgaacattacaccgaattccggcagtgcctggagaccacgctgacggagttgctcggagaagaggcgtcgaagtcggtggctgtcaagcttgcaaacgacgggtctggccttggagctgccctgattgcagctgctcattctcagtacctgaattga

SEQ ID NO: 3415 - DNA, 1536 bp, Oryza sativa
atggcttccgccatggtgagggccatgtcgaccgcggctgccggcgcggcgccggtgtcactcgacaccatcaaccccaaggtgttgaagtgtgaatatgctgtccgtggagagattgttacacatgctcaggacttccttaggaacttggattatgacctacattttattctgcagaatttacaacaagaattacagaaaaacccagactcacttccttttgacgagatactttattgcaacattggaaatccccaatctcttggccagcagccagttacatttttcagagaggtcttgtcgttatgtgatcatccagctctgctggataaaagtgaaactcatgctctgtacagttcagatgctatagaaagagcatggcaaattctagacaagatcccaggaagagcaacaggagcctatagccatagtcagggtataaagggtttgcgtgatgaaattgctgctggaattgctgcccgtgatggttttcatgctagtggagataacatattcctaacagatggagcaagcccagcagtgcacatgatgatgcaattattgataagatctgagaatgatggcattctctgccctattccgcaatacccgctctactccgcgtcaattgctctccatggtggttctcttgttccttatttccttgatgaagagacaggttggggactggaggttgatgagcttaagaaacaattggaggaggctcagtctaagggtatcactgttagagcacttgttgttataaatccagggaacccaactgggcaggttcttgctgaggaaaatcaaaagaaaattgtcgaattctgcaaaaatgaaggacttgttcttcttgcagatgaggtgtaccaagaaaacatatatgtagaagacaagaaattccattctttcaaaaagatcgcacgatcaatgggatacacagatgatgatcttcctttagtatcattccaatcagtttcgaaaggttactacggagaatgtggaaaacgaggaggctatatggaagtaactggatttagcgctgatgtaagggaacaaatttacaaggtggcatcagtaaacctgtgttccaacgtgtctggccaaatactcgctagcctcataatgaacccaccgaaggctggggatgaatcctatgaatccttcatggtagagaaagacgggatcctctcctctctggctcgacgtgcaaaggctttggaagaagccttcaacagcttagaaggcataacatgcaacaaggccgagggtgcgatgtatctcttccctcgcatctatttgccccagaaggcaattggagctgcccaagcagctggtactgccccagatgcgtattatgcccgccgccttcttgaagctactggaattgttgttgttcctggttctggatttgggcaggttcctggaacgtggcattttagatgcacaattttgccacaggaggacaaaataccagcgatcatatccaagttcaaggagttccacgagaagttcatggatgaattccgggattaa

SEQ ID NO: 3416 - DNA, 2163 bp, Oryza sativa
atggctccgccgccgccgcggccgcaccgctccgcctatcagcccttgcgctcgtcttccctggcgcgccaccctggcggcgacggtgggctcgaggtggtcccgggccccttcgcgctccccgccgccatccgcgtccctgcgcgcaactcgccgccgccgcccgacgcccagctcaggaacgaggtggtggtggtggcacagcagaacaattccttcaaattcagtggtagcaagtactataaggtggcttctggtgttggtattttgcaacaggatgatcttttctcccgctctgcttgtgctttccaagtgcttgaatatattcttaccgtgccatggcaaaagaattattctgtagaatgtcaattgtggtgggctatggctattctgaccatgcaatttcacaggataggttttagctgttgcttgcttcacgaagttcaaaactctaatcgtgtacttcctttctctaatgatccttcatgtggggctcatttgttattgagcaagggggttaggacctgggaacttaggagcttcatgaaagatgagatatttgttcatgataggtctaatgactctaacatggaggctagagatgatatgaaccaatggaattgtgcaatgagaacatcggacatggagttctttacggaatacggggaggcaagccaatatcagattcaagaggtcgttggcaagggaagctatggagtagttgctgctgcagtagatactcacactggggagagagttgcaatcaagaagatcaatgatgtttttgagcatgtttcagatgccatccgcattctgcgggaaatcaaagttcttcggcttctccgccacccagacattgttgtgatcaagcacatcatgctccctcctacccgaagggagttcagggatatttatgttgtttttgaactcatggagtcagatctacatcaagttatcgaagcaaatcatgaccttagcccagagcatcaccgttttttcttgtaccaacttctttgtgctctcaagtacatacattcagctaatgtatttcatcgtgacttaaagccaaagaacatactggccaattcagactgcaaactgaagatttgtgattttggacttgcacgtgtagcatttaatgattcaccttcaacaattttttggaccgattatgtggcaacaaggtggtaccgagctcctgaattatgtggttcttttttctccaaatacacccctgcaattgatatttggagtatagggtgcatttttgctgaaattctcaccggaagaccattatttcctgggaggaatgttgtgcaccagttagatctaataacagatctacttggaactccatcatctgaaactttatcacggattcgtaatgagaatgccaggggatatttaactggcatgcagaggaaacatcctatccccttttctcataagtttcataatgctgatcctctcgctttgcgcctgctagagcgtttacttgcatttgatcctaaagatcgacctactgctgaagaggctttagctgatccatattttagaggaatttctaagttgagccgggagccttcaagactgccagtttcaaaatttgagtttgaatttgagcgaaggaaactgacaaaggatgatgtaagagaaatgatatatcgagagatattagagtaccatccccaaatgcttcaggagtacatcagaggtggagaacaaattagcttcctctatccaagtggggttgatcgtttcaaacggcagtttgctcatcttgaggagaactacagcagaggagaaagaagtacccccttgcggagacagcatgcgtctttgccaagggaaagagtatgctcatcagtagatagcaataatcaagactctgacaatgaagagaggagagcgatatcttctattgcccgaactatgataagtcccccaagatcacaagaaaagggcaagaatcgtgcatctgcttatccaaatggcataatcaatctaaactccaatcctaagatctatttaaagagtgctagtatcagtgcttcaacgtgcatcattagagggaataaaggcccgaaggagaatggtatctctgaggacatggaagaggttgtctatgagttgtcagataatgtgaccaggatgctctcctag

SEQ ID NO: 3417 - DNA, 1250 bp, Oryza sativa
atggcccacgagggcgacgtcgaggggatccaggagctcctcgacgccggcgccgaccccaacttccgcgactccgacggccgcacggcgatgcacatcgccgcctgcgaggggcaagccgaggtcgtcgagctgctcctccagcgtggggcggatgccgtcgccgaggaccagtggggcagcacgcctttggcagacgcattgcattaccagaaccatgatgtgatcaagatcttggaaaagcatggctccaagcttaagattgctcctatgcatgttaaaaatgtccgtgaggttcctgagtacgagatttccccgaacgagctagatttcactaatggaaatggtatatcaaagggtacatttaggaaagcaacatggaggggcattctggttgctgttaagaagcttgatgacgatctaattatggacgagaacaaagtacaagcattcagagatgagcttgatgtgctacaactaatacggcatccgaatgtcgtgcaatttttaggtgctgtaacacaaagcagcccaatgatgattgtaatggaatttatgcccaagggtgatttgcgcaagcacttgagtaggaaaggggctctggaaccgtcatatgcagtgaaattagctcttgatattgcaagagggatgaattatttacatgagcataaacctcaagctatcatccaccgtgaccttgagccttcaaacatattgagggatgacactggacatctgaaggtggcagatttcgatctgtgtaagatgctaaaatggagaagaaaagttagagaagagaaagctgtaacttctccaggcaatgcatgtaggtatgtagctccagaagtcctgcgaaatgaagaatatgatactaaagtggatgtcttctcatttgctttgatacttcaagagatgattgaaggatgtctccctttttatgacaagaaaaataatgaaattgagaaggcacataattctaaagaaaggccacctttcagagctcctccaaagcattatgcttacggattgagagagctgattgaacaatgctggagtgaaaatcctgctagcaggcctgactttagaacgatcattgaacaattgtcttatatccagaatgaaatatctcagagaaaccgttggaaggtgaaacctctcaaatgcttcctgagctttgagggcatgtggaagaaagatcgaaatgagggcagcaccactcgttcatcacgttcatcgagatcctattttta

SEQ ID NO: 3418 - DNA, 1092 bp, Oryza sativa
atggagcgggtgtcgtgcgtgccgctgcttcggcggctgcttctcttggccgcggccgggctcgcgggcgccgagccgcaggtgccgtgctacttcgtgttcggggactcgctcgtggacaacgggaacaacaacaacatcgcgtcgatggcgcgggccaactacccgccctacggcgtcgacttccccggcggcgcgaccggccggttcagcaacggcctcaccacggccgatgccatctctcggcttctgggcttcgacgactacatccccccgtacgccggcgcaacaagtgagcagctcctcaccggcgtcaacttcgcctctgctgcggccggaatccgggacgacactggacagcaactgggtgaacggatcagcttcagcgcgcagctgcagaactaccaggcggccgtgcggcagctggttagcatcctgggcggcgaggacgccgcggcgaaccgcctgagccagtgcatcttcaccgtcggaatgggcagcaacgactacctcaacaactacttcatgccggcgttctaccccaccagccggcagtacacaccggagcagtacgccgacgtgctcatcaaccagtacgcgcagcagctcaggacgctgtacaactacggggccaggaaggtggcggtattcggggtagggcaggtggggtgcagcccgaacgagctggcgcagaacagccgaaacggcgtcacctgcatcgagcggatcaacagcgcagtccggatgttcaaccggagggtggtcgtcctcgtcaaccagttcaaccgcttgttgcccggcgcgctgttcacctacatcaactgctacggcatcttcgagagcatcatgcgcacgccggtggagcacgggctggcggtgacgaacagggggtgctgcggggtggggaggaacaacgggcaggtgacgtgcctcccgtaccaggcgccgtgcgcmaaccgggacgagtacctcttctgggacgcgttccacccgacggaggctgccaatatcttcgtcggccggagggcctacagcgcggcgatgcggtccgacgtttacccggtggacctgagcacgctcgctcagctctag

SEQ ID NO: 3419 - DNA, 636 bp, Oryza sativa
atgaggcagcagcagcagcagcagcaggagagcaggttcaagaggacctgcgtgttctgcggcagtagccagggcaacaagaccacctaccgcgatgccgccgtcgacctcgccaaagagctggtcgcgaggggcattgaccttgtgtacggcggcggcagcattggcctcatgggcctcgtctcccaggccgtctacgacggtggcagacatgtcattggggtcatccccaagactctcatgacccccgagataatcggagagacagtaggggaggtgaggccagtgtccgacatgcaccagaggaaggctgagatggcgaggcagtctgatgcattcatagccctgcccggaggatacggaacactggaagagctgcttgaagtcatcacatgggcgcaattaggcatccatcataaaccggttgggctgctgaacgttgatgggtactacaactccctgctcacattcatcgaccaagccgtggaagaaggcttcatcagccccagtgctcgccgcatcatcgtgtcggctccaacggcacaagaactcatggacaagcttgaggaatacgtcccttaccatgatagggttgcgtctgggctgaactgggagactggtcatctagggttctaa

SEQ ID NO: 3420 - DNA, 1182 bp, Oryza sativa
atggtccaccacctccggaggcatatgatttctctcctcctccggccagcgtatcctcatcccaccgccgcaatctctcccctctcctccctccgccgcctcctcctcttctccaccaccgccgcgcccgtctcccccgaacccttcgccgtcgaggactacctcgtcgccacctggggcctcaccggagcccaagcgcgcaaggcctcgaagaagctctcccacctcaggtccccctccaagcccgacgccgtcctcgccttcctctccgacctcggcctcccgccccgcaagatcgccgccgtcgccaccgcagacccgcgcttcctctgcgccgacgtggagagcaacctcgccaggcgcgtcgacgagctcggcggcctgggactctcccgctcccagatcgcgcgcctcgtcccgctcgccctcacctgcttccggtccagctccgtcggcacgaatctagggttctggctccagatcgtgggctcgttcgacaagatcctcaaggccctcaggatgaactcctcgctactcggctccgacctcgagaaggtggtgaagccgaacctggaattgctaaagcaatgtgggatgagtgattttgccactagtttccccttgtacaccagcaggctcttcaccgcgaaccctatctatctccgggacgccgtggcacgggtggaggagttaggcctggaccgcagctcgaggatgttccggcatgggctcatcgcggtggctttcacgagcaaggagtccgttgcgaggaagatacaggtgatggaggagcttgggttttcgcgggatgaattgttgatgatcatcaggaaggcaccgcagttggtggcctcatcggaggaaaagatacggcaagccgctgaattcttgaagagggatgttggtttggagggacggtacattgcgcataggccagtgttgtttttgtacagccttgagcggcgattgttgcctcggcatcacttgctcaaggttctcaggatgaagggattgctggattgtgagttggattactacaacacagccgcgatgagtgagaggaagtttgtgcggaagtttgtggatccttacaagtgccacattccaggcctcgctgatgcttatacgtccagttgtgccggggaaacagcaaatggagttgcttcactgcttggtgtgtag

SEQ ID NO: 3421 - DNA, 2256 bp, Oryza sativa
atgatccgcctccgggagcgcatcctatctctgctcctccagccagcatcccctcgcccaatcgccggaattttcccgccgccttgccccctccgccgcctcctctccaccaccgcgccagtttcccccaaacccttcgccgtcgacgagtacctcgtcgccacctgcggcctcacccgagcccaggcagccaaggcttcggagaagctctccaacctcaggtccccctccaatcccgacgccgtcctcgccttcctctccgacctcggcctctcgcgccccgacggcatcgccgccgccgtcgccgccgacccaaggctgctgtgcgccgacgtggggagcagcctcgccaggcgcgtcgacgagctcggcggcctgggcctctcccgctcccagatcgcgcgcctcctcccgctcgccggcaggtgcttccggagcagctccctcgccacaaggctcgccttctggcacccggtgttcggctcgttcgagaatatcctcaaggcgctcaagatgaacgccgccctcctcggctccgacctcgacaaggtggcgaagccgaacctggccttcctcgcgcaatgcgggataaacgcctccgatgtcactcgcacaaccttgtccctgtactcctgccggctcttcaccgtgaaccctaggttcctccaggacgctgtggcaagagtggaggagttaggcgtggcccgtggttggaggacgttccaccgcgtgctcagtacagtggctttcttaagcagggagactattgccagtaaaatgcagctgctggatgatcttgggttttcgcaggatgatttcctggtaatcgtaaggagggcgccacaagtgctgcgtttatccgatggaaggatacggcgatctgttgagttcttgataagggatgtcggtctggagcaaagctacatcgcacaaaggccaacgttgttggcgtatagccttgagcggcggttgttgcctcggcattgcttgctcaaggtcctcaaggcaaagggattgctgaactgtgacttgtcttactactgcatagccgcgatgagcgaggagaagtttgtgcaaagccagcatccctcgcccatcgccggcatttttctgcctccttgctccctccgccggctcctctccaccaccgcgcccgtctcccccaaacccttcgccgtcgaggactacctcgtcgccggctgcggcctcacccgagccgaagcagccaaggcttcggcgaagatctcccacctcagctccccctccaatcccgacgccgtcatcgccttcctctccgacctcggcctcccccgcccccaaatcgccgccgccatcgccgccgacccgaggttgctgtgcgcggacgtggagaaaaatctcgccaaacgcgtcggcgagctcggcgacctgggcttctcccgctcccagatcgcgcgcctcctcccgctcgccggctggtgcttccgcagcagctccctcgccaccaacctcgccttctggctcccggtcttcggctcgttcgataagatcctcaaggctctcaggatgaacaaaaacctcctcagccccggcgtccagaagtcggcgaagccgatcctggccttcctcgagcaatgcgggatcaatgcctctgatgttgcccgtagttcaaccatgtactccagccggctgctcaccgcgaatcccgagtacctccgagacgccgtggcacgggtggaggagttgggcctggaccgcagttcgaggaggttccaccgtgggctcgttgcggtggctttggtaagcaaggagactgctgcgaggaagatacgattgatggaggagcttgggttttcgcaggatgatctgttggtgatcatgaggaagttgccaaactttttggctttatccgagaaaaagatacggcgagctgtggagttcttgaagagggatgttggtttggagggacggtacattgtgcaaaggccagtgttgttgtcgtatagccttgaacggcggctgttgcctcggcattgcttgctcaaggtcctcaggacaaagggattgctgaatagtgagttggattactactccacagctgcattgagcgagaagaagtttgtcaacaagtttgtgcatccttatgaggaccacattgcaggccttgctgatgcttatgcctccggttgttctgaggaaggaaatggagttgcttcattgcttagcctgcagactgaaatggatggtgttcaagtttatgctgggaaatctggctag

SEQ ID NO: 3422 - DNA, 3500 bp, Oryza sativa
atggccgccgttcgcgtggtggcgccggcgccttcggtgctgctgcttgtggcggcggcggtggtgctgcttcacctggctcgcgccattgccggcgcggcggacgaggccgcggcgctgctcgcgttcaaggacgcgtccgtggccgccgacccgggcggcgcgctcgcgggctgggccaactccaccacccccggctcgccgtgcgcgtgggccggcgtctcgtgcgccgccggccgcgtccgggcgctcgacctcagcggcatgtcgctctccggccgcctycgcctcgaagccctcctcgcgctctcggcgctccggsgcctcggacctccgcgggcaasgctttccagggcgaccttytsgcgccaagggctcgccgcggcgggcggcgccgtgcgcgctcgtggaggtggacatttcgtcgaacaccttcaatgggacgcttccccgggcgttcttggcgtcctgcggcggcctccagaccctcaacctgtccaggaactccctcaccggctcgacatgtcgcggaaccagttgtcggatgccggcttgctgaactactccctgaccggctgccatggcattcagtacctcaacctctcggccaaccagttcaccggaagcctcccggggcttgcaccttgcactgaagtttctgttcttgatttgtcatggaacctcatgtccggtgtactacctccaaggtttgtggccatggctccagccaatttgacatacttgagcattgccggtaacaacttctccatggacatctcagactatgaatttggtgggtgtgcaaatctcacattgcttgattggtcatacaacagactacgtagcacagggttgccgcggagtcttgtcgattgccgtcgattggaggcacttgacatgtctgggaacaagcttctgtctggtccaataccgacgttcttggttgaattgcaagcactgaggcgactctcactagcgggcaaccgattcactggagaaatatcggataagctgagcatcttgtgcaaaacgctggttgagctagacttgtcaagcaaccagctgattggcagcttgcctgcaagttttggacaatgtaggtttcttcaggtgcttgatcttggcaacaaccagctctctggggacttcgtcgaaactgtcatcaccaacatttcttctcttcgtgtgttgcggctgccgttcaacaatattacaggggcaaatccactgcctgcacttgcttccaggtgccctctgcttgaagtcattgatcttggatccaatgagtttgatggcgaaatcatgccggatctgtgctcatcattgccgtcacttcggaaacttctcctgccaaacaattacattaatggaacagtgccatcatcactgagcaattgtgtcaaccttgagtctattgaccttagcttcaacctgctggttggtcagattccaccagaaatattgtttcttctgaagcttgttgatttggtcttatgggcaaacaatctctccggtgagataccagacaagttctgcttcaatagcacggcattggagacattggtgataagctacaacagcttcactggaaacatccctgagtccattaccaggtgtgtgaatctcatttggttatcacttgccggcaacaacctgactgggagtattccctcaggattcggcaacctccagaatcttgccattttgcagcttaacaagaattcactctctggcaaggttccagcagagcttggcagctgcagcaacctcatctggcttgacctcaacagcaatgagttaaccggcacaataccgccacagctagcagcacaggcggggctcatcaccggagcaattgtctctggcaagcagtttgctttcctccgtaatgaggctggcaacatctgccctggtgctggtgttctgtttgaattcctagacattcggccagaccgccttgccaatttcccggctgtgcacttgtgctcctccacaaggatatacactggcacaactgtatacactttcagaaacaatgggagcatgatcttccttgatctttcatataacagcttgaccgatgcattcactgggctcaaggggattggtgcacttgatctctcacacaaccacctcaccggtgtcatccctccggggtttgggtgtctgcatttccttgcagattttgatgtctccaacaacaacctcactggtgaaatcccaacatcagggcagctcatcacatttccagcatcccggtatgagaacaactctggactctgtggtggcgcaggtggtctgccccaaacttcttatgggcataggaattttgctcgacaaagcgtgttccttgcagtgacactctcagtgctcatactgttctccttgctgattattcattacaagctatggaagttccacaaaaacaaaacaaaagagatacaagctggttgctctgagagcctcccaggatccagcaaatcaagctggaagctttcaggtatcggtgagccattgagcatcaatatggccatatttgagaatccattgaggaagctcaccttctctgacctacatcaggccaccaatggcttttgtgcggagacactcattgggtcaggagggtttggtgaggtttacaaggccaaactcaaggatggtaacattgtggctgtcaagaagctgatgcatttcacaggccagggtgaccgggagttcaccgcagagatggagaccattggcaagatcaagcatcgcaaccttgttccattgctaggttactgcaagattggtgatgagcggctccttgtttacgagtatatgaagaatggcagcttagatttcgtcctacatgacaagggtgaggctaatatggatctcaattgggcaacaaggaaaaagatcgcaataggctcggccagggggctagcattcctccaccacagctgtgttccacatatcatacaccgggacatgaagtccagcaatgtgttgcttgatggaaactttgatgcctatgtgtcagactttgggatggcgagactcatgaatgcgctcgattcacatctcactgtgagcatgctttcaggaacacctggatatgtgccacctgagtactgccaggatttccggtgcacaaccaagggcgatgtgtacagctatggagttgtgctcttggagctcctcacagggaagaaaccgattgacccaactgaatttggtgacagtaatcttgttggctgggtgaagcagatggtggaggacagatgcagtgaaatatatgatcctacattgatggccacgacatctagtgaattggagctctatcagtatctgaagattgcttgccgctgcttggatgaccagcctaaccgcaggcctaccatgatccaggtcatgacaatgttcaaagaatttcaggttgactcgggcagcaatttcctcgatgacttctcactcaattcaacaaacatggaggaatcatctgaaaaatcagtgta

SEQ ID NO: 3423 - DNA, 897 bp, Oryza sativa
atggcagaagctgcaatcacaaggtactggtgccatgaatgcgagcaggccattgaggaggccatggtggatgagatcaagtgcccatcctgtggtggcgggttcgttgaagagatgaccgatgaggagattgagagactgaccaacaggcagccagagccgggtttctcgcaatggaaccctattgagcatccaggagaaacgatggacagcgacgatgaagataatgatttaggtcgtgagtttgagggttttatcaggaggcatcgacgggcatcaactctacgacgcgtgcttgacagcatccatgatgaccttgcagatgaccaagaaagggacagttccattctgatcaacgccttcaaccaagccctcgctctgcaaggctcagtgcttgatcctgatgagggccaaggtgaccaaggcggttcaacaaatgatgatggcttactggaggagtatgtcctcggagcaggtctgagcctgctgcttcaacatttggctgagagcgacccaagtcggaatggtacccctcctgcaaagaaagaggcggttgaagcgctgcccactgtgaaaatcgaagaggttgtcagctgttcagtctgccttgatgatcttgaggtgggttcctgcccggtttgccggtttgagctgccttctgaggagacaaaagacttgaacgagcctagcaacattggtagagtggaggacagccatgaggaagtcagagctgatggccctggaaacgtcagcgagagcagtaacagaccctgggctattgttccttggttgaatgagctattctcaactcgtgaggcacagaatgctggaggtgtttctacggatcaacaatcaccgcacacttctggaaccaacccaaatgcagggcacagttga

SEQ ID NO: 3424 - DNA, 1488 bp, Oryza sativa
atgggagggggccagtcgaggagcccgcgggacgggagcggccacgggaggtacggccamtcgccgtcgttccagcagcagtggggcggtggcggtggcggcggcggcrgcggcggcggtgggtatccctatgggcaggatgcgcatggaggaggctactacggcgcgccggcgccgcaagggggatacgcggcgccgtacccggcttatcagcagccgccgcmgccgatgccgtccccagcggcgacgcagccgccggcccgggcggggggcgcgtccaagccgcgcctcgaccgccgctactcgcggatcgccgacgactaccactccgtggatcaggttactgatgcactagctcaagcaggacttgagtcttcgaatcttattgttggcattgatttcacaaagagcaatgaatggttaggaaaattttccttccatggacgcagtttacatcacattagcaatgcacctaatccgtatgaacaagcaatctcgatcattggacagacactgtcgaaatttgatgaagataacttgattccctgttttggatttggagatgcaacaacacatgaccaagacgtcttctgtttttatcctgatttgagaccttgcaatggattctcagaagctctaagccggtacagggaacttgttccacacttgcgcttagctggaccaacatcctttgcaccaatcattgagatggcaatgaccatcgtggaacaaagtggcgggcagtaccatgttctgttgataattgctgatgggcaggttacaaggagtgtagacactgcatctgggcagctgagttcacaagagcaaaagactgttgatgctattgtgagagctagtgaattgccgttgtctattgtgctagtaggagttggtgatggcccttgggacatgatgaaagagtttgacgacaacattccttctcgtgcttttgacaattttcaatttgtgaatttttcggagatcatgaacaaaaacatgccccaatcaaggaaagaggcagcatttgcactttcagccttgatggagatacctcagcaatacaaagcaactgttgaattaggaattttaggtcgtcgctctttcaagtcgcctgaaagggttcctctccctccccctggtggaagccatgatgcttactcgtatggatcaaaaagctttagtaaaccaagtacctacccacagagtagtacatcatcatcgtcatatcctcactatgaaactgcacagagttcgagccctgctgtaccttcttctacttatgacaatcaggtttgcccaatctgccttgtgaaccccaaagacatggcgtttggctgcggacaccagtgcaatccatgcaaagcctttgaacggcttgcagacaagcccgttaagtactgggtttgcatcgacaaggatcgcaaggccagcaatccactgctccaagattgtggagcaggggatgtctcaagtattgaaacccactag

SEQ ID NO: 3425 - DNA, 1089 bp, Oryza sativa
atgcagcgctcaccggtggacaaaccgccgttcacgctgggggacataaagaaggccatcccgccgcactgcttccaccgctccgtgatcaagtcattctcctacctgctccacgaccttgccatcgccgctggcctcctctactttgctctggtcggcatccctgccctcccaagcatcctccgcctcgtcgcctggccgctctactgggccgcgcagggcagtgtactcaccggcgtgtgggtcatcgggcacgagtgtggccaccacgccttctcggactacttgctcctcgacaacctcgtgggcctagtgctccactcggcgcttctcacgcccttcttctcgtggaagtacagccaccggcggcaccacgccaacaccggctccatggagaaagacgaggtgtacgtcgcgaagaagaagtccgcgctgccgtggtacaccccgtacgtgttcggcaaccccgtcgggcggctggtgtacatcgccctgcagctcaccctcgcgtggccactctacctcgcgttcaacctgtccgggcagccgtacccacgcctcgtcacctgccactacgacccctacagcccgctgttcagcgaccaggagcgcgtccaagtcctcgtctccgacgccgccatcctggccgtgctgctcgcgctgcacaggctgacggcggcgtacgggctctggtgggtggtgcgcgtgtacggcgtgccggtgatgatcgtgggcgcgctgttcgtgctcatcacgtacctgcaccacacccaccgggcgctcccgcactacgactccagcgagtgggagtggctgcgtggctcgctcgccaccgtcgaccgcgactacggcgtcctcaaccgcgtgctgcacaacgtcacggacacgcacgtcctccaccacctcttccccagcatgccacactaccacgccatggaggccaccagggcagcgaggcccgtcctcggtgagtactacaagtttgaccgcacgcccatcatcgaggcaacatggcgtgaggccaaggagtgcatgtacgttgagcccagggagcgcgatggtatctactggtacaacaacaagttttag

SEQ ID NO: 3426 - DNA, 1527 bp, Oryza sativa
atggatgagctcttgtacagagctctcctcctctccgtgctcgccgtcgcgctgctccagatcatcaaggcgttcctcatcatcatcagggcaaagccggcggcgccgcccctgccgccggggccatggaggctgccggtgatcggcagcatgcaccacctcgccgggaagctgccgcaccgcgcgctcagggacctcgccgcggcamacggcccgctgatgatgctccggctcggcgagacgccgctggtggtggcgtcgtcgagggagatggcgcgggaggtgctcaggacgcacgacgccaacttcgccacccgccccaggctgctcgccggcgaggtcgtgctctacggcggcgccgacatcctcttctcgccgtccggcgagtactggcgcaggctccggcagctctgcgccgccgaggtgctggggccgaagcgtgtcctctccttccgtcacatcagggaacaagagatggagagtcaagtggaagagatccgtgcagcaggaccatcgacgccagtggacctcaccgcaatgttctccttcctggtgatcagcaacgtctcccgtgcatcctttgggagcaagcatagaaatgccaagaagttcctttcagctgtgaagaccggggtcactctggctagcggtttcaagatccccgacctcttcccgacatggcgaaaagtgctcgccgcggtgactggcatgcggcgtgccctagaggacatccacagggttgtggattccaccttggaagaggtcatagaggagagaagaagcgcaagagaagacaaggccaggtgcggcatggtgggcaccgaggaaaacctcgtcgacgtgctcatcggcttgcatgagcaaggtggttgcctgagtagaaatagtatcaagtcagtgatattcgatatgttcacggctggaacaggcacattgtcatcaacattgggttggggtatgtcagaactgatgcggagcccgatggtgatgagcaaattacagggtgagatccgagaagcgttctatggaaaggcaacggtgggagaggaggacattcaggcgagtcgcctcacctacctaggattgttcatcaaggagactcttcgcttgcacccgccggttcctctcctagtgccccgagagagcattgacacgtgtgagatcaaaggctacatgatcccagcgaggtcccgcatcattgtaaatgcatgggctatcgggagggatccacgatactgggacgatgctgaggagttcaaacctaagcgcttcgagaaaaacatggtcgactttacagggagttgctacgagtacttgccttttggtgcaggaagaaggatgtgccctggcgtagcctacgggatccccattttggagatggcgcttgtgcagctcctctatcacttcgattggtcgctgccgaagggtgtcgtagatgtggacatggaggagtcatctggcctcggtgcacgacgcaagacgcctttgttactctgtgcgacgccatttgttgttccagtattatga

SEQ ID NO: 3427 - DNA, 1815 bp, Oryza sativa
atggatgatgatgactactcctgggtgcggcgcaccaagttctcgcactccattgttaaatccaactctggcagggagcagtttggtgcattccttgatccgtttgacagttccactgcatggaggcagaaaggattcagtggagagctcatgattcatggacataatttacagccgagggcaaaaggagcagtctcaaagtcacctaggccttcaatcccgttggcgaaatcaccagtttcacaggcagagcggaagctgaaagctaagttttcagatggtgaattgaaacaacgggggaaaattagtgatggctcgttgcgagaagcatcgaaagagaaggatcgcaaggttgggcataaaggagaaggccttagcctggatatttcttgtccaattctggatcggacagttcaggatgacagttcagacacgcttgacttctctttccactcagaagagcaaagtttaaggttgctgagagtatgctcgagtccagctcctttctattcgaaggatacaactacgtttggtgattccaaaatacatagtacgtctgttaagattgttggagagggatcgaagccgaggaggagagcgaaatccccaatgccgacccgtgtcatctctgaagtttttaaggaggccaaagctgccactaagaggttctctagcccacagcggcaaaggaaatctagttctccacattcaccacgttcacccgatgatagtccccggtttggctttccttcaatgagaacaccgggtaacttgaaagctaggagggcctcgtcctggccaaggaactatgacaatggagtggccaaggctgttgcattggatatacttgagagatggacaattgaccgctcacagttactcattggtcaaagatttgcatcaggggcatatagtcgtttgttccatggaatttacaaggagcagccagttgctgtcaaatttatcaggcagcctgatgaagaagaagatgcagaattggctgctaaacttgagaagcaattcactgctgaagtaaccattctggctcggctccatcatcgcaatgtcattaagctgattggggcatgtaatgctccaccggtcttttgtgtcatcactgagttcctgtgcggggggtctttgagagcttttttgcgcaagctccagcgccaaaagcttcctttggagaagatcatttgcattgctttggatattgcacatggtttggagtacattcactcgcaaagagtaatccatcgtgatgtgaaacctgagaacatcttgtttgatggagaatgttgtgcaaaggttgttgattttggagtggcttgtgaagaagtatactgcaactcattggaagatgacccaggtacttacagatggatggcaccagagatgtataagcgcaaaccatatggtcggaaggttgacgtctacagttttggcctcgtattgtgggaattgtttagtggctcgatcccttatgaagagatgactccattgcaggcagcttttgcagttgttaataagaacttaagaccagttgttccttcaagctgtccggcgcaacttcgacttttgatcgagcaatgttggtcttgtcaaccagagaagagacctgagttttcccaagtagttcagatcctcaaaaatctcaaggaggccctggatagagatggaacgcttgacaagatcccaagcaccaactgccaggaacctcctgatcagaacaagaagagactgtccaattggatccaaagactctcgtacagtcaggccgatttctccggacctccaccgccaaagttattgtaa

SEQ ID NO: 3428 - DNA, 1490 bp, Oryza sativa
atggctaggaagatgctcaaggacgaggaggtggaggtggccgtcaccgacggcgggagctacgactacgacctgttcgtgatcggcgccgggagcggcggcgtccggggctctcgcacctccgcgtccttcggggctaaggttgcgatttgcgagctcccgttccatcccatcagctcggattggcaaggagggcatggtgggacgtgtgtgatacgtggttgtgtgcctaaaaagatactggtgtatggttcatctttccgcggagaatttgaggatgcaaagaattttgggtgggaaatcaatggggacattaacttcaactggaaaaggctgctggaaaataagactcaagaaattgttagactaaatggagtataccagaggattcttggcaattctggtgtgacaatgattgaaggggcaggcagtttggttgatgctcatacagttgaagtcacaaagccagatggttcaaagcaaagatatacagcaaagcacatattgatagcaactggtagccgagctcaacgtgtcaacattcctgggaaggagttagctattacttcagatgaggccttaagtttggaggagctaccaaaacgtgctgtaatccttggtggcggatatattgctgttgaatttgcttctatatggaaagggatgggtgcgcacgtagacttgttttatcgaaaagagcttcctctaagaggtttcgatgatgagatgaggacggttgttgcaagtaaccttgagggaaggggaatcagattacatccagggacaaatctatctgagttgagtaaaacagccgatggcataaaagttgtcactgacaaaggagaggagatcattgcagatgttgttctgtttgctacaggtcgcacaccaaactcccagaggttgaacttggaagctgctggtgttgaagttgataatattggagctataaaggttgatgattattctcgtacatcagtcccaaatatatgggctgtgggtgatgtaacgaaccggataaatttaacacctgttgcactgatggaggctacctgcttttctaaaactgtgtttggtggccagccaactaaacctgattacagagatgtaccttgtgctgttttctccatcccaccactatcagtagtgggcttgagtgaacagcaggctttggaggaagccaagagcgatgttcttgtttacacttccagcttcaacccaatgaagaacagcatatccaaacggcaggagaagaccgtcatgaaactggtggttgattcagagactgataaagtacttggtgcatcaatgtgtggaccagatgcaccagagattatccagggtatggctgtagcgctgaagtgtggagccaccaaggcgacctttgacagcactgttggtattcacccgtctgctgctgaagagtttgtgacaatgcggaccttgaccaggcgcgtgagcccatcatccaagccaaagacaaacttgta

SEQ ID NO: 3429 - DNA, 876 bp, Oryza sativa
atggaggaggagggggagggcctctgcgagatcgcgcggttgccggaggagctcctctccgycgcgatmtctaagcgcytgccgcgggacgcctgccaagccgccgccgtttccccgggtttcgcgccgccgccgaatycgaagccgtytgggctagcttcctgccgcgcaatctccccgatytcgccgacggcgagctytcccccgcgccggcttccaagaaggagctcttcctccgcctctccgatggcccctacctcctatcagaccggctcatgggagactggggccaagtgctacatgctctcggccagatcgttggtgattatctggggcgatacaccgcactactggcgctggattcctctcaccgactctaggtttgcagaaggtgctgaactcatagatgtgtgctggttggaaatccgtggcaggatacacagcaagatgctctccccaaactcaacttatgccgcatacatggtgtttaagatagctgatgagttctatgggctggatgctccattccaggaggcatcagtcagcctgggaggtaggggatcaacaaaaattgtttgtgtccaaagctatgacagcgaagatgaggaggtgcctgagaattactggcctatgagtattggtccattgctgcgacgaagggccaggagaagagaccgtcgtctagttcttgatgaaggtgtaacggtccctcagaaaaggactgacgagtggatggagctggagatgggtgagttcatcaacgaggaaggtgaagatggagaggtgtgcttcagcctgatggagaccaagggaggcaattggaagagaggtcttattgtgcagggcattgagatcagacttaagaaatctggctga

SEQ ID NO: 3430 - DNA, 723 bp, Oryza sativa
atgcaggcgaggcggcacagaggattccggctaggccggaagctgctcgggctctggcgatgggcgctctgccaccggcggcggcggcgcggccgcggctacctccgcctgcagccgtgcccgggagctgcaggcggccgytcccctctgctggccgccgggagcgtcaagaagcagccgccgccgccgcagcagcagatcgtcgtgcatcagcgtgktggggaraaggcggtgctcaagtgggggcggtcgctggcgcggcggatgaggctcctgcggcggcggggatccgagcggctcctggaggaatcccccggggaggcgacgacgcccaaggggcaggtggcggtgtacgtgggcggcggcgagcccggggagtccgatgaggtacgtgtgccggtggtctacttcaaccacccgctgttcggcgagctgctccgcgaggccgaggaggagttcgggttcgcgcacccgggcggcatcaccatcccctgcgccgccgcgcggtctatagggaaaaattccaaagcaatgcaagcctctaaaactccttcaaaaatacattgttccaagcagccccaatctgacttcctgtgctcgcgctatttttgcacgacggcgttacgctatcgagacgggcccggggacgtgtgggcacccggcacacaaaaagatcttactgatgaacatctgaatgattggcctctccgaattaattgctga

SEQ ID NO: 3431 - DNA, 1860 bp, Oryza sativa
atgagcatgtacgggagggacccgtggggcgggccgctggagatatgccacgactcggcgacggacgacgaccggagccggaacctggacctggacaggggggcgctgtcgcggacgctggacgagacgcagcagagctggctgctggccgggccgggggaccagggccggaagaagaagaagtacgtcgacctcggctgcctcgtcgtcagccgcaagctcttcgtgtggacggtcggggtgctcctcgccgccgccgtcttcgccgggctcgtcgccggcatcgccaaggccatccccaggcaccaccgcccgccgccgccgccggacgacttcaccgtcgcgctgcgcaaggcgctcatgttcttcaatgcccagaaatctggaaagcttccgaagaacaacaatgtgcattggcgtggtaactcgtgcatgaaggacggactctcggatccggcagtcgggcgcagcctcgtcggagggtactacgacgccggcgacgccgtcaagttcaactttccagctgccttctccatgaccctcctcagctggagcgtcatcgagtacagtgctaaatacgaggcagttggggaacttggccatatccgtgataccatcaagtggggggccgattacttcttgaagaccttcaactcaacggcggataccattgatcgtgtcgttatgcaggtggggagcggtgcaacatcacccggttcgactcaaccgaacgatcactattgttggatgagaccagaggacattgactaccctcgcccagtagttgagtgccatgcttgttcagatcttgcggctgagatggctgcatcattggcagcagcatcaattgtgttcaaggacaataaggcgtactcgcagaagctggtacatggtgctaccaccctcttcaagtttgcaaggcaaaaccgtggaagatatagtgcaggtggttccgatgctgcaaaattctataactcaaccagctactgggatgagtttgtatggggtggttcatggatgtatctcgcaaccggcaattcatcgtacctgcagttggcaacacaccccaagcttgcaaagcatgctggtgcttactggggtggtccagactacggtgtattcagctgggacaataagcttactggtgcacaggttcttttgagccggttaaggctcttcttaagtcctggttatccatatgaagagatcctcaggacattccacaatcaaacaagcattattatgtgctcttatcttccaattttcaagtctttcaacaggacaaaaggtggtttgatccagttgaatcacgggaggccacaacctcttcagtatgtggtgaacgctgcattccttgcttctttgtacggtgactatcttgaggctgcagatacccctggctggtattgtgggccccatttctacccaattgaaactctgcgcaattttgcaagaactcaaatcgaatacatcttaggaaaaaatcctttgaagatgagctatgtggttggttacggaaaccgttaccctaaacgtgttcatcatcggggtgcctcgatcccaaagaatggtgtccactacggttgcaaaggaggttggaagtggagagaaaccaagaaaccaaaccctaacatcatcgtcggagcgatggtagctggccctgatcgccacgacggcttcaaggatgttcgcaagaattacaactacacggaagcaactctagctggcaatgccggtctagttgcagcattagtagcattgtcaggtgaaggccatggcgtggataagaacactatgttttctgccgtgccgccgatgttcccttcgcccccaccgcctccggcaccatggaaaccatga

SEQ ID NO: 3432 - DNA, 1506 bp, Oryza sativa
atgtgtggcatcctcgccgtgctcggcgtcgcagacgtctccctcgccaagcgctcccgcatcatcgagctatcccgccggttacgtcatagaggccctgattggagtggtatacactgctatcaggattgctatcttgcacaccagcggttggctattgttgatcccacatccggagaccagccgttgtacaatgaggacaaatctgttgttgtgacggtgaatggagagatctataaccatgaagaattgaaagctaacctgaaatctcataaattccaaactgctagcgattgtgaagttattgctcatctgtatgaggaatatggggaggaatttgtggatatgttggatgggatgttcgcttttgttcttcttgacacacgtgataaaagcttcattgcagcccgtgatgctattggcatttgtcctttatacatgggctggggtcttgatgtttgcaggataaaaattctggttttgatatatgttccttctaagaaatttaaggttttcgtcactggtcatgaagtaggattctttttcgatgtaatatcagggtccttgttcaaggctattattaagaggctaatgacagatgtgccatttggtgttctcttgtctggtggactggactcttctttggttgcatctgttgtttcgcggcacttggcagaggcaaaagttgccgcacagtggggaaacaaactgcatacattttgcattggtttgaaaggttctcctgatcttagagctgctaaggaagttgcagactaccttggtactgttcatcacgaactccacttcacagtgcaggaaggcattgatgcactggaggaagtcatttaccatgttgagacatatgatgtaacgacaattagagcaagcaccccaatgttcttgatgtcacgtaaaattaaatctttgggggtgaagatggttctttcgggagaaggttctgatgaaatatttggcggttacctttattttcacaaggcaccaaacaagaaggaattccatgaggaaacatgtcggaagataaaagcccttcatttatatgattgcttgagagcgaacaaatcaacttctgcatggggtgttgaggcccgtgttccgttccttgacaaaaacttcatcaatgtagctatggacattgatcctgaatggaaaatgataaaacgtgatcttggccgtattgagaaatgggttctccggaatgcatttgatgatgaggagaagccctatttacctaagaatgctgctaggttgacagtacctggaggtcctagcgtcgcgtgcagcactgctaaagctgttgaatgggacgcagcctggtccaaaaaccttgatccatctggtcgtgctgctcttggtgttcatgatgctgcatatgaagatactctacaaaaatctcctgcctctgccaatcctgtcttggataacggctttggtccagcccttggggaaagcatggtcaaaaccgttgcttcagccactgccgtttaa

SEQ ID NO: 3433 - DNA, 2000 bp, Oryza sativa
atggggacggaggccggcgacgtcgacggccgcaaccaccggcccggccgcgggtcgtccgcgtcgtcgcgccacctgcacggcgtgrgaggcgcctcggcggcggaggtgaacctgtccgggcgccgcccgttcgcggaraagctgtggtcggacctcgcggagacgttcttccccgaagacccgttccgcgggttcggcgcgctgcccccggccaggcgcgcgtggtgcgcggtcaagtacttcgtcccggcgctggactgggtcccgcgctacggcctcgacaagttcaagttcgacctcctcgccggcatcaccatcgccagcctcgccatcccgcagggcatcagctacgcccgcctcgccaacctccctccaatcatcggcctctattcgagcttcgtgccgccgttgatgtacgcggtgttcgggagctccaacaacctggcggtggggacggtggcggcggcgtcgctgctgctggcgtccatcatcgagacggaggtggcggcggacgagaacccgcagctgtacctgcagctcttctacaccgccgccttcttcaccggcctcttccagaccgcgctaggcgtctttaggttagggctaatagtggatttcctctcgcggtcgacgatcaccgggttcatgggcggcacggcgatgatcatcatactgcagcagttcaagggcctcctggggatgaagcacttcaccaccaagacagacatcatctccgtcctgcactccacctaccattaccggcacgagtggaaatggcagagtgcagttctcggcatatgcttcctcttgttcttgatgtcgagtaagcacctgagaaagaaactgccaaagttgttctgggtgtcggccattgcgccattcatggttgtcgtcatcggaggcatcttcgctttccttgtcaagggtgacgagcatggaattccgatagtcggtaacctgaataaagggatcaatcccctgtccattgcgcagctaacgttccagtccaggcacatgaagacggcagtgaaagctggtctcttgtctgggatcctagcactggcagaaggaatagccgtcggccgaagcttggcgatggtcaagaacgagcagatcgacggcaacaaggagatgatcgcgtttggtatcatgaacatcgccggttctttcacctcctgctacctcacgacagggccgttctcaaagtcggcggtgaacttccacgccgggtgcaagacgccgatgtcgaacgtggtgatgtcggtgtgcatcatgctggtgctgctgttcctggcacccctcttcaagtacaccccgctggtggcgctctcctccatcatcgtcgtcgccatgatcgggctcgtcaaggtcaaggagttctgccacctctacaaggtcgacaagttcgacttctgcatctgcatggtcgccttcctcggcgtcgtcttcttcaccatggtcgcaggcctcagcgcatccgtaggcttgtcagttgtcagggcgttgctgtacgtggccaggcctgccacctgcaagctcgggaacatagcagggagcgagaccttccgcgacgtgaagcaatacccccaagcgaagagcatccctggcatcctcgtcttgcagctcggctctcccatctacttcgtcaatgcgggttacctgcgagaaaggattttgagatgggtggaagatgaggataacctgtgcaagagcgtcgggcacgatctgcaatacttggttcttgatcttggtggtgtcacttctgtcgacaactctggagttgggatgctactagaagtacacaagagcctcgaacgaagagggatcacgatagctctgacgaatccgaggctagaggtaacagagaagctggtgctgtctggatacgtcagggacatcttaggggatgagtgggtcttcctgacggtcaaggacgccatcacggcgtgtcgatacgcgctgcagatatccagaaataagggagaagacgaagtata

SEQ ID NO: 3434 - DNA, 867 bp, Oryza sativa
atggtttcttcttccaatcccgggagaacgccgccgttggtggcggcgattgtgtgctccgtgctgctgctcgccggcggcgccgcsggaaayttctaccaggacgtggacatcacttggggcgacggccgcggcaagatcctcggcaacggccagctcctgacgctgtcgctggacaggtcgtccggctccggcttccagtccaagaaccagtacctgtacggccgcttcgacatgcagatcaagctcgtccccggcaactccgccggcaccgtcgccaccttctacctgtcgtcgcaggggtcgcagcacgacgagatcgacttcgagttcctggggaacgcgagcggcgagccgtacacggtgcacaccaacgtgtacagccaggggaaaggcggccgcgagcagcagttccgcatgtggttcgaccctaccaaggacttccacacttactccgtcctctggaacccctcccacatccttttctacgtggacgggacgccgatacgggagtacaggaacacggaggcgacgacgggggtggcgttcccgcgggcgcaggcgatgcgggtgtacgcgagcctgtgggacgcggaggagtgggcgacgcagggggggcccgtgaggacggactggtcgcgggcgccgttcacggcgtcgtaccgcgggctcgccgcaacggtttcacgtcgcaggaccccacggcttgcgccaacccggggaaccccgtggatttaccagcagcagctgaacagcgcttcgcaggaccggctccggcaggtgcagagggactacatgatctacaattactgcgccgacacgtaccggttcccccaggggttaccgccggagtgcactgccaagtag

SEQ ID NO: 3435 - DNA, 882 bp, Oryza sativa
atgaggacggtggcgcttggcattgtggcgatggcctgcctggtggccattgcgcatggaggcaacttcttccaggacgcggaggtgtcgtgggggcagggccgcggcaagatcgtcgatggtggccgtgggctcgacctcacgcttgacaggagctccggctctgggttccagtccaagagcgagtacctcttcggcaagatcgacatgcagatcaagctcgtccccggcaactccgccggcaccgtcaccaccttctacttgtcgtcgcagggttcgacccacgatgagatcgacttcgagttcctggggaacgtgaccggcgagccgtacacgctgcacaccaacgtgttcacgcaggggcaggggcagcgcgagcagcagttccgcctctggttcgaccccacccagtccttccacacctactccatcatctggaacccacagcacgtcatattcgcggtggacgggacaccgatcagggacttcaagaaccacgaggcccgtggcgtggcgttccccaagagccagccgatgcgggtgtacgcgagcctgtggaacgcggacgactgggcgacgcagggcggccgcgtcaaggcggactggagcaaggcccccttcgtcgcctccttccgcgacttcaacgccgacgcctgcgtctggtcgaacggcgcgcagcgctgccccgtcggcacaatggagaccgttgcagcgccggccggcggcaggaggggcggcgccggcgggtggtggaaccaggagctcagcgacatgagctaccgccgcatgaggtgggtgcagaggaagttcatgatctacaactactgcactgacgccaagcggttcccccagggcacccccgccgagtgcaagctccgttga

SEQ ID NO: 3436 - DNA, 1209 bp, Oryza sativa
atgggagtgtccagtggtgcaagcgagtccctccttccccgggccggcggcgatggatcgctggccatggtcatcgccagcaccggcgttkccgtgctcggctccttcgtcttcggcgtctcgattggttactcagcaccaactcagtccaagatcagggaggatcttcagctctcgctctccgagtattcggttttcggatcaataataacaattggggcaatgataggagcagttgcaagtgggcaccttgctgacatttctggaagaaaaggggtaccggttttcatagcagaaatagctccgaaagctcttcgtggggggcttacaacactgaaccaattgctggtgtgcactgggttatctgttacttatattgtcggtactatggtgacatggcgcatgttggtcatagcaggacttgtaccgtccataattcttatagttggtctttccttcattcctgaatcccctcggtggctggcaaaggttggacggcaaaaggagtttgaaatagcgctccaacgcctccgtggtaaagatgcggatgtgtccattgaagctgcagaaatcaaggagttcattgagaccattgaaaaccttccaaaggctggagttcaggatcttttcaacagagcctacatccgtcctgtcattgttggtgttggcctgatggtgttccagcagtttgtaggaattaatggaatcttgttctatgccagtgaaacttttgtatcagccgggtttgcttcaggagacctaggaacaatcttgatggggtgtatccaggcgccaatcacagctgttggagcattactgatggacagaagtggtagaaggccactgctgttgatttcaacatcaggactcctaattggctctctcatgtcagcagtatccttctacctgaaggtgtacattgctagctattcaataggaatgggggcagtcccttgggtcataatgtcagagatatttcccataaatataaaaggaatcggtggaagctttgtgactctggtgaactggtccggttcatgggcagtttcttttgccttcaacttcttcatgagctggagttcttcagggacattcttccttttcgcattagtttgcgcagtggccatccttttcattgtgaagatcgtgccagagacaaaaggcaaaactctggaggagattcaggcctcaatgaatagtagcacatag

SEQ ID NO: 3437 - DNA, 1680 bp, Oryza sativa
atggcgctcactcatcacctcctccgcgttctcttagccaccgcattaccgttgctctttctctcccatgcagcagatgcgggcgagttgggcgtgtgctacgggagggacgcggacaatctgatggacccgcaatccgtggtgagccttctcagggcgaacggcatcacgatggtgaggatcttcgacgccgacccggcggtgctgagggcgctggcgaacaccggcatcaaggtgatggtggcgctacccaacaccgatctgggctccgccggctgggatccgagctacgcacagaggtgggtggagagcagcgtggtgccctactacccggccacgctgatcaacggcgtggccgtggggaacgaggtgttcgatcaggcgcctcacctgacccagcagctggtgccggccatgaggaacgtgcacgcggcgctagcgaggctgggcctcgccgatgccataagggtgtccaccccgatcacgttcagctcagtcgaggtgtcattcccgccgtccgcaggcgctttccgggatgacatcgcgcagtcggtgatgagccccatgatcgacttcttgcagcagactgactcgtactttatggtaaatctctacccattctttgcatatgcggatccttctaccggaatctccctcgagtacgccacgttccgtcccaatgctggtgtgttcgatccggtgarcggcgtcacatattacagtctctttgatgccgagctagatgcagtttactatgcaataaacaaggtttctggtagtaacgagagggcctcgttagcccaagcaggaggacgggtgcccatcagagtttcagaatcaggccacccctctggtggtagaatccgctcaggggtcacagaagccaatgctgatggggactcggtggcaactaaagctaacgctcaagcatacaacaatggccttgccaagcgagtcttgttcggggcctccaatatggaggatgtttctgcgtacatattcgctttgttcaacgagaacaagaagggtgggccatctatagagagcaacttcggcctgttctatccggatgggacgaaggtgtacgatgttgactttcatggtggtggtacatgtcccacaaaggagagctggtgtgtggcaaatgcagctattgggaatgcacggctacagggagcactggactgggcgtgtagtaacggcgcggactgcagtgctatccaacagggaaaagtgtgctatgagccaaacaccatggttgcacatgcatcttatgcattcaatgactactaccagcgtaatggcaaggcaagtagcgcgtgcaactttgccggtgctgcttacatcgtctacaagccatcaccaagcatctgtgacccgaacccgagttggtgcgtggcgaacgcagaggtcggggacatgcggttacaggcagcactagactatgcatgcagtagctgcgcagactgcagtgccatccagcctggtggacggtgctttgatcctaacaccaaggtggcgcatgcgacctatgcattcaatgactattaccagactgccggcagggcaagtggctcgtgtgactttggtggtgctgcttccatcgtcaaccaggcaccgagaattggaaactgcgtactcccaccaagcaagacttcttcaatgaacatattttactga

SEQ ID NO: 3438 - DNA, 2510 bp, Oryza sativa
atgccttgggctgaaagcttgctgttcctcctcctcttgttctcgctgcccattcccttctcccattcttggtcctttgattatcccagccccattgccaacattaattctctttggacgaacaacaatgccaccatcccatacagtgcaacctacccagatggttcaacgatcagagcgattcttgttaggcagaatcctacatggtatagtccattcttcgcatgtggtttcatctgcaccgctccttgcaatgattttctctttgccatcttctcggtgtccgttggtgatccgagcaaccctgccttcaatacctcgtccatgccacggatcatgtggacagccaacaggtcccgtccagtgaaggataatgcgtcactccagttcaaggatggcaatctcatactgcgagacttcgatggttctctggtctggtcgacgaacacatcggacagccgtgttgtcggtctgaatcttgctgaaactgggaatatggttctcttcgacgcaatggggaagacggtgtgggaatcatttgagcacccaactgacacgctccttcttgggcagtcactgaggcaagggaagaggcttacttcagattccttggcaacaaactggactcaaggtcagttctatctcactgtacttgacaatggtttgtatgctttcatcgaagcagatccaccacagctctattatcaaagaagattcaatatcactgatgccatagttcagccaaatatgaacatatcctctgatggagcaaagaactacacgacttacatttccttcttaaaaggtagcctgtcagcatttgttagcttcaacaatactgatatcaatctattcgatatatcactgccgtcgccatcttcagcacagttcatgagcctcgagaatgatgggcacttgagagtttatagatgggatggtacttcgtggaaacctcaggctgatgttctgcatgtggatcttgatgattgtgcatatcccacagtatgtggagattatggtatctgttccgaaggacaatgcagttgcccgagtcggaattctggggatgaagatcaatttttccgccaattggacaaccggcaacctaacatgggctgctccctagcaattcctctgtcttgtgacttgacccaatatcaacagcttctccccctcccaaatgtcatgtacttcaatttaggacaaaattggaccaccgacgaatatagctgcaaggaggcttgcttgaaggcctgttcatgcaaagcagcctttttcaagtataacaatgtctctaatggttcttgctacctaatgccaaagcttttctcactcatgaattatcagcctgaagtagttggatacaatttatctgcatacatcaaggtgcaaatgttacctccaccaccaagaagcaaacaattaaatccattagtttaccatgttggtgctcctattatagttgcagttatctgcataattattctcatcatcagaagaataatgaaaaggaagatggatgatgacgacccatttaaaggactggctggcatgccaacacggttctcctacaaacagctgagagaggcgactaataactttagcaaaaagctgggacagggaggatttgggccagtgtatgagggaaaacttggaaatgttaaaattgccgtcaaatgcttgcgtgatattggccatggaaaagaagaattcatggccgaagtcatcaccattggaagcatccatcacatcaatcttgttagattgataggatactgttctgacaagtttcacaggctccttgtttacgagcatatgaccaatgggtctctagacaagtggatcttcagaaagaacccaagaggtacactcagttgggcaactcgatacaagattatactggatattgcaaaaggcttggcctatcttcatgaagaatgccgacagaagattgctcaccttgatatcaagcctggtaatatcctccttgatgacaagttcaatgcaaagatatctgatttcggtctagcaaagctgatcgatagggatgaaagccatgtcatgacaaaaatcagaggaacaaggggatacctagcaccagaatggttgtcatcaacaattaccgagaaggctgatatctacagttttggtgttgttgtgctggaaattgtgagcggaaggaaaaacctggataacaatcagcctgaagcgagcaacaacctaatcaatctacttcaagagaaaatcaaggtcggccaagttctagatatattggacaatcagaacgaagaaatccaattacacggggaagaaatgatagaagtgatcaagctagcagtctggtgcttgcagcgcgactgcagcaaacgaccagccatgtcacaggttgtgaaggtcctggaaggcgcgatcgacacggaaacatccgcaggctacgatgcagctagtaaagatgatattaattttgacgcttcatcccctctgtccccagcaccagtgtcagcacgatg

SEQ ID NO: 3439 - DNA, 393 bp, Oryza sativa
atggcaggcaaggcctcgatcgcgctgttcctcgccgtcaacctggtggtgttctcgttggccagcgcctgcggcggccgctgcccgacgccgacgccgtcgaccccatcgacgcccaccccgacgccggcggctttcggtaagtgcccacgcgacgcgctgaagctgggcgtttgcgccaacgtgctgggcctcatcaaggccaaggtgggcgtgccgccggcggagccgtgctgcccgctgctggaggggctcgtcgacctcgaggcggcggtatgcctctgcacggccatcagaggcaacatcctcggcatcaacctcaacctccccgtcgacctcagcctcatcctcaactactgcggcaagcgcgtgcccaccggcttcaaatgctaa

SEQ ID NO: 3440 - DNA, 396 bp, Oryza sativa
atggcaggcaaggcctcgatcgcgctattcctcgccgtcaacctggtggtcttctcgttgggcagcgcctgcggcggccactgcccgacgccgacgccgccgaccccgtcgacgcccaccccgactcccgccgcattcggcaagtgcccacgcgacgcgctgaagctgggcgtgtgcgccaacgtgctgggcctcatcaaggccaaggtgggcgtgccgccggcggagccgtgctgcccgctgctggaggggctcgtcgacctcgaggcggcggtgtgcctctgcacggccatcaagggcaacattctcggcatcaaccttaacctccccgtcgacctcagcctcatcctcaactactgcggcaagcgcgtgcccaccggcttcaagtgcttctaa

SEQ ID NO: 3441 - DNA, 1149 bp, Oryza sativa
atgaggaaagatgatggtgtgaaggtggtctctgtggagaatttgaagaatccttatgaaaaacaagggaacttcaacatgcgattcaagttgactcttaacaagctgtatgcatggagcctagtttcctatgaccgagttgttatgctagactctgacaacattttcctccagaacactgatgaattatttcagtgtggccagttctgtgctgtcttcattaacccttgtatcttccatacagggctctttgtgcttcagccctcaatggacgtttttaagaacatgctacatgagctagctgttgggcgtgataacccagatggtgcagatcagggcttccttgctagctatttcccagacttgcttgaccgaccaatgttccatccaccagttaatggtaccaaacttgaaggaacatatcgtcttccgttaggctatcaaatggacgcatcttactattatttgaaactccgctggagcattccatgtgggccgaacagcgtgattacatttcctagcgctccatggtttaagccatggtattggtggtcttggccagttttacctctgggactttcttggcatgaacaacgccgtgaaaacttggggtattcatcggagctaccggttgtattaatccaggccctattttacattggagtcattgcagtcacccgacttgcgcggcctagtttgtcaaagatgtgctacaacagaagaatggagaaaagtactatagttttgctcacaacactcagagtagtggcagcatggtccatacttgcagcttacaccatacccttcttcctgatcccacggacggtgcatccgctactaggttggccactatatttgcttggtgctttctccttttcttcaatcgtgatcaatgtattcctcctccacccccttgcggtcctcacaacatggttggggatcatcggtgctctcttcgtgatggcattcccatggtatttaaacggtgttgtaagggccttggcagtgttcgcctatgcattttgctgcgctcccttgatctggggatctttggttaagacaatgagctccttgcagatcctgattgaaagggatgcattcagacttggtgaacctaaccagacagccgagttcacgaagctttattga

SEQ ID NO: 3442 - DNA, 1719 bp, Oryza sativa
atggaggcgacgacgactgacggcacgacggaccacgcggggaaaccggcggtgaggagcaagagcgggacgtggagggcgtgcccgttcatcctggggaacgagtgctgcgagcgcctggcctactacggcatgagcgccaacctcgtcaactacatggtcgatcgcctccgccagggcaacgccggcgccgccgccagcgtcaacaactggtccggcacatgctacgtcatgcccctcgtcggcgccttcctcgccgacgcctacctcggtcgctaccgcaccatcgccgcgttcatggcgctctacatcgtcggcctcgcgctcctcaccatgagcgcctccgtgccaggcatgaagccgcctaactgcgccacaatatccgcctcctcgtgcgggccctccccaggccagagcgccgccttcttcgtcgcgctctacctcatcgccctgggcaccggcgggatcaagccctgcgtctcctccttcggcgccgaccagttcgacgacgccgacccacgcgagcaccggagcaaggcctccttcttcaactggttctacatgtccatcaacgtcggcgccctggtggcgtcgtcggtgctcgtctgggtgcagatgaacgtgggctgggggtggggcttcggcatcccggccgtggccatggccgtggccgtcgccagcttcctcatggggagcagcctctacaggcaccagaagcccggggggagcccgctcaccaggatgctgcaggtggtcgtggccgccgccaggaagtcaagggtggcgctgcccgccgacgccgccgcgctactctacgagggcgacaagctggcctgcgggacgcggcggctggctcacacggagcagttcaggtggctggaccgggctgcggtggtgacaccgacgacggacaaggacgacgacaccggcagcaggtggcggctgtgcccggtgacgcaggtggaggagctcaaggcggtggtgcggctgctgccggtgtgggcgagcgggatcgtgatgtcggcggtgtacgggcagatgagcaccatgttcgtgctgcaggggaacacgctggaccctcgcatgggcgctaccttcaagatcccctcggcgtcgctctccatcttcgacaccctcgccgtcctcgcctgggtccccgtctacgaccgcctcatcgtccccgccgcccgccgcttcaccggccacccgcgcggcttcacgcagctccagcgcatgggcatcggcctcctcatctccgtcttctccatggtggccgccggggtgctggaggtggtgcgcctccgcgtcgccgccgcccacggcatgctcgactccacctcctacctgcccatctccatcttctggcaggtgcagtacttcatcatcggcgccgctgaggtgttcgccttcatcggccagatcgacttcttctacgaccaggcgcccgacgacatgcgcagcacgtgcaccgcgctctcgctcacctcctccgcgctcggcaactacctcagcacgctgctcgtcgtcatcgtcaccgccgcatccaccaggggcggcggcctcggatggatccccgacaacctcaaccgcggccacctcgactacttcttctggctgctcgccgcgctcagtgctgtcaacttcctcgtctacctctggatcgccaactggtacaggtgcaagacaatcaccaccactgaagcagccgctcagacttga

SEQ ID NO: 3443 - DNA, 984 bp, Oryza sativa
atggtggttctcgctggcccgcccgccgtcgatcacatcccgctgctgaggtcgccggaccccggcgacgtcttctccggcgtgccggtcgtcgacctcggcagccccggcgcggcgagggccgtggtggacgcctgcgagcggtacgggttcttcaaggtcgtcaaccacggcgtggccacggacacgatggacaaggccgagtcggaggccgtcaggttcttctcccagacgcagcccgacaaggaccgctccggcccggcctacccgttcgggtacggcagcaagcggatcgggttcaatggcgacatggggtggctcgagtacctcctcctcgccctcgacgacgcgtcgctcgccgacgcctgcaccgtcccgtcctgcgcggtcttccgggccgctctgaacgagtacatctcgggggtgcggaaggtggcggtgcgggtgatggaggcgatgtcggaggggctgggcattgcgcaggcggacgcgctgagcgcgctggtgacggcggaagggagcgaccaggtgttccgcgtgaaccactacccgccgtgccgcgcgctgcaggggctcggctgcagcgtcaccggcttcggcgagcacaccgacccgcagctcgtctccgtgctccgctcaaacggcacgtccggcctgcagatcgcgctccgcgacggccagtgggtgtccgtgccctccgaccgcgactccttcttcgtcaacgtcggcgactcgttgcaggttctgaccaatgggaggttcaagagcgtgaagcacagggtggtggccaacagcctaaagtctagggtttccttcatctactttggagggccaccgttagcacagaggattgcaccattgccacagctgctgggggagggagagcagagcctgtacaaggagttcacatgggatgagtacaagaaggctgcctacaaatcaaggcttggagacaacaggctggcccagtttgagaagaagtag

SEQ ID NO: 3444 - DNA, 3015 bp, Oryza sativa
atgaccaatagtaccgataatcttttgttactactgctcctcttcttctccggctccagtgcggagcttgatgacggcggcgagctccaaacgcttctgaccatcaagcggcattggggtagacctgctgcattcagctcatgggaggtgagaagttctaattcttttggttactgtgattgggtaggagttgcttgtacagatggccaggttacgtccctctccttccagagcttccaaatagccaatccaatcccagcttctatttgtagccttaagaacctgaagtacttagacctctcttacaacaacctcaccggtgatttccccacagtgctctacaattgctcagctttgcaattccttgacctgtcaaacaatgaattgaccggaagccttcctagcaacatcgacaagttgtccttggggatgcagcacctcaacttgtcaagcaattattttattggtgatgttccctcggctattgccaggttcttgaagctcaagtcactggtccttgacactaacagctttaatgggagctatccaggtgcttccattggaggccttgtggagcttgagatactgacgttggcatccaacccgttcatgccgggtccaattccgaatgagtttagcaagcttacaaagctgacatatctgtggttatcctggatgaatctgactggtgacatccctgatgctctgtcagcattgaaggagctcatactattggatttgtcaaagaataagatgcaaggaaagatcccgaagtggatatggaagcttcagaagctcgagatgttgtacctctttgcaagcaatttcagtggcgagattggtccttacatctcaacactcaatatgcaggagcttgatctatccatgaacaagctcaccggatcaattccagaggacattgcaaacttgaagaacttgagactgctatacttgtactacaacaacctcactggatccattccaaaaggtgtcagtatgcttccaaaccttaccgacattcggctcttcaataataagctctccgggcccttaccccctgagcttgggaaatattcagaattgggaaattttgaggtgtccaacaacaacctgtctggtgagttgcctgatacgctctgcttcaacaaaaagctctacgaccttgtggtgttcaacaatagcttctccggcgtgttcccaatgaaccttggggactgcgacaccatcaacaacatcatggcatacaacaaccactttgtcggggacttccctgagaatatatggtcattcgcaaagctcatcaacatcatgatttacaacaacaacttcaccggcaatctaccgagtgagatatcattcaacatcactagaattgagatagggaacaatatgttctccggtgccctcccatccgccgccatcgccctgaagaacttcatggcggagaacaaccagttctctggagcactaccagatgacatgtcaaggttcgctaatctcaccgagctggaccttgctgggaataggttgtccggcttgattccaccatctatgcaatcattgacaaagctgacctccctcaaccttagcagcaaccagatttccggagagatccctgcagtacttgggttaatggatctaaacattcttgacctttcgaacaacaagctcactggtcacatacctcaggaattcaatgatctacatgtcaactttctcaacctctcatccaaccagctctccggtgaggtcccagcagcattgcaaacgctagcatacgaggacagcttcttggataaccctagtctctgttgtcaatcagaatccggcatgcacatcaggacatgtccctggagtcaaagcatgagccatgatcaccttgcactgagcataagagccatattggtcattcttccttgcattactcttgctagtgtcgccatcaccggatggcttctcctcctcaggcgcaagaaaggtccacaagatgtcacgtcgtggaagatgacacaattcagaacgatagatttcaccgagcatgacatcgtcagcaatatcagcgagtgcaatgtgattggtaggggtggctcagggaaagtgtaccgtatccaccttggcggcgacatcaaggcgggacgacatggcggtggctgtaccccaaggacggtggccgtgaagaggatcggcaacaccagcaagctggacacgaacctcgacaaggagtttgagtcggaggtgaggacgttgggtgacctccggcatagcaacatcgtcgacctgctctgctgcatctctagccaggagacgaagctgctcgtctacgagcacatggagaacgggagcctggatcaatggctgcaacgctacaagcgagccggcaaaagcgggccgttggactggccgacaagggtggccatcgccattgatgttgctagaggcctcagctacatgcatgaggattttgtgcagccggtcatccaccgcgatgtcaagtgtagcaacattcttctcgaccgcgagttcagggccaagatcgctgattttgggcttgctcgtatccttgccaagtctggtgagtcggaatcggcctccgccgtctgtggcacctttggctacattgctccagagtacgcatacaggtcaaaggtaagcgttaaggtggacgtatacagcttcggtgtggtgctgctagagctggccaccggccgagggccgcaagatggtggcacggagtctggcagctgcttggccaaatgggcatcgaagcggtacaacaatggtggcccggtcgccgacttggtcgacggcgagattcaggatccttcctacctggatgacatggtggccgtgttcgagctcggcgtggtttgcaccagtgaggagccggcgtcgaggcctccgatgagtgatgttctccaccggctcatgcagtttgatcatagcggaacacatagcgatggcgtagtagctaaaggcgtgtttgacatcgatgattcttcggattgtattgtttaa

SEQ ID NO: 3445 - DNA, 1098 bp, Oryza sativa
atggcggcttcaatgaattcgaagcttcccctggctcttgtgctcctcctgctgtgcggcggcgcatgcgtagcggtagccatgcccagtgaattgtccatagttggctactcggaggaggatctggcgtcgcatgagaggctgatggagctgttcgagaagttcatggccaagtaccgcaaggcctactccagcttggaggagaagctgaggaggttcgaggtgttcaaggacaacctcaaccacatcgacgaggagaacaagaagatcaccggctactggctgggcctcaacgagttcgccgacctcacccacgacgagttcaaggctgcctacctcggcctcaccctcactccggcgaggaggaacagcaacgatcagttgttcaggtacgaggaggtggaggcggcaagtttgccgaaggaggtggactggaggaagaagggggcggtgacggaggtgaagaaccaggggcagtgcggcagctgctgggcgttctcgacggtggcggcggtggaggggatcaacgccatcgtgaccggcaacctgacgcgcctgtcggagcaggagctcatcgactgcgacaccgacggcaacaacggctgcagcggcggcctcatggactacgccttctcctacatcgccgccaacggcggcctccacaccgaggagtcctacccgtacctgatggaggaaggcacctgccgccgcggcagcacggagggggacgacgacggcgaggcggcggcggcggtgaccatctccgggtacgaggacgtgccgaggaacaacgagcaggccctgctcaaggccctggcccaccagcccgtcagcgtcgccatcgaggcctcaggcaggaacttccagttctacagcgggggtgtgtttgatggtccgtgcggcacgcggctggatcatggcgtgacggccgttggatacgggacggccagcaagggacacgattacatcatcgtgaagaactcgtggggatcgcattggggtgagaaggggtacatccggatgaggaggggcaccggcaagcacgacggcctctgcggcatcaacaagatggcctcctacccaaccaagaacgcttaa

SEQ ID NO: 3446 - DNA, 735 bp, Oryza sativa
atggcggaggaggcggctagcaaggcagcgccgaccgatgcgctgtcgtccgtggcggcggaggcgccggtgacgagagaacggccggtccgagcggacttggaagtgcagattccgaagccctatttggcccgagctctggttgctccggacgtgtaccatcctgaaggaaccgaggggcgtgaccaccggcagatgagtgtgctgcagcagcatgtggctttcttcgacctggatggcgacggtatcgtttatccatgggaaacttatggaggactacgggaattgggcttcaacgtgattgtttcgttctttttggcgatagccataaacgttggtctaagctacccaactctgccaagctggataccatctctcctgttccctatacacataaaaaacatccacagggctaagcacggcagcgatagctcgacgtacgacaacgagggaaggtttatgccggtcaatttcgagagcatcttcagcaagaacgcccgcacggcgccggacaagctcacgttcggcgatatctggcggatgaccgaaggccaaagggtggcgctcgacttgcttgggaggatcgcgagtaagggggagtggatattgctctacgtgcttgcgaaagatgaggaaggattcctcaggaaggaggctgttcgccgctgcttcgatgggagcctattcgagtcgattgcccagcagagaagggaggcacatgagaagcagaagtag

SEQ ID NO: 3447 - DNA, 858 bp, Oryza sativa
atgcaggggacaacgacgaccaaggccgggcgcaacggcgaccgcgccggcaccgaagccccgggcgcgacgagggcgactgacgggaggggcggcgccgccgtggcagcccgcaaggtcggggacatgcgcggcgtgtcgggcgtggaggccaaggactcgctgaccatcgtcgcgctgcagtcgccggtcaccgtcgagcgccccgtccgcggcgacctcgaggaacacgtccccaagccatatcttgcgagagcgctggcggcgccggacatctaccacccagacggaaccacgacggacgatcacgagcaccaccacctcagcgtgctgcagcagcacgtcgccttcttcgaccgcgacgacaacggcatcatctacccatgggaaacctacgaagggtgccgtgcgcttgggttcaacatgatcatgtccttcctcattgctctggtcgtgaacgtgtccatgagctaccccacgctgcctggctggctgccgtccccgttcttcccgatctacatccacaacatccacaggagtaagcacgggagtgactctgggacctacgataacgagggccggttcatgccggtgaacttcgagaacatcttcagcaagtacgcgcgcacgtcccctgacaggctcacctacagggaggtgtggcagatgaccgaggggaaccgcgaagtgctcgatctcttcggatggttcgcggcgaagctggagtggacgatcctgtacgtgctggcgagggacgaggaagggtacctggcgagggaggccatccggcgcatgtacgacgggagcctgttcgagtacgtggcgatgcagcgggagcagcacgctaagatgtcctag

SEQ ID NO: 3448 - DNA, 852 bp, Oryza sativa
atggcgatactgccgccggctgcggctgcggctgcggcggaggacgtcctctcgctgtacgacgcgtgctggttccgccgcctcgtgctcctctcgccctcttctcctgctgctgttgctgcggacgtcgcgcctgcctctccgccggtggcgtcgcagcgggaggaggaggaggaggaggaggaggaggaggagagggaggtgaagagatctccgccggggacgctgcggcaccggcggacgcggagcgacgaggcggcgacggcggcgttggacggcctcgagccgctcaggatcccgaacggccaccgggccaggctcgagacgatcctgtccgggaaggacgggctggcggccgccttgccgcagcctcagccgatggcggagcggaggagggcggcggtgcggcggcccggggggaggcggcggcggcagcggcgcgggcggagcatgtcggagctggagttcgaggaggtgaaggggctgcaagacctcgggttcaccttctccgaggacgacgtcgacgccgagctcgcctccatcgtgcctgggctccggcggcggcgctccgacgaggacgacgccagagaggccccggctgccgcggcggcgtccgccgaggaggaagcagccagcagtcgccggatcggctctgctccggccggcacctcatcgtcgttctcctcggcgccgaggaggccgtacctgtcggaggcgtgggacgatgaggaggaggagatgaggaggatgctgcgcaactggaggatcccgccggccggcgacggcgacggcgccgacctcaaggagcaactccgcctctgggcccacaccgttgcctctgccgtccggtga

SEQ ID NO: 3449 - DNA, 4149 bp, Oryza sativa
atggcggaggaggggacgcagcagctgccgtacgtgcgggagacggtgctgaagaagcggaaggtgaacgaggactgggcggtcaagaaccgggagcggaaggcggccaagaggcagcgccgccgcgacgacggcaagggcgccatcaagaggcccgaggacttcgtcagggagttccgcaacaaggagctcgacttcgtccggatgaagacccgcctcaaggtccgcaagctcccccccgccgagaccctcaactccaagctcgtcttcgcgattcgcatccctggcacaatggacttgcatccacacatgaggaggattttgcgcaagctgcggctgacgcaggtcctcaccggcgtgttcctcaaggccactgacgctactatgaagaggcttcttgttgtggagccgtttatcacttatgggttcccaaatttgaagaatgtgaaggatcttatttacaagaagggccgtgggttcctggacaaggaacctttccctcttaccagcaatgatctcattgagaaggctctgggagaatatggcatcatatgtttggaagatcttgtgcatgaaatcgcatcagttggcccacacttcagagaagcttcaaatttcctcatgcccttcaagctcaagtgtccagagaggaggttgcagatgaagaagaaacccttcaaggatggtgctgagaacgcaacatggcggaatcgcttcccggtggtgcscggggtggctggcaaggcggcgaacgcgctcgtccagagcgtcacgcgcgtgtgcggcgtcgacggcgaccgccgcaagctggagcgccagcttctggccgtccagtgcaagctggccgatgccaaggcgaagagcgagactaagggtccacttacaaccctaagcgagaccaaccccgccgtcaagcgctggatgaaggacctcaaggctgtcgcctacgaggccgacgacgtcctcgacgacttcgagtacgaggctctgcgccgcgaggtcaagatcggcgactccaccacccgcaaggtactcggctacttcacgccgcatagcccactcctgttccgtgttaccatgagtaggaagctgggcgatgtcctcaagaagatcaacgatctggttgaagagatgaacaagtttggcctgatggagcacacagaggcgccacagcttccttatcggctaacacactcggggctggacgagtcagcagacatatttgggcgagagcatgacaaggaggtgttggttaaactgatgctggatcagcatgatcaacagaatttgcaggttctccccatcgtggggatgggcggtttgggcaagacaacgcttgcgaagatggtgtacaacgatccgattgtccagaaacatttccaactgaagatgtggcactgtgtttcggagaactttgaacctatttctattgtgaaatccatcattgagttggctacaaatagaaaatgtgacctacctgactcaattgagttgttgcgaaggcgacttgaaggagtcattgacaggaaaaggtttctacttgttcttgatgatgtatggaatgaggacgacaacaagtggaatgaacacctaaggccacttctgaattctgtcgggggtccagggagcattatagtcatcacaactcgcaatcggcgggtggcatctataatggaaacccttcaaccctataagccagcatgtctaagtgaagatgaatcatgggaattgttctcgaagagagcgtttggtagagacgtacaagagcaagaagatttggtcaccattggcaaatgtattgtacataaatgcaaggggctgccacttgctctgaagacgatgggcggtctaatgagttccaaacaccaagtcaaggaatgggaagccatcgcaagaagtaatattggtgatagtgtcaaaggaaaagacgaaatcttatcaatactaaaattgagctacaaacacttgccatctgaaatgaaacaatgcttcaccttctgtgcaattttctgcaaggactatgagatggagaaggacatgttgatccaactatggatagcaaatggttttattcaagaagagggcacaattgagttgtcacaaaaaggcgagtttgttttcaatgagttggtttggagatcatttcttcaagatgttaaaacaatattattcagaagcttagattatgactttgttgtatgtaaaatgcatgatttaatgcatgacttagcaaaagacgtttcaagtgaatgtgcaactacagaagaactgattcaacagaaagcaccatctgaagatgtttggcatgtgcaaatatcagaaggtgaattaaaacaaatcagtggatcattcaaaggtacaacatctctccgcactttgttgatggaattaccattatacaggggtcttgaagtgttggaactgaggtcatttttcttagaaaggtctaatatacatagactgccagattcaatatgtgcattgtataacttacaatcactgaggctcaatggctgcagctatctagaatgtttacctgaaggcatggcaaatctaaggaaactcaaccacctttatctgttgggatgcgatagattaaaacggatgcccccaaattttagtctactgaacaatctattgacactaacaacgtttgtcgtggacaccgatgctggcaggggaattgaggagctcaaacagttgagataccttaccaatatgttggggctgtacaatttgagaaaaataaagagtacatcgaacgcgaaagaagccaatctccatcagaaacaagagctgagtatattacgattattttggggctgcatgtcatcctacatgcctggagacaaagacaataatgaggaagaaatgttggaatctcttaaacctcacagcaagcttaaaattttggatttatatggttatggtggaagtaaagcctcagtgtggatgagagaccctcaaatgttccggtgcttaaaaaggctcattattgaacgatgtccaagatgtaaggacattccaacagtgtggctatcagcctctcttgagtatttgtccttgtcttatatgactagtttgatctcattatgtaagaacattgatgggaacaccccagtgcagttatttccaaagttgaaggagttgatattatttgttttaccgaacttggagaggtgggcagaaaacagtgagggggagaataatgatgtgatcattttcccggagcttgaaagcctagaattgaagagttgcatgaaaatttcaagtgttccggaaagcccggctctcaaaaggctggaggctctggggtgtcacagcctctcaattttctcactttcacatctcacatcattgtctgacctttattacaaagcaggtgatattgactctatgaggatgcctttggacccttgttgggcttctcccgtttgttttttgccgggacggccaaagtggccaatggaggagctccgttgcttgatttgccttcgacatctgtcttttcgtgcatgtggcaagttggaggggaagtgcagatcatcggatgaagcccttccgctgccccaactagagaggtttgaagtatcgcattgtgacaatttactggacatacccaagatgccgacgtcacttgtgaatttggaagtttcacattgccgaagtttagtggcactgccttcgcacctgggaaatctgcccagactcagatcgcttactacgtattgcatggatatgctggagatgctgcccgatgggatgaatggcttcacagctcttgaggaattggagatttttaactgtttaccgatagagaagttccctgagggtctcgttcgacgtctcccggccctgaaatccctgatgatacgtgactgtccatttttggtaagacgcttccaagagggtggagagtatttcggcttggcaccgcatgttaaactgagtcaacgacagaaagcggcggaggaggcggcggggtggatggcgccggtgttcgagaggctgacggggatccgagcactcgccgactccgcccgcttcaaggcgtggttcctcgaccagattggtgttcttcaccatgggaatatgccttacctggtgccatccttgcattgggaaaggggcgaagatggttatcattag

SEQ ID NO: 3450 - DNA, 1794 bp, Oryza sativa
atggcgctctcctgcatgaggtgctccccggccgccggcgccgtacgacgaggattggcatcggcggctccgccggcggcgctctccttcgccagatgcggcctccgtagagcggccgcgctcgggtggcgcgtcgccgccgtcaccactacgggagtgcaaggtgccaaggatgctggtctggagaaggctgccagaagtgcttcccaatcaaaggtggaaaatggctcaccttcagaaatcattttagatgattttgaagacttgagccctctatcagaaaatgatgactccactgttagtatcactgtagtcggagcatctggtgaccttkccamgaagaagatatttcctgcactttttgctctatactatgaagattgtcttccaaaggttgtcaagatgacagatgctgaattgagaaacatggtcagcaaaacactgacatgcagaatagataaaaggtgcttaactaggctggacttattaaccataattcttaacatccttagggaaaactgtaatgagaagatggaagagtttttaaagagatgcttctatcattcaggccaatatgattcagaggagcatttcatggaccttgacaagaagctgaaacaacatgagggttccagagtttctaaccgtcttttctacttgtcaataccaccaaatatattccttgatgttgtaaaatgtgcaagcaaatcagcatcatctgggaatggttggacaagggtaattgttgagaaaccttttggtcgtgactcagattcatcttctgcattaacaaggggtctgaagcagtacctggtagaggaccaaatcttcaggtggattgaccactacttgggaaaggaactagtggagaacctgtctgtccttcgcttctcaaatcttgtttttgaacctctatggtcaaggcagtatataaggaatgtgcagctgatattctcagaggatttcggcactgaaggacgaggagggtactttgataggtatggtattatccgtgacataatgcagaatcatcttcttcagatactagccctatttgcaatggaaactcctgttagcttggaggcagaggacataagaaacgaaaaggttaaagttctgcgttccatgaagcccctgcaactggaagatgtggtgataggacagtacaaaagtcatacaaagggtggtaccacataccctggatacactgaagataagacggtgcccaaggatagtgtaaccccaacatttgctgcagctgcacttttcataaataatgctagatgggatggagttccttttcttatgaaagctgggaaggctttacatacaaagggggctgagattagagtacagttccgacatgttcctggtaatctttataagaggagttttgggactgatcttgatacagccactaatgaacttgtcatacgtgtgcaacctgatgaagctatctacttgaagattaacaacaaaattcctggtcttggtatgagactagatagaagtaatttgaatcttcactatgcagcaaggtactccaaggagataccagatgcttatgagaggctcttacttgatgccattgaaggagagcgaaggctttttatccgttctgatgagttggatgccgcatgggagctcttcactcccttactcaaggagctggaagagaagcggatagcccctgagctatacccttatggaagccgcggtcctgtaggggctcactaccttgcagcaaagtacaacgtcagatggggtgatttgaccacagaacagaaggcatga

SEQ ID NO: 3451 - DNA, 699 bp, Oryza sativa
atggccgccgccgcctccamcctcgcctccctctccgscamcgcggccgcggccgccggcaagcgcytcctcctctcctccccctcccgctccctctccctctccctcgcctcccgcggccgcatcgccgtcatgccccacctccgcgctggcatcctctccgccgcaccgaggagggcggtgtcggcctcggccccggccgcggccaccatcgcggtcggggacaagctccccgacgcgacgctctcctacttcgactcgcccgacggggagctgaagacggtgaccgtgcgcgacytcacsgccgggaagaaggtggtcctcttcgcggtccccggcgcgttcaccccgacctgcacgcagaagcacgtcccggggttcgtcgccaaggccggggagctccgcgccaagggggtcgacgccgtggcctgcgtctccgtcaacgacgcgttcgtgatgcgggcgtggaaggagagcctcggcgtcggcgacgaggtgctcctcctctccgacggcaacggcgagctcgcccgcgccatgggcgtcgagctcgacctctccgacaagcccgccggcctcggcgtgcggtcccgccgctacgcgctcctggcggaggacggcgtcgtcaaggtgctcaacctcgaggagggcggcgccttcaccaccagcagcgccgaggagatgctcaaggcgctctga

SEQ ID NO: 3452 - DNA, 1998 bp, Oryza sativa
atgtcgatgctgccgcgcttcctcctcctcgtcgtgctgctcgcggtgccgatgacggcggcgcagcagcagtacgaggccaacgcgcagggcgactgctacaccgacaacggcagctccgtcctcggctacacctgcggcaccgccgcctccccgccgccgccgccatgcacggcctacctcaccttccgctccgccccaccgagctacgcctccccgatcaccgtctcctacctcctcaacgccagcgtccccgccgtcgccgccgccaactccgtcccggtctcgcctccggtcgcccgcgacggcctcctcctcgtccccgtcccctgcgcctgcaccgccgccgggtactaccagcacgacgccggctacgtcatccagttcgacgacgagacctacttcgtcatggcgaacgacacgtaccaggggctcacgacgtgccaggcgctcatggcgcagaacccggcgcacgacagcctcgacctctacccgggaatcagactcaccgtgccgctgcgctgcgcgtgcccgtcgccggcgcaggccgccgccggcgtgaggtacctagtgacgtacctcctcggctgggacgacgactcgtccaccgtcgccgaccgcttcggcgccgactaccaggccgttctcttcgccaacaacctcaccgacgactccacggtgtatcccttcaccacgatgcttgtcccgctcaagcatcggcccaagcccgacgtgacggtcttgccggagccggggcctccttctccggctccggctccggcagtgtcagctccgccgccgccggcggtgccttccagcgaatcgggcagtgggaggtggaagaaatcctttcgcggtaggtgtatcggcattggagttggtgttgggttcgccgttcttgcgtctggtgctctgcttgctctgttcttgctacggcgtcggtgccggtggcgtggcaacggcgagcttcacgatgtgccgttggctccggataaggagggagcgaaggcgacgccgccgccgtggatgctgccgacgacggtggcggacgtcgacgtgcgcgatgccgtgggatcgatggccgtgtacgagtacggcgagctggagcgggtgacggccgggttcgcggaggagcggcgcatcggggactcgtcggtctaccgcgcggtgatcaacggcgacgtcgcggcggcggtgaagcgcgtcgccggcgacgtgggcgccgaggtgagcgtcctgggacgcgtcagccactcgtgcctcgtccgcctgttcggcctctgcgtgcaccgcggcgacacgtacctggtgttcgagctcgccgagaacggcgcgctcagcgactggatccgcggcgacaacggcggccgcgccctctcgtggaggcagcggatgcaggcggcgctcgacgtggccgacgggctcaactacctccacaactacaccaggccgccctacgtgcacaagaacctcaagagcagcaacgtcctcctcgacgccgacttccgcgccaaggtctccaacttcggcctggcgcgcaccgtcgccggcgccggcgggcagatgacgtcgcgcgtcgtgggtacgcaggggtacatggcgccggagtacctggagcacgggctgatcgggcctcacctcgacgtgttcgccttcggtgtcgtctgctcgagctcctgtccgggaaggaggcagcgcctgcgcgagacggcggcgagggtggcgatggcgaagcattggcgttgctgctgtgggaggaagcggaggggcagctggtggtcgacggcgacgatgacgacgcgcggggcaaggtggcggcgttcatggactcccggttgcgtggcgactacccgtcggaggtggctctcgcgatggctgcgctggcgctgcggtgcgtcgcgcgggagccccgcgcgcggccgtcgatggtggaggtgttcctctcgctctcggcgttgcacggcacaacgttggattgggccccccatgcaaccctga

SEQ ID NO: 3453 - DNA, 2154 bp, Oryza sativa
atggtgccactccggggttcgtctcacaatccaagcttccctcaatgcgtcgactggatactagagaatcaatgggacgatggatcatggagtattgacgggtccatatccacagccaacaaagatgtcctatcatctacgctagcatgtgttctggcactcaacaaatggaatgttggtagggagcacatcaggagaggactaagtttcattggaagaaatttctcgattgcgatggatgatcaagcagttgctcctataggtttcggcatcactttcccagctatgctaacccttgccaatgggtccggcttggaagtccccgtcagacaaaacgatattgatagtcttaatcaccttcgggagatgaaaatacaaagagaggccgggaaccattctcgtggaagaaaggcctatatggcctatctggcagaaggatttgggaaccttctggagtgggatgaaatcatgatgttccagaggaagaacgggtcattgttcaactgtccttcttcaactgctggcgcattagccaattaccacgacgataaagctctccaatacttgcaatctctagtcaataaatttgacggtgtagtgccaacactgtatccactaaacatatattgtcagctttcaatggtggatgcgcttgaaaacatgggaatatctcagtattttgccagtgaaataaagagcatccttgacatgacatacagttcctggttagggaaagatgaggaaatcatgttagacgtaacaacgtgcgcaatggcatttcgccttttaagaatgaacggttacgatgtttcctcagatgagctatctcatgttgctggagcttcaggcttccgtgattcgcttcaagggtatctaaacgatagaaaatctgtactggaagtatacaagacctcgaaacacagtatatcagaaaatgatttgatcttagatagcataggctcttggtcaggcagcctattgaaggaaatgctgtgctctaatgggaaaggaactccaggccgtgaagagatcgagtttgctctgaagtatcccttctacagcacattggaacgtctagtccacaggaagaacattgtgcttttcgacgctaagggctcccagatgctgaaaacagagtgcatgcctgttcatgacagtcaagattttctagctttggctgtcgatgatttctgcatctctcaatctaattaccagaatgaactgaattatctcgaaagttgggtgaaagacaacagactcgaccagctacatttcgcacggcagaagataacatattgctatctctctggtgctgccaccacattccgtcctgaaatgggctacgctcgcacctcgtgggcaagaaccgcttggttgacggctgttatcgacgatctcttcgatgttggtggattagaacaagaacaagaaaacctcctagcattaatggagaagtgggaagagcctggtgaagatgagtactactctgaagatgtaaagatcgtgttccaggctctttataatacggtgaacgagattggcgcaaaggcttccgcgttacaaggccatgatgttaccaagtacctagtagacgtatggctacatgtggtgaggtgtatgaaggttgaggcagaatggcagaggagccagcatctgccaacgttcgaagaatacatggaaagtggcatggtgtcacttggacagggctgtacggtgatgtcggcattgtttctgatcggagaaaagctcccggagggtattgtcgaacttgaagaatacgatgagttgttcaggctgatgggcacttgcggccgtctcctgaatgacattcgaggcattgagagggaggagtcggacggcaaaatgacgaacggcgtctcgctgctcgttcacgctagcggcggctccatgtccgtagacgaggccaaaaccgaagtgatgaagcgcatcgacgcctcacggaggaagctgctgagcttggtcgtcagcgaacaggaaggccctatcccgaggccgtgcaagcagctgttctggaagatgtgcaagattcttcacctgttctactaccagaccgacggattcagttctcccaaagagatggtcagcgcagtggatgcagtcatcaacgagccacttcaactcagattattgtag

SEQ ID NO: 3454 - DNA, 2547 bp, Oryza sativa
atggtttcgagatcctactccaacttgctggagctcgccgccggcggaggaggaggaggcggcggcgaagggccgctgccgtcgctggggcggcgacggattccgcgggtggtgacggcgtcgggcattgtcccggacctggactactccgacgacgacgcggcgtcggctgcgtcgtcgtccgaccactcctccgcccactcccacgcgccgcgcgagcgcgccatcatcgtcgccaaccagctgcccatccgcgcgttttgccgcggcggcggcggcggcgggtgggagttctcctgggacgaggacagcctcctcctgcagctcagggacagcctccgggcccargccgaccgcgccgacgacatggagttcgtctacgtcggcggcctccgcgacgacgtgcccgcggcggagcacgacgaggtggcgcaccacctcctcgagggcttccgctgcgtgcccacyttcctccccgccgacctccggtcgcggttctaccacggattctgcaagcagcagctgtggccactgttccattacatgctcccgctgtcgccggagctcggcggccgcttcgaccgcgcgctgtggcaggcgtacgtgtccgtcaacaagatcttcgccgacaagatactggaggtgatcagccccgacgaggactacgtctgggtgcacgactaccatctcatgatcttgccgacgttcctgcggaagcggttcaaccgcgtcaagctcggcttcttcctccacagcccgttcccgtcgtcggagatctacaagaccctgcccgtccgcgaggagctgctccggtcgctcctgaacgccgatttgatcgggttccacaccttcgattatgccaggcatttcctgtcctgctgtggaaggatgctcgggttgaagtatgagtcgcagaggggctacattgcgctggagtattatggtcggacggttaccatcaagatattgccggtgggagttcatttggagcagctgcggtcggtgctcaatcttccggagacgggggtcaagctcctgatgcaacatcccgaatggcgaggaagggtggttctagtacagattgccaatccagcgaggggacgggggaaagatgtgaaagaggtgcaggatgagagctatgcaatggtgaggcgtatcaatgaggcatttgggcagccaggttaccagccggttatattgatcgatcggccacttcagttctatgagagaatggcttactatgttgtcgctgagtgctgcctggtgaccgcagtgagagatggcatgaatcttatcccgtatgagtatgtaattgctaggcagggcaatgaaaaactagacgggatcttaggtcttggcccatcggcacggaagaagagcatgcttgttgtgtcagagttcatcggctgttcaccttccctaagtggtgcgattcgggtaaacccttggaacatcgatgctgtggctgatgcaatggactctgctttagagatgcctgaaggggagaaggtgctgagacatgagaagcaccacaaatatgtgagcacacatgatgttggatactgggcaaacagcttcttgcaagatctggagaggacttgtctggaccatagcaggaggcgttgttgggggataggattcgggctaaggtttagggttgtagcccttgatccaaacttcaagaagcttgcagttgagcaccttgtctcagcctaccggaggacgaccacgcgaatcattcttttggactatgacgggacgctgatgcctcaaacatcatttggtaagagcccaagctctaaaacgatagatatgctgaacagcctgtcccgtgatcagaacaacatggtcttccttgtgagcacaaagaagcggtcgactctagaagaatggttctcatcatgcgacaacctaggcttagctgctgagcatggatactttctcaggctgaagagagatgcagaatgggagacgtgtgtcccagtgacagacagaagctggaagcaaatcgcagagcctgtgatgaaaacatacaccgagacaacagatgggtcaacaattgaggacaaggagaccgcgatagtgtggagctacgaggatgctgatcctgattttggatcttgccaagccaaggagctccatgaccatctggagagtgtccttgcaaatgagccagttacagtaaaagctggcctgaaccatgtcgaggtgaagccacagggtgtaagcaagggccttgtggcaaaacggcttttgtcgataatacgggagaacagcctccttccggactttgtcctctgcatcggtgatgaccgctccgatgaagacatgttcgaggtgatcaccactgcagcacaggacaactgcctaagcccagacgccgaggtcttcgcctgcaccgttggtcgcaagcccagcaaggccaagtactacctggatgacctggccgacattgtgaggctgatccagggcctcgccaatgtctctgacgagatgcacagcacaatgcccacacctgtcgacgccgcakacaccgccctgaggtga

SEQ ID NO: 3455 - DNA, 969 bp, Oryza sativa
atggggaggcctccttgttgtgatgagaatggcctcaagaagggcccctggactcctgaagaagatgagaagctcatgagctacattcagaaacatggccatgcaagctggagagtcttacctgaacttgctggcttgaacagatgtggtaagagctgcaggctaagatggaccaactatctgaaaccagacatcaagagagggaacttctcgcgtgaggaagagcaaactatcctccagctgcattccatccttggcaacaagtggtcagctattgcaaagcatctccctggacggacagataacgagatcaagaacttctggaacacccacctcaggaagaaactgatcaagatgggcattgatccaatgacccactgcccaagaacagacttctttcagtccctcccgcagctcattgcacttgccaacctccgccagattatcgagcgacaaccgtgggatggccacattgagggcctgcagactgtggcagttcaggctgccaagctcgaatacatgcaatcactgctacattctgcagtgtccattgtgaccagccccaccaccaccaccaccaccagcagcttaaacaccttcaccaccgaactggagcagaccaaccacctatgccctccacaggtgccttcttcaagtgtccctgaattagctgtacaggtgcctcacagccaaatgcctagcacttcatttgatcaggaaattggcaaaaccaacctgttctcaaataacattgtcaatggcaatgagtggtgcagcatggaggcagataacagcagccagaaaagcttgttggtccctgaaaactccattccaccactcattgacatgccagtgcaaaacttttgtaatactatcagcacaccaaactgtgacggcggcaatagtattccactgcccagttggtctgaaatcctacttgatgaagaactcatgggtgaatttgcttga

SEQ ID NO: 3456 - DNA, 1140 bp, Oryza sativa
atggcgaccgcagggaaggtgatcaagtgcaaagcggcggtggcatgggaggccgcgaagccgctggtgatcgaggaggtggaggtggcgccgccgcaggccatggaggtgcgcgtcaagatcctcttcacctcgctctgccacaccgacgtctacttctgggaggccaagggacagactcccgtgttccctcggatcttcggccatgaagctggaggtattgtggagagtgttggagagggtgtgactgatcttgcccctggtgaccatgttctccctgtgttcactggggagtgcaaggagtgtgcccactgcaagtcagcagagagcaacatgtgtgatctgctcaggatcaacactgacaggggtgtgatgattggtgatggcaaatcacgcttttccatcaacgggaagcccatttaccatttcgtcgggacttcgaccttcagcgagtacactgtcatgcatgttggttgcgttgcgaagatcaacccggcagctccacttgataaagtttgcgttcttagctgtggtatttctactggtcttggtgctacaatcaatgtggcaaagccaccaaagggttcgacggtggcgatatttggtctaggagctgtaggccttgctgccgcagaaggtgcaaggattgcaggagcgtcaaggatcattggcattgacctgaacgccaacagatttgaagaagctaggaaatttggttgcactgaatttgtgaacccaaaggaccatgacaagccagttcagcaggtacttgctgagatgaccaatggcggagttgaccgcagcgttgaatgcactggcaacatcaacgccatgatccaagcatttgaatgtgttcatgatggctggggtgttgcygttttggtcggcgtgccacacaaggacgccgagttcaagacccacccgatgaacttcctgaacgagaggactctcaagggaaccttcttcggcaactacaagccacgcaccgatctgcccaacgtcgtcgagctctacatgaagaaggagctggaggtggagaagttcatcacacacagcgtgccgttctcggagatcaacacggcgttcgacctgatgcacaagggcgagggcatccgctgcatcatccgcatggagaactga

SEQ ID NO: 3457 - DNA, 1680 bp, Oryza sativa
atgcccatgcccatcgggccaggtatccgcggatacccggacccgtgggtaaaattgccatccccgggcacacgtgaaggaactgtggtaggggagaatgagggcacacatgcgggtttaaggtggtacccgaacccggcacccgcattctcaaacccgaacccgctaagacttgcctactccactaccgcttctactgcttggttcgagtcgagggtttctccttctcccaagatggggagcgtggagctcggagcggaggaaagggaggtcgccggcggggagggggggagcaagggggcggcgcctcctgctagggatattaggcggtacaagtgcgatttctgcagtgtcgtccgttccaagaaggggttgatccgtgcccacgtcctcgaacaccataaggatgaagtggatgatttggatgattacttgggacgtggtggcggcgagacgtgcaaagagatggaccatgattgcaagatgctatgtgtttctctgttcagagtattacttgcaatagctgtgatagatgctctgtcctatgtagggactagggatggtgatagttatgctgtgttgacagcaaatttccctggacagttaatagttgtcgtttcactccttttttggttgggtagactatttcactattttgttacatatggatgtgtgaagcattggatcccagagaactccaaaatgcgagaaggccttgagtggactagtaccaggatggggagacccttctgggaagctccttcaagaatgcctctttcacgctcttcttcaggatggggagactctcctgagaagctccatcaagaatgcctcgttcacacactttttcagaggcccttttcctgccatgtagatggttgccccttcagctatagcaggaaggaccatttgaaccggcatctacttacacatcaaggaaagctatttgcatgccccatggaaggatgcaaccgtaagttcactataaagggtaatatccaaaggcatgttcaggaaatgcataaagatggctctccttgtgaaagcaagaaagagttcatctgtcctgaggaaaactgtgggaagacttttaaatatgcttctaagttacagaagcatgaggaatcacatgtcaagttggattatagtgaagttatctgctgtgaaccaggctgcatgaaggcatttaccaacttggaatgcctcaaggcccataacaaatcttgtcatcgacatgttgtctgtgatgtctgtggaaccaaacagctgaagaagaacttcaaacgtcatcagagaatgcatgaaggttcctgtgttactgagagggttcgatgccacctcaaggactgcaagttgtcattttcaaagaaatccaatctggacaagcatgtgaaagcagtccatgagcagaagcgaccctttgtatgtggattctctgggtgtggcaagagtttttcgtacaagcatgtaagggacaaccatgagaaatctagtgctcatgtgtacgttcaggctaatttcgaagaaattgacggggaacgaccacgtcaagcaggtgggaggaagaggaaagccatacctgtggagagtttgatgcggaagagggtagctgctcctgatgatgatgccccagcttgtgatgatggaactgagtatttgagatggcttctctcaggctga

SEQ ID NO: 3458 - DNA, 1143 bp, Oryza sativa
atggtggccggggcggaggtgatgcatcaggtcgtgccgctgctggaggcgtcgttccaccgccggtgctccgtgaagggggtcgacgaggtgtcgccgccggtggaggagatgtcgccggaggctgcctcggaagccgccatcgaggtgcctgaactgatggttaaggcacccgtggaatcactacagttttcccccaacattcgatctggtagctttgccgatattggacctaggcggtacatggaagatgaacatatcagaattgatgatctttctggtcatcttggctcactgttgatgtgccctgcacctaatgccttctatggggtctttgatggccatgggggtccagatgcagcagcctacatgaaaaggcatgctataaggctgttctttgaggattctgagttcccacaggcattagaagaagatgaatcattttatgaatcagttgagaaatctatccacaatgcattcttgagcgcagaccttgctctcgctgacgatttggctatcagccgatcatcaggaacaacagctcttgctgctttgatatttggaaggcagctgttggtcgcgaatgctggggactgccgcgcggtcctgtgtcggaaaggtgtagctgtggagatgtctcgtgatcacaggccaacatatgatgcagagcatgaaaggattaccgagtgtgggggatacattgaggatggctacctcaatggagtactatctgtgaccagggcattgggggattgggacatgaaaatgcctcaaggctcgcggtcgcctctcatcgccgagccagagttccagcaaaccacactcaccgaagacgacgagttcctcatcataggctgcgatgggatatgggacgtcatgagcagccagcacgcggtgaccatagtccgcaaggggctccgacgacacgatgaccccgagaggtgcgcgagggagcttgccatggaggcgaagaggctccagacctttgacaacctcacggtgatagtcatctgctttggatctgagctcggtggtggttcaccgtcttcggagcaggcgccgatcaggagggttagatgttgcaagagcctgtcttcagaggccctttgcaacctgaagaaatggctggaacctaatgagtag

SEQ ID NO: 3459 - DNA, 2157 bp, Oryza sativa
atgtcgctgcgccggctctgcttcgtgctgcccatggacgccgacgaggtggtggtggtagctggcgctgctggtgaggagcagcctcgacgacgagggatggcagcgagcgggaggctggcgtcgtacgtccgccgcaaggtcggccgcgcgctgcggtgcgggctctgcggcgcctggtgccaccaccgctcgtcgggagtctgcagcttcgaggacatcgccggcgtggacgcggtcggcgcggggaagctcggcggaggcscgggcgggagccccaggatcttcagctactcggagctctacatcgggaccagtgggttcagcgacacggagatcctgggcagcggaggctcgacacgcagatcatacacgggacgtgaagaccagcaacgtcatgctggactccgagtacaacgccggctcggcgacttcggcctcgcccggtggctcgagcacgccatgtccggcgaggacgcgccgccgccgcagctggaggtcccgtccgtcgcctcatgcgcgcggtcgtcgtcgtttgcttccgcgaattaccagttccggctgatggacaccagccggataggcggcaccatcgggtaccttccgccggagagcttccagcgccgggccatggcaaccgccaagtccgacgtgttcagcttcgggatcgtcctcctggaggtggccacagggcggcgagcggtcgacctcgcgtaccccgacgaccaaatcttcatgctggattgggtgcgtcggttgtccgatgaggggaagctgctcgacgccggcgaccgcaagctgccggacggcagctacccgctgttcgacatgggccgtctcatacacctcggtctcctctgctcgctgcacgatcctaggtctcgtcccagcatgaagtgggtggtggagaacctctccggcagctgctccggcgacctgccaccgcttccgtccttcctagctctcccaaagtacgtctctctcacttccccctccgattccggcacgacgacgaacgccacggacagcacggtcacctctgcgtcgaagctctacggcacggcggccgggacgaccatttacctcaccgcggagaacggccaccgctccagaggtggcttggctgacaacagcggcggcagcagccagcgatcgacgcggccgctggtggtgatccccagcgtcgacactccccgtgagatatcgtacaaggagatcgtcgcgatcaccaacaacttctccgagtcgcagatggtggcggagctcgacttcgggacagggtacgagggcttcttggacaacggctatggcggcaatggcgcccgccgcgaccgcgtccatgtcctcgtgaagcggttcggcatgaagacgtgcccggcgctgcgcgtccggttcgccaacgagctccgcaacctcgcgaagctgcagcaccggaacctcgtccagctgcgcggctggtgcacggagcacggcgagatgctcgtcgtctacgavtactccccggggaacctcctgagccaccacctcctccggcgcgatggcgcaaggcgccgccgccgtcstcccgtggcgcmaccggtacagcatcgtcaaggccctcgcgtccgcagtcctgtacctgcacgaggagtgggacgagcaggaacgagatgccacggcggcgcgggcgggcaccacgttgccctgcccgccaccagctctgctgcgcggggcatcttcggctacatgtcgccggagtacatggagaccggcgaggccaccaccatggccgacgtctacagcttcggcgtggtggtgctggaggtggtgaccggcgagatggcggtggacgtgaggtcgccggaggtccttcttgtcaggagagcgcagcggtggaaggagcagagccgccccgtcgaggccatcgtggacagacggctggacggccaggttgatcgcccggagctcgagcggttggtgaggctcggcatggcgtgcacccagtctgacccggcggcgcgaccgacgatgaggaagatagtgagcatcatggatggcaatgacgagatcttgaagaaattcgagcagaggaagcagcagagcaaggaagagtgggagaccacaaatgctgctgctctgtccttagtaagaagactccatgctcttgcgatacactga

SEQ ID NO: 3460 - DNA, 1602 bp, Oryza sativa
atggccgccgtcgaggtgtccggcctcggcttcgacctccaccaccgctactcccccatcgtccagcggtgggcggaggagcgtggccacgctggcgtgtcctggcctgccggcgccgaggtgatcggctcgcccgagtactactccgcgctgtcccgacacgaccacgccctcttcgcgcgacgcgggctcgcccagggcgacggcctcgtcaccttcgccgacggcaacatcaccctgcggctcgacggatcgctgcactacgcggaggtggcggtgggcacgccgaacacgacgttcctggtggcgctcgacaccggcagcgacctcttctgggtgccctgcgactgcaagcagtgcgctcccctcggcaacctcacggcggtggacggcggcggcggcccggagctcaggcagtacagcccgagcaagtcgtcgacgagcaagacggtcacctgcgccagcaacctctgcgaccagcccaacgcctgcgccacggccaccagcagctgcccctacgccgtccgctacgccatggccaacacctcctcctccggcgagctcgtcgaggacgtgctctacctcaccagggagaagggcgccgccgccgccgccgccggagccgccgtgcgaactcccgtggtgttcgggtgcgggcaggtgcagacgggctcgttcctcgacggcgccgccgccgacggcctcatgggtctcggcatggagaaggtgtccgtgcccagcatcctcgccagcaccggcgtcgtcaagtcgaacagcttctccatgtgcttcagcaaagacggcctcggccggatcaacttcggcgacaccggcagcgccgaccagtccgagacgccgttcatcgtcaaatccacacactcctactacaacatcagcatcacgtcgatgagcgtcggggacaagaacttgccgttggggttctacgccattgctgactccggcacgtccttcacctacctcaacgacccggcctacacggcctacaccaccaatttcaacgcgcagatcagcgagaggagggccaacttcagcggcagtactcgttctggtccatttcctttcgagtactgctactcgttgagtcctgatcaaacaacggtggaactgcctgttgtgagcctgacgaccaatggaggagccgtgttcccggtgaccagccctgtttaccccatcgcggctcagatgacaaacggagagattcgtatcattggttactgcctggctgtcatcaagagcgatctccccatcgacatcattggccagaacttcatgaccgggctcaaggtcgtcttcaaccgtgagaaatccgtcctgggctggcaaaagttcgactgttacaaggacgagaagatgacagacgacgggtcgagcgtcgggagcccgagcccatcgccggggccgaccactcacgtcttcccgcagccgcaggagagcgactcgccggcgggcagaacgcccatccccggcgcggcgccggtgccgcggtcgagcagcgcggcagctggcggccgtgcaggcttccggctcctgtcgtccatggcgctcttgctgctggctgctgctgctgcagctgttttctga

SEQ ID NO: 3461 - DNA, 1368 bp, Oryza sativa
atggaccccacctgtcatcctctttctcccctcttatctctatcctcttcgtcctctagttctgcacttccgcgcgcggatcgagttggctcgagtgctcgacggcggcacgaggagttcgacgccatccactccgacaaggccaaggcgctcctcgacacctaccgcatcggcgagctcatcaccaccggctccgggtacagctccgacaactccgtccacggcgcgtccaacctctcccagctcgcccccatccgcgaggccatcaaggccccggcgcccatcgcgctctccagcccgggcgacaaggtcccctgccaactcatcgacaagaaggagctctcccgcgacgtccgcctcttccgcttcgcgctgccgtcctttgaccaggtgctcggcctccccgtcggcaagcacatcttgatctgcgccagcatcgaagggaagctgtgcatgcgagcgtacacgccgacgagcatggtcgacgaggtcggccacttcgacctcttcatcaaggtgtacttcaagaacgagcaccccaagttccccaatggcgggctcatgacgcagtacctggacttgctccccgtgggcgcctacatcgacgtcaaggggccactcgaccacgtcgagtacaccggccgcggtgagttcgtcatcaacgacaagccgcagaacgcgcgggcgccggccggcgggaggagaggagatgcggggggcggcgcacttcgttgggcggcggcgcgtcattcatgcggaagcggccgaggcacgcgcgggtggaggtgtcgccggccgaggcggcggcggcggttgagaaggaacggcaacacaatctcaacggtggtccaatcggtcttgatctcgcggcagcggcggcgacgaacatgccgaggcacacggcgcaatcagttgcgcggaggcagcggcgtcctcctccctccagttctgcgtgtggatcgagtcggctcgacggcggcacgcggctgcagcggcgactggcgaggggaagaggaaggggcctccttcttcgtagggagggcgacgatggcggcctccatctcccccgtcgtcatctccataggcaggccgtgcagcgctggcgtgccgcccggagctcctcggcgtcgaggcggccgcggcggagacggcctcccgctgccgcccgccacggcttccatgacggagacgccactgaaggcaagagaggagctaggagttgatggtggaggcgcaggcggcggcggcggaggtggcgagggtggtggtggaggcggagttggtagcggcagcggcgcgagggatgtggcggtggcgggaggcgggagcggcggcggagtcggtggtggtgacgctggagagagatga

SEQ ID NO: 3462 - DNA, 834 bp, Oryza sativa
atggaagcagacgcgagccatacacccaccacctcctcctccgtctccgtctccttctcctcctcgtcgctgtccacttcctcctccacctcctccctcgtcgacaatggcgcgcaagaccggcccaagagctccaagcccaaacacgccgccaagaagcgcaagagagcggccgcggaggaacctgccaatgccgcccacggcgcaggggaggataccagcagctgcagcaccgacgacaacgcggcggcgagcggcaaggcgcaggcgggcggcggcggcggcggcgtcgacagcagcagcacctgcaccgccgcctcggcgccgaggagcggcttcaagcacccgtcgtaccgcggcgtgcgccgccggagctgggggaagtgggtgtcggagatccgggagccccgcaagaagtcgcgcatctggctgggtaccttccccaccgcggagattgcggcgcgcgcccacgacgtggccgcgctcgccatcaagggccggaacgcgcacctcaacttcccggacagcgcccacgagctgccccgcccggagtccacctccccggcagacatccaggccgccgccgccaaggctgccgccgaggtgcggtgcgaggaggagtcgtcgccgtcgtcgtcgcccaccgccgagcaacccgaggaggaagccgcctgccctgacacggtgcacgccgacggcggccaggacaatgctctcttcgacctacccgaccttcttctcgacctacgggacgggctctggtggtcgccggtgtggccggcggcactggcggccgaggagtacgacggcggcgacgccgttcgtgctcaatga

SEQ ID NO: 3463 - DNA, 843 bp, Oryza sativa
atgctggcgttcctggctcttgggctagcgctcctcctctccgccaccggccaggcgagcgcgcagaactgcggctgccagtcgaacatgtgctgcagcaaatgggggtactgcggcacgggcaaggactactgcggagatgggtgccgctctggcccgtgctacggcggcggcggcggtggaggaggaggaggcggaggtggtggaggcggaggcggaggcagcggcgtgtctgtagagagcgtggtcaccgaggcgttcttcaatgggatcaagaaccaggccccgaacggttgcgccggcaagaacttttacacacgacagtcgtttcttaacgctgcccactcctactcgggcttcgccagggaccgcaccaacgatgactccaagcgtgagatcgctgccttctttgcccacgtcactcatgagaccggacatatgtgctacatcaacgagataaacggggcgagcatggactactgcgacaagaacaacaagcagtggccgtgccagccggggaagaagtactacgggcgcgggccgctgcagatctcgtggaactacaactacgggcctgcggggcagaacatcgggttcgacgggctgagggacccggacagggtggcgcaggacccgacgatctccttcaagacggcgctctggttctggatgaacaacgtgcaccaggtgatgttgcaggggttcggcgccaccatccgggccatcaacggtgcgctcgagtgcaacggcaagaaccccggcgccgtcaacgcaagggtaaactactacaaagactactgccgccaattcggcgttgacccgggtggcaacctttactgttga

SEQ ID NO: 3464 - DNA, 1524 bp, Oryza sativa
atggccgactccggcgactcgtccccgcactccgccgcggccaccgacgacgcgcaccacgagggctcggaggcggcggcggcgcaagcggcgcccccgccaccggcgccgccggcraaggtgcggttgatggtgagctacggggggcgcatccagccgcggccgcacgaccaccagctctcgtacgtcaacggcgagacgaagatcctgtcgctcgagaggcccctccgcttcgccgacttcgccgcgcggttggccggcctcgcgggttctccgggggacttctgcgtcaagtaccagctccccggcgaggacctcgacgcgctcgtctccgtcaccaacgacgaggatctggagcacctcgtcctcgagtacgaccgcctccacctgctccgccccgcgccgggatctggcggcggctcgtcccgcggcggttccacgcccaggctcagggttttcctcttccccgtccagtcgcccacgccaccgcccccgccgcagccgtccggcctcctcgagcccaagcaggagcaacgccagtggttcgtcgacgcgctcaactccgtccatcagccgccgccaccgtcgccaccgcagccgaagcaggagtcggtctccgtgcagtcgccaccaccagcggttgtgccgatgccgcagccgccgccggtgttgccagcgccgacgggccccgactacctgttcggcctcgacaacggcttcgtcccgccgcccgcggtgaaggtgaaggaccccgccggtgacccgccgacggtgaaggacaacgtccccgtcgagatccccgccaagaacgacgaccgccacaccaccaaccccgtaagcgaccacgtcgttgtctccccggtcgtctctcccggcgagttccagcgccagatccaggggctcgagaagctacagttcgccgaaaccgccgcgcagcaaccaccaccaccamctggtyccgstamcgccgcgccgccgccggcggccctaccgagaaatggcagcgacgactccctcamccgggcctaccctyccgccaccgttaccccaamgccgccaacggccacgccggagtactacttgcccaagtaccaggagaagcccgctgctccgcctccatcatccgctccaccgccgacggccttcctaccggtgccgggaaggtatacatctgttgcccctggctctggcgctgaccatgcccccgtcttcttcatccccgcgccgccgcatggctacttcaccaccgccgctggccccggcgccacctccttccccgccgtctacgccgtcgcgcagcacaatggcaatgccaatgcgagcggcaatggcccttcccccgccgccgcgtcgaatgctcaggcctacgcgccgcaggtggcgtatgacagcaatggccacgccatctactacaccagcgtcctcccccagtatgcttcggctgtcagcggcgtgccggcggcggccaccgtgctcggcactgacccagccaagccggtggcggtgaaaccaacagtttcctga

SEQ ID NO: 3465 - DNA, 1437 bp, Oryza sativa
atgccgtcgtcgacggtgcgcgtggtgtcgacgcgcacggtgaagccaccgcctcggccgcgggagcgcatcccgctcacctcgtgggacgtcgccatgctctccgccaactacatccagaagggcctcctcttcgcgccgccgcattcctcctccaccgcgctgctctccaccaccgcccacgtcgtcgaacacctcgccgccgccctcgccgccacgctccgcgcctactaccccgtcgccggccgcttcgtcaccgagaagcgccccggcggcggcggctgctccgtctccatcgattgtgatggacagggcgtcgagatcgtccacgccgtcgccggcggcgtctcggtcgccgacgtcgtccctcccgacgccgacgtcccgtgcggtcttgtccactccttcttcccgctccgggacgccgtcaactacgacggccaccacctcccgctcttcgtcgtccaggtcaccgagctcgacgacggggtgttcgtcggcttcgcctacaaccacgcgctctccgacggcacggcgttctgggacatggtcaatgcgtgggccgagatagcgcgcgccaggctcacgacggcggcgccgccgccgccgacgtcgcgcccaccaccgttgctcaagcggtggtcgcccgaggaggacgacgacgccaccgtcgtgctgccgtacgccgacgtgtccgagctgatcgagcggctcgacacgccgccgctgcgcgagcggatggtccacttctcaccggagtccctggcggcgctcaaggagcgcgcgcgccaggagctcctggacgccggggacacggcgggcgcggcggccatcaccaagttccaggcgctaacctcgctgctatggcggtgcatcacgcgcgccaggtgttcgtcgccggaccaggagacggtgtgccgcgtggccatcaacaaccgcgggcgcytccgccsgccgctgccgagggagtacttcgggaacagcgtgtacgccatcggcacggaggcktcgccggtgcgcgcgtcggagctcgtgcaggagcgcgggcacgggtgggcggcggcggcggtggggcgcgccgtggcggcgcacacggacgcgggcatccgggcgcgcgtggcggcgtggggggcgaggccgacggtgtacacggcgaggtgcttcgacgcgtcgggggtgatggtggggagctcgccgcggttcgacatgtacgggtgcgacttcgggtgggggaaggcggtggcggcgcggagcgggaaggcgaacaagtccgacgggaaggcgtcgctgtacccggcgcgggacggcggaggcggcgtcgacgcggaggtggtgctggcgccggagcacatggcggcgctggagctcgacggcgagttctgggccgccgtcacgccggaccacgtgctgcgtgcgtgctcgtcaacaaaagcttga

SEQ ID NO: 3466 - DNA, 2060 bp, Oryza sativa
atggcatgcaatggctcacgagccgtcaggtttcagaatgacatggagctcccgcactggaaaacatcaagcgtgccggagtgcacgtcgtcgagcaggtcgacgaagcacggcaaggctcaacaccagcagcagcagcaccacgacccgaggaaatggcggcgaggcggcggcggcggcggcagcctcaaggaccgggtgctgtcgcgggccttctcggaggagctggagtcgctgatgagctccggggcgaaccacctcttcttcgacccgcgcgggcagttgatccacctgtggagcaagatcttcctcgccgcctgcctcgcctccctcttcgtcgacccgctcttcctctacctcacggggacgaggcagaacatgtgcatcgagctgaagtactcgctggcgttcacgctctccatgatccgctccctgctcgacctcttctacgccgcgcacatcttcttccgcttccgcaccgccttcatcgccccctcgtcgcgcgtgttcggcaggggcgagctcgtcatccagccctgcaagatcgccaggaggtacctcgccggcaccttctggttcgatctcgtcaccgcgctgcccctaccgcagttcgtgatatggattgtgataccgaagctgaaagagtccgcgacggccaaccggaagaacatcctccgcttcagcatcatcttccagtacctgccgcggctgttccagatcttcccgctctcgaggcagatcgtcatggccaccggcgtcatgacggagaccgcgtgggccggcgccgcctacaacctcatactctacatgctcgcgagccacgtgctgggagcactgtggtacctcttctcggtgcagaggcaggaggcgtgctggcgagaggcgtgccacgtggagggcccgtcgtgccagaccctgtttttcgactgcaagacggtcagcagcaacaggacgatgtggtacgagctgagcaacattacgagcttgtgcacgcccagcaatggcttctaccagttcggcatctacggcgaggcgctggacaacgggctgacgtcgtcgtccttcacgcagaagtacttctactgcttctggtgggggctgaagaacctgagctgcttggggcagaatctgtcgacgagcctgttcatcggggaaataacattcgcaaccgtcattggcgttcttgggctggtgctgtttgctctgctcatcggcaatatgcaagcgacgatggtgcggctggaggagtggcggacgaagcggacggacatggagcgatggatgaaccaccggcagataccgcagccgctgaagcagtgcgtgaggaggtaccaccagtacaagtggttggccacccgcggcgtcgacgaggaggcgttgctcgaggacctccccatggacatccgccgcgacatcaagcgccacctctgcctcgacctcgtccggagagtgccgctgttcgacgagatggacgagcggatgctggaggcgatctgcgagcggctgcggccggcgctgtacacgaggggcacgcggctggtgcgggagctggacccggtggactccatgctgttcatcatccgggggtacctcgactcgtacacgacgcaggggggcaggtcggggttcttcaactcgtgccgcatcggggcgggggagttctgcggggaggagctcctgccgtgggcgctggacccgcgccccgccgcgtcgctgccgctgtccacgcgcaccgtgcgggccgtgtcggaggtggaggcgttcgcgctcgtcgccgacgacctccggttcgtggcgtcgcagttccggcgcctgcacagcgcgcgcatccggcacaggttccgcttctactcccaccagtggcgcacgtgggcggcgtgcttcatccaggccgcctggcgccggaacaagcggcgccgcgcgtccatggagctcaggatgcgggagggcggcgaggcgcggccgggagggagcgtgaggtgtcgtcggcacagctgcgacggcaaagcgctcatcaagaaacccatggaaccggatttcaccgtcgaagaagaggactg

SEQ ID NO: 3467 - DNA, 1359 bp, Oryza sativa
atgaccaagatcgtggggacgctgggtcccaagtcgcgcgccgtcgacaccatctcctcctgcctcaaggccggcatgtcggttgccaggttcgatttctcgtggggagacgctgagtaccaccaggaaaccctcgaaaacctcaagctcgccatcaagtccaccaagaagctctgtgctgtcatgctcgacactgtcggcccggagttgcaggggcaggaggcctcctccgaattgctgcccatcaacttctccgggcttgctaaggctctgaaaccaggtgctacaatttttgtggggcaatacttgttcactggcagtgagactacttcagtttggttagaggtttctgaagttaaaggagatgatgtggtttgtgtgataaaaaattcggctactctggctggttcactgttcaccctgcattgttctcagattcatatcgacttacctacactgtctgatgaggacaaggaggttatcagaagatggggagctccaaacaagattgacttcctctctctgtcttatacaagacacgcggaagatgtgcgacagggtttgaatcattttgatgaaatcctgcaagaggcggatggtatcattctgtcaagaggaaaccttggaattgatcttccacctgaaaaggtgttttkgtttcaaaagtctgctctgcacaagtgcaacatggctggaaagcctgctgttgttactcgtgttgtggacagtatgactgacaacctcaggcctactcgtgcggaggctactgatgtggcaaatgctgtacttgacgggagtgatgccattctccttggtgctgagactctccgtggtctgtacccagttgagactatctcaattgtgggcaaaatttgcgctgaggcagagaaggtattcaaccaagatttatacttcaagcggactgtgaaatatgttggggagcccatgacccacttggagtctatcgcttcttctgcggtgcgagctgctatcaaagtgaaggcttctgtcattatttgcttcacatcatctggacgcgctgcaagactaattgccaagtacaggcccaccatgcctgttctatctgttgtcattcctcgtctgaaaacaaaccaactgaggtggagtttcactggcgcatttgaagcaagacaatcactcatagttagaggtctctttccgatgcttgctgatcctcgccatccagctgaatcgaccagcgctaccaatgagtcagttttgaaggttgctcttgaccatggcaaagcttccggtgtgatcaagtcgcatgatcgcgttgttgtctgccagaaagtgggtgattcctcggttgtgaagatcattgagctggacgattag

SEQ ID NO: 3468 - DNA, 2568 bp, Oryza sativa
atgcgcgcgcacgaggcgcctgtgaccgtgcggctgtggtggtggtggtggtacctctccgcctccttgtcctactcgtcggcggcgctccagctaaaccctagtcccgtcgccgccgccaccgcggttctcctgccgggccccgtgatgccgcttcttgatccaggaaagctgcctctttggcgcagctccggaggcagcagagggcttttgagaaagatgggttcttcaggttgctcagagatagtcgaattggtggatgagtcgaaggatgcccgtcctggtggtgtcacccacctgagggtgagagtgaagccggtgggtcaggagcatggagcgcggtcgtgctccgtcgaggatgatctcgataggctcattagatcgattaatgtgcgcacatccgcacgggcttctgggcagacgagcacggataggaggcttatcgcgctcgggaagtcgccgatatcgagctcggagattgttgagtctgtgagcctgaaacaggccctgaggaagatgtgcatctcgcaggcgtcggagatggccgccatgaagaggatgccgaagccgacggcggtgtcaaataccccagaagctggggcaattaagaagctttatacatctgttgtggttcaaaccaacaaggagcgggatgaaaagaataagtttggaaaagtgtccgttttgcctgagaaggatgtaataagttcatcggtgaagtcaacggaagccaagaacaaggtacggaacaaaagcccagctaagaaaaatgtgcgttcagcatctccaaccacaacaaaggtccagaaaaccagaatccaagatgtgatcagtaataagtcatctgaggcaagtgaagatttgcctgcaggtcctgcggtggctaaacagagaaagggcaaaatgaaaacatctagcccccgtgcagttcctgtgggcggttcacgcctggtgttccggagtaaaacctccaccaagaagaaggtcaaaccagaaccagctgctgcagtggtatctcacaagacttgtgaggcaaaaagttccaattctcaagctaataagaagcacgaggccctacaggatgaacccagaactccaacaccaatcaacaagaaggctgcggctagctctatcagcactgatggagctaattgtggcaccaaaggatgtggtgttggtgagatccatggttcaaagcccagtgagttgtcaagatcgaaggaaaagggtgaatgctcccaaagctcaaagagcagcatgggtgattatagcaccagcacaagcataagcgatgatagttatggtagtttcagtggcaatggctgcaggcctcacatgtcaaaagatgtgagatggggggccattaggcgcatggcaatccaacaagggagcctgggactgaagaacttcaagcttctcaaacaacttggttgtggagatattgggactgtttatctagctgaattggtgggttctgaatgcatgttcgcattgaaagttatggatatcgagtacctgataagtagaaagaagatgcttcgagcacaaactgagagggagatcctgcaaatgctcgaccacccatttcttccaactctgtattcttttttcacgaccgataatctgtcttgcctagtcatggagtattgccctggcggtgacctgcatgttctacgacagaaacagcctaccaggaccttttcagaagctgctgctaggttttatgttgctgaagttctcctagcattggaatatctacatatgttgggggtcatatatcgcgatctgaaaccagaaaacatacttgttcgtgaagatgggcacattatgctctctgatttcgatctgtccctgaggtgctcagtaaatccaatgcttgtaagggcctcatcagtaggaagagatgaacctagtagaccttctggcccttgtgcggaaagctgcattgatccactctgtatccaaccgtcatgggccaattcttcttgcttcacgcctcggctagtttcctctaccccttccaggccacggcggccgaggggtgagcctcagaagaaaccatcactgccacagcttgttgttgagccaactgatgcaaggtcaaattcgttcgtcggtacccatgaatatcttgcaccagagattatcagaggagatggccatggtagctcggtcgactggtggactcttggcatctttctctatgaattactctatggcaggacaccgttcaggggacccggcaatgaggagacactgacaaatgtggtctcgcaggggctgaagttccctgataaccctgctgtcagcttccatgcccgggatttgatcagagggttgcttgtgaaggatccggagtaccggctaggctcaacgaaaggagctgctgagatcaagcggcatcccttcttcgaaggcctgaactgggcattgatccgatggactgcaccgcctgagactccgaaaagcttcgacgcggcaagcctcacgacggcacggaagaagaaggaaggcaagtgcctggagttcaggctgaatggagacgacattgagtttgagctcttctag

SEQ ID NO: 3469 - DNA, 1434 bp, Oryza sativa
atggggaagctggtgagcaagagctggcaggagtcgaagctgctgtggcacatcgcgttcccggccatcctgacggccgtcttccagttctccatcggcttcgtcaccgtcggcttcgtgggccacatcggccaggtcgagctcgccgccgtcaccgtcgtcgagaacgtcatcgagggcttcgcctacggtgtcctgctaggcatggggagtgcgttggagacgttgtgcgggcaggcggtgggtgctgggcaggtgtccatgctaggcgtctacatccaacgctcatggatcatctgtggcgccaccgctgtcatcctcaccccgacctacgtcttcaccgccggcatcctcatagggcttcgccagcccaccgacatcgccgccgttgccggcacctacacccgttgggtcatcccgcagctcttcgcctacgctgccaacttccctctccagaagttctttcaatcgcagagcaaggtgtgggccatgacggccatctccggcatcgccctggcgctccacgttgtgctcaactacatcttcctcacccgcctcggccacggcctcgtcgccgccgctctcatcggcaatgtcacctggtggctcatcattctcgcccagttcatctacctcgtctccggctgcttcccggaggcttggaaggggttctccatgctcgccttcaagaacctcgccgccttcgtcaagctctcgctcgcctccgccatcatgctctgcttggagctttggtactacacagcagtgctcatccttgtcggcctcctaaaggatgccaaactccaggttgacgtcatgtctgtctgcatcaattaccagctctggaccttgatggttgcactgggcttcaatgcagcagtgagcgtgagggtgtcgaacgagctgggcgcgaaccggccgaaggcggccaagttcgcggtggcgatggcggtgtcgacgtcggcgatcgtcggcgccgttttcatggccgtgttcttcatttggaggacgcagctgccgcgcttcttcagcgacgacgccgacgtggtccgtgagtccgccaagctcggctacctcctcgccgcaaccatcttcctcaacagcatccagcccgtcctctctggtgtggcgataggagcagggtggcaatcactcgtggcgttcataaacataggctgctactacctggttggcatcccactgggtgtcctctttggcttcaagctgaagctcgatgcaatggggatttgggtgggtatgtcacttggcacgctgcttcagacagccatactggccttcatttccttcaggacaaaatgggagagacaggccatgatggctgaggagaggatcagagagtggggagggaggaacgacgacgcgctgccgtccacgacgacgccgacggctgatgatcataacgtagatagatga

SEQ ID NO: 3470 - DNA, 2187 bp, Oryza sativa
atggcagcgaaggctcgtgcaaggtcgccggactttgcacggcaattctggcctgtgctgtgccatgccttcagcgaatgcagcctgatcataatgctctttgtgaccgccgtggtgtcattcacggccacaaggtttgcacgcatctggagcctacgaccaccgtgcatcctgtgctcaaggttggatcgcctcctgcatggaaacacctggttctctgaagatctgatctgtgctgcacacaagttggaaatctcgcaattggagtattgccagagtcacaacaagctcgcacactctgatgatctgtgtgaaaggtgcctactttcatgtgctggtttggatgagacgtttaagaagacacggcatacacacaagctacctgagcttgcaaatggcatagttccagatgatgtgagcacagtgaaggagagaagcatagacatgactagtgtagggcattcttcagatgaaggttctgaggacttgtcttatggaggctacagtaagctgaatgtccgccatgattcagagtctgagaaccgcatctcggatgatgatgaagatgaagatggtaattcaatgattcacaaagctacgcagagaagcagagacttcttatttcatgattcgcaactacaacctatgatcagtgacaccaacagcttgtccatgcatccttctgagaatgttgttcttgcagagccgatgaataccgctcctgtgccagtgagtactgcagcaaaaactgacaatgtggccactggcaccaaccttgttagtgcagcgaaatcttcagagcatattgcgcaaggttcaagggaaattagcttgagcaatgtcaatgtaagtggaaacaatcatgacgtgcaaccgaagattgtgcctgaacaagtttgcgcagagcttccgaaagagaaaacttttctggttggtattgaggaagttgacgattcagcgggtatttcaggaagccctgacgaggaagttgctaagggttttgttgcttctgcaaatgcaggaatgagttcagttttagatgcctgtatcaaccgcaaaaacagtatgaagagtgcttctcgtcgtagaagcaaccttcaatctcctcgatggtctgaaataatctctgctaaggataacagttcaagaactaaccaagaagtcaagacattcctgtcccagatgtcttctgcgcgaggctttgatggtccttggagtgaggtggccgctagtcctagaatcacacagattgatgataaacaatatgatgccactgggagcagacaatttcttgagactaactactcaaatatggaaccatttgatgtccatgctactagtgaagatgaaggtgatacctcactcgaaggcctgaagcagaaggttgagcttggcaagaaaaaaatgagtatcctttataaggagtttgaggcagagcggagtgcttcagcggtggctgcgagtgaagcaatggctatgatcaatagattgcaggaagaaaaggcttcaatgcacatggaggcacttcagtacctcaggatgatggaagagcaggctgatcatgaccaagaagcaattgaaaggctaaatgacttgcttacagaaagggagaaagaaatgcttgacctggaagctgaacttgacaattatcggaggcttcatgaaccatttggttgcaagtttgattttactgatggagatatggcatctggagtcttggatagctcagatttcatgagggataccatgtttgattttgaggatgaaaaggcaaatattttgaaatccttgagcaaattggaggaaacactgggcatgtcttccacagataggcataattttggtggcacatatgatagtctacagaacatgtcagtattgcatccggaacactggagcggtgagccggtttcttctcaacaaattgatgaaaatcaaagtgttgattccggctcatgttctcacctagatgatggcagaatcagttctatgacgagcgttaaacatgagatttcacttctaaatactagattcacggcacttgaaacagatcaaaagtttctcaaacagatattaagctctctaaaatgtagtgatgatggcgtacaatgtgttcaagagataactgcacatttgagagagttgcgaagaatcatgactgagcaaagagagagggcagttttatga

SEQ ID NO: 3471 - DNA, 1485 bp, Oryza sativa
atgaggaaggcggcggcggcggcggtcgcggcagcggcggcggtcggcgtggcgctgctggtgcgccggcagctgcgggaggcgaagcggtggggccgggccgacgcggtgctgcgggagctggaggagcggtgcgcggcgccgccggggcggctgcggcaggtggcggacgcgatggccgtcgagatgcacgccgggctcgcctccgagggcgggagcaaactcaagatgatcatcagctacgtcgacgccctcccttccggggaagagaagggggtgttttatgcgcttgaccttggaggtacaaatttccgtgttttacgggttcaattaggtggcaaggaagggagagttatcaagcaagaacatgacgagatttcaattcctccgcatctgatgactggtggttcaaatgaactatttgattttattgcttcttctttagcaaaatttgttgcttcagagggtgaagactttcatcttgctgaggggaggcagagagaacttggctttacgttctctttcccagtaaagcaaacttcaattgcatctggcactcttattaattggactaagggtttttcgattgatgaaacggttggtgaagatgttgtgactgaattaaccaaggctcttgaacgccaggggcttgatatgaaagtcacagcattgataaatgatactatagggacattggctggtgggagatatgatgataatgatgtcattgctgctgttatactgggaacaggtactaatgcagcatacgtggaacgtgccaatgcaattcctaaatggcatgacctcctgccgaagtcaggagatatggtaataaatatggaatgggggaacttcaggtcatcccatcttcctttgactgaatttgatcaagcattagatgctgaaagtttgaatcctggtgaacaggtttacgaaaagttgatctctggcatgtatttgggagaaattgttcgtagagtcctattaaagatggctgaagaagcttctctttttggtgatgaagtaccaccaaaactcaagattccatttattatcaggactccatacatgtcaatgatgcactgcgacagatcacctgatctcagaacagttggagcgaaactgaaagatatcctgggggtccaaaacacctcccttaaaacaagaaggcttgtggtggatgtctgcgacatcgttgcgaaacgcgccgctcaccttgctgctgcagggatacacgggatcctgaagaagcttgggcgcgacgtccccaacaccgacaagcagaggacggtgatcgccgtcgacggtgggctctacgagcactacaccatcttcgccgagtgcgtggagagcaccctgagggacatgcttggggaggatgtgtcctccaccattgtcatcaagctcgccaaggacgggtcaggcattggcgctgctctccttgctgcggctcattctcaataccgtgaggctgaggagctctag

SEQ ID NO: 3472 - DNA, 1095 bp, Oryza sativa
atgatttgctgcggcggcgaggaggaggagacgtacgctccccgtgcagccagtcgcagtcgcagcaggcgcccgacacctgcgacgcagtacaatgcaggccctcgtaagccaagaggaccaaatgcacccaggagcggcggcccgccaccgaaggtgctctccatcgacgtgccagccatctccatgggcgagctgaacaacatcaccggacactttggacagagtgccttgataggagaaggttcgtacggtcgaatctacagggcggtgctgacctccggggagccggttgccataaaaaagcttgatcccagcgtgtcaagcgactctgaagcagacttctctgctcagctgtcaatggtttcgaggctcaagaacgagtatttcatccggctgatgggctactacctggatgcaaaccgaagaatcctggtctaccagtttgccacgcacggctccctgcatgacatcctacacgggaagaagggcgtgagggacgcggcgccggggccggcgctgaactggagccagcgggtgaaggtggcgtacggcgccgcgagagggctcgagtacctccacgagaaggcccagccgcccatcgtccaccgcgacgtgcggtcgagcaacgttctcctcttcgacggctacgagtccaagctcgccgacttcaacctcaccacccagcctcccgacggcgccgcgcggttgcactccacccgcgtcctcggaaccttcggctaccacgcgcccgagtacgcgatgacgggacagcttaatcagaagagcgatgtgtacagtttcggagtcatcctactggagttactgaccggcaggaagccagtggaccataccatgccgaagagacagcagagtcttgtaacctgggcgacgccaaggttgagcgaggacaaggtgaggcagtgcgtggatccgaaactcggggatgactatcctccaaaagcagttgccaagatggcggcggtagcggcgttgtgcgtgcaatacgagtcagatttccggccgaacatgaccatcgtggtgaaggcgctgcagccacttctcagcaagccagccggagcaggagggccctag

SEQ ID NO: 3473 - DNA, 1173 bp, Oryza sativa
atggctgagcaggctaatcaaccgactgtccttcagaagttcggtggccagttccaccttggctccagcttttctgaaggtgtacgggctcgcaacatctgcccatctgtctcatcctatgacaggcgctttaccacaaggagctacatgacccagggccttgtcaatggtggcatcaacgtcccaatgatgtcgtcctctccaatttttgctaatgctccagctgagaaaggtggcaaaaacttcatgattgatttcctcatgggtggagtgtcagccgcagtttcaaagactgctgctgctccgattgagcgtgtgaagctgcttatccagaaccaggatgaaatgatcaaggctggtaggctctcagagccatacaagggtattggggactgcttcggacgcactatcaaggatgagggttttgcttcattgtggagaggaaacactgccaatgtgatccgttactttcccaacccaggtaacctgccaattttcatgatggctttgaactttgctttcaaggattacttcaagaggctgttcaacttcaagaaagacaaggatggttactggaagtggtttggtggcaaccttgcctctggtggtgctgctggtgcttcatctctgttttttgtgtactcccttgactatgctaggacaaggttggccaatgatgcgaaggctgccaagggaggaggtgaaaggcagttcaatggccttgtggatgtttaccgcaagactctcaagtcagatggcattgctgggttgtaccgtggatttaacatctcatgtgttggaatcattgtctaccgtggtctgtactttggaatgtatgattctctgaagccagttgtactcactgggtctctccaggacaatttctttgcaagctttgcccttgggtggctgatcaccaacggtgcaggtcttgcctcttaccccattgataccgtccgcagaaggatgatgatgacctctggagaggctgtcaagtacaagagctccatggatgctttctcccagatcctgaagaacgagggtgccaagtcactgttcaagggtgctggtgccaacatcctacgtgccattgctggtgctggtgtgctctcaggctatgaccagctgcagatcctcttctttggaaagaagtacggctcgggcggtgcctaa

SEQ ID NO: 3474 - DNA, 1194 bp, Oryza sativa
atgcggcgggtgctcaccgccgagatcctctcggcggccaccgaacamcgcctcgcgcgcgcgcggggggaagaggccgaccacctcgtccggtacgtcctcgtgcggtgcggccgcgacggcgccgccgtcgacgtgcgccacgtcgccaggcacttctgcggcaacgtcatccgccggctcaccctagggcgccgccatttccgcgagccgcgggcggacgacgaggacgccgcggcgcccgggcgcgacgaggcggagcacgtggacgcgctcttcgcgacgctcaactacctcgacgcgttctgcgtctccgactacttcccggcgctggtcggcctcgacctgacggccaagagaaggtcatcaagaaggctgcacgaccccgtggtggaggagagggtggaggagtggcggctgctgcggaaggccggcgagcggcgcgacgtcgccgacttcctcgacgtgctcgcctcgctcgacgacgcggcggggcggccgctgctcaccgtggaggagatcaaggcgcagaccatagacatcatgatcgccaccgtggacaacccatcgaacgcagtggagtgggcgctggcggagatgatgaacaagccggaggtgatgcggaaggccatggacgagctggacacggtggtcggccgcgaccggctggtgcaggagagcgacgtccgcgacctcaactacctcaaggcgtgcatccgcgaggccttccgcctgcacccctaccaccccttcaacccgccgcgcgtcgccatggccgacaccaccatcgccggctacaccatccccaagggcagccaggtcatcctcagccgcgtcgggctcggccggaaccccagggtgtgggacgacccgctcgagttccggccggagcgtcacctgtcgccgtaccctgcaggcggccgtggcgacgccggcgtggtggcgctcacggaggcggagctgcggttcgtgtcgttcagcacccggaggckggggtgccccggggtgtcgctgggtaccctgatcaccgtgacgctgttcgcgaggctcctgcaggggttcgagtggagcaagccggccggcgtggagagggttgagctgcgggaggaggcggcgagcctggtgttggctcagccgctggttttgcaggcgacgccgcggttggctgctcacctctacggcgccggcaagtag

SEQ ID NO: 3475 - DNA, 1287 bp, Oryza sativa
atggggaggtctccttgctgcgacgagaacggcctcaagaagggcccctggaccacggaggaagatgagaagctcatggagtacatccagaagaacggccatggcagctggagagcgctgcctaagcttgcagggctgaacaggtgtggcaagagctgcaggctaagatggacgaactacctgaggccagacatcaagagaggaaagttcacctctgccgagaaggataccatcctccagcttcacgccgttcttggcaacaagtggtcagccattgccaagcacctcccaggtaggactgacaacgagatcaagaactactggaacacacacctgaagaaggatctgatccagaagggcatcgacccgacgacgcaccggccgaggaccgacttcttcgccgcgctgccgcagctgatcgcgctcgccaacctccgccagctcgtgggccagctgccgtgggacgaccccgccgccgcggccgccgggctgcagcaagccgaggcggcccaggcagcgaagttcggacagtacctgcacctgcaggcgctgctccagcctccgccgccgtccgccgcgamtagccccagatcaggctgcatcggcggcgccgccgccgccatgccgggcggcgacatggagcagatgggcgcgggactgcttagcccgccggcgatgtcgtccgcggccttgtcgccgatgtcgacgtcgtccttgtcgccgctgccttcgccgatgtcgtccacggccttgtccccgttgcctccttcgagcttctttggcaatggtggccaaggctcattcctcgctggacaattgcctaacatccaaatgcatggcagctcgttgttcgaccagtcggccgccatcatcaacgacgccaaccacaaccaagattacgctgcaagcactggcgagagggagatcatcaatggcgccacgaagacgacgacgacgacgctgctgccggaaggctctcttccgccgctcgccgactaccccaccatctccaacctcggtgatgtctacagcaccccaagctgcgatggcaacatcactgaattccctctcttgcctgacgccttattcgacgagttgatgagagactatatttccaattgctttctggaagattggaaaaatacagactctaagaatttagatgtatctgatatattacagattcaagttgcagttaagattttgccattagcttctctcagtggcattgggcctgaaccacacctgtcagtgagagagtcagcggctcagtgccaaaaggcataa

SEQ ID NO: 3476 - DNA, 1377 bp, Oryza sativa
atggatccgttcctcaagaagttcttcccggtggtgttccggaagaagaacgacgacggccagaacaactactgcaagtacgacaaccagggcctctcggcgttcacctcctccctctacctcgccggcctcgtctcctcccttgccgcctcgccggtgacgaggaactacggccgccgcgccagcatcgtctgcggcggcctcagcttcctcgccggcgccacgctcaacgccgccgccgttaacctcgtcatgctcatcctcggccgcatcctgctcggcgtcggcatcggcttcggcaaccaggccgtgccgctgtacctgtcggaaatggcgccggcgcacctccgcggcgcgctgaacatgatgttccagctggcgacgacgctgggcatcttcacggcgaacatgatcaactacgggacgcagcacatcaggccgtgggggtggcggctctcgctggggctcgcggcggcgccggcgctgctgatgaccgtcggcgggctgctcctgccggagacgcccaacagcctgatcgagcgcgggcgcgtcgaggagggccgccgcgtgctggagcgcatccggggcaccgccgacgtggacgccgagttcacggacatggcggaggcgagcgagctcgcaaactccatcgagcacccgttccgcaacatcctggagccgcgcaaccggccgcagctggtgatggcggtgtgcatgccggcgttccagatcctgacgggcatcaactccatcctcttctacgcgcccgtgctgttccagagcatgggcttcggcggcagcgcgtcgctctactcctcagtcctcaccggcgccgtcctcttctcctccaccatcatctccatctccaccgtcgaccgcctcggccgccgcaagctcctcatcagcggcggcatccaaatgatcatctgccaggtgatagtggcggtgatcttgggggtgaagttcgggacggacaaggagctgacgaggagctactcgatcgcggtggtggtggtgatctgcctgttcgtgctggcgttcgggtggtcgtgggggccgctggggtggacggtgccgagcgagatcttcccgctggagacgaggtcggcggggcagagcatcacggtggcggtgaacctcttcttcaccttcgtcatcgcgcaggcgttcctgtccctgctctgcgcgctcaagttcggcatcttcctcttcttcgccgggtggatcaccgtcatgaccgtcttcgtccacgtcttcctgccggagaccaagggcgtgcccatcgaggagatggtgctcctatggaggaagcactggttctggaagaaggtcatgcccgacctgccgctcgaggacggcgacagtcatcacaagtga

SEQ ID NO: 3477 - DNA, 1290 bp, Oryza sativa
atggagagtgaatactctttgctgctgatggatgatcgatcgatcaacgctgcatttgatcatccgccaggtcctactcataggtgttattggagcttttctcgcttctggttacagcaaaattctaacctcaagcgctctaagggatatgaacaaggcgagctctcattagcacatcactgttcaatgcaaattaatctggttgttttcactgtcttcacaccatccctgatgtttgctagcctggctaagacggtcacactttctgacgtcatttcttggtggtttatgccagttaatataggaatcacattcattgttggtggcactctaggctggatagcatgtaaaatactgaaaccaccacagcatttccgaggaatgatcattgccttctgttcagcaggaaatcttggcaacttgctcttgatcattgttccagcagtctgtgacgaagacggcaacccgttcggaaaagaccggagcctttgccgctctcgtgggctctcctactcatcattatccatggctcttggtggcttattcatatggacacatacatacagcctcatgcagaaggcaggcaaaatgtaccacaagatgcagtccaaaagcatccagtgcccggccgacagcgatgaagagcatcatcctgcacaaggtcatgatcaagtaaaattagacggtgaaactgcttacgctgatgaggaggcggctcttctggtgtcagctaaactggctcctgaacacaatgaagagaaccaaatggaagctccacttctgacttgcgagagagagattgctaacaaaggaggattctggacaaacctgaaggaaaccgtccaccaggttgtcgaggagctgatggcaccaccaactgtatctgcaatacttggatttgttgttggcctagtcccatggttgaaatctcttgtcatcggcaatggcgccccactgagagtcatccaggagtccctccaactaatgggcatatttcaagtgtttcctcagcctttactcacggttcgtttgtctttcagcaatggcacgattccttgcatcaccctaatcctaggggggaatctgacacaagggctacggaagtcggtgctgaagcgtacggtgatcatcacgatcgtctgcatacgctacgtgatccaacccttgatcgggatggcggttgtccatgctgcctatggggttggattcttgccacacgatccattgtaccgctacgtgctgatgatgcagttcgcgctgccacctgcaatgaacatcggtagcccctga

SEQ ID NO: 3478 - DNA, 657 bp, Oryza sativa
atgacgaaattaacaagactaaccgatccatcagagacaatccgggaaggaatagtggttaagcttgaccgactccgggccsccgggaaagggaaggaggtgctcagcggcgtggtcttccagccattcgaggagctcaaagggggagctctccctcgtcccccagggccarggaccagtctccttgctaggcaaaagttcgtcgacgattgcgaggccgcaattgtggagttcaatgcatcgtacgcgtaccactcccttttcgcctactttgaccgtgacaacgttgctctcaagggattcgccaaattcttcaaagaatccagcgatgaggagagggatcacgcagagaaactcatgaagtaccagaacatgcgtggaggcagggtgcggctccagtccatcgtcacacccttgacagagttcgaccatcctgagaaaggggatgccttgtatgctatggagttggccttggctctcgaaaagcttgtaaatgagaagttgcacaacctgcacagtgtggcatcaaggtgcaatgatccacagctgaccgacttcgttgagagtgaattccttgaggagcaggggtgtggcactttgatcagaagctgcttgaggaagaagcttgaatggaggagackgtgtgaagggcagtag

SEQ ID NO: 3479 - DNA, 1170 bp, Oryza sativa
atggccaaggcgatgcttagcttgctggtgcacctccacgccgcgctcctgttcgtcccggagcccgccggcgccggcgccgtgtacagcgtcgtgcgctacggcgcccgcggcgacggcgcgtccgactcgacgcggccgttcctccgcgcgtgggccgacgcgtgccgctcgccgcgcccggccacggtcagccgcgccgtcgcgttctccatcgccggcacggtgktcgcgcccgccgggtacgcctgggacggcgccacggccgggcagtggatcacgttcgagtccgtcgtcggcctcaccgtctccggcggcaccctcgacggccgcggcgacgccctctgggcctgcaagaagcagcagccgcgcggccactgccccaccggcgcatcgtcgctgacgatctcgaacgcgaggaacgtggtggtggagggggtgaggtcggtgagcagcgagctgttccacgtggtggtgctgcagagccgcggggtgacggtgcggcgggtgacggtggaggcgccggcggacagcccgaacacggacgggatacacatccacaagtcgacgaacgtggcggtgtacgacgccgccatccgcaccggcgacgactgcgtctccgtcggccccggcaactccaacctctggatcgagcgcgtcgcgtgcggccccggccacggcatcagcattgggagcctggggaagcagcaggggatggcggtggaggcggtgcagaacgtgacggtgaagacgacgtggttcaccggcacgaccaacggcctgcggatcaaaacatggggtaactccaagcggggcttcgtcaggggcgtcacgttctcggactccaccatggccggcgtcggcaaccccatcatcatcgaccagcactactgccccgacggcggctgcggcggcgccgcgcgcgggagcagctccgggatcaagatcagcgaggtggagtacgccgacgtgcggggctcgtcggcaacgcccgtggccgtcagcttcgactgcagccggagcaacccgtgcagcgggatcaggctccgggacttgaggctcacgtaccaggggaagagcggccgcctgcaggccgccggggcggtgtcctcctgccgcaacgcgcagggcacggcctctggcctcgtcgtgccgccgagctgcctctga

SEQ ID NO: 3480 - DNA, 2388 bp, Oryza sativa
atgacgcagatcatcaacgtgccgcgttcaactctcagatcattttggtcttctggcttatttggaaacaacgttaatgcaaaaatcttccaatctgaatccaatacgcctctggagtctggaggatctattgtacttgttggcagccttgttttattagttacagttgtactgttctggccaggttcttttgccgtcccgggaaagagctcctgccttgcttgtccaaaaaagaagaacaagggccagatgaatatggcctacctcccagttctcatctacttgctgctcatctctttctgcaaatgcgatgatcagctgacacaggtaaatcgattgatctcccccagcggcaagctcgtctccaagagcggcgtctttgcactcggtttcttctccccagccacttccaaccagagcttattcctcggcatatggtataacaacatcccagagcgaacatacgtttgggttgctaaccgtgacaacccaatcaccacaccttcatcagcgatgctcgccatcagcaatagttctgaccttgtattgtcagattccaaaggtcgcaccgtctggacgacaatggcaaatgtcaccggaggtgacggagcttatgcagtgctgctcgactcaggaaacttggttctccggctgtcaaacaatgtaaccatatggcaaagtttcgatcacccaactgacaccattctgtcgaacatgaagattctgctgaggtacaaggagcaagtaggcatgcggcttgtagcttggaagggccttgatgatccaacaacgggggacttctcatgcagcggagaccccagctcagaccttcaggtcttcgtctggcacgggaccaagccatattaccgctccattgtgcttgacagtgtgtgggtgtccggcaaagcatatggcagcagcacctccttcatgtaccaaacatatgtaaacacacaggatgagttctatgttatctacaccacctctgatggctcaccatacatgcgcatcatgcttgactacacgggcaccttcaggctcctgagttggaacgtcaactcgtcatcatgggcaatctattctcaacgcccagcagccattggcgattgtgatccctacggctcgtgtggcccattcggttactgtgacttcacgtcggacagaagctttgaggagtgcgcggctgagtgtagccgaaactgctcatgcacggcctatgcttacaccaacttgaccataaccggctctcccggtaccacagccagccagtcaaggtgcttgctttgggttggtgagcttgttgacatggcgaggaacaatcttggtgacaacttgtacctccggttggccgactctccaggtcataaaaagagcaggtatgtagtcaaggttgtagtccccattatagcatgcgtgctaatgctcacgtgcatataccttgtctggaaatggatatcaaaaggtgaaaagagaaataatgaaaatcagaatagagcgatgctaggaaactttagagcttctcatgaagtatatgagcaaaatcaggaattcccatgtattaattttgaagatgttgtcactgcaacaaacaattttagtgattcaaatatgcttggagaaggaggtttcggcaaggtttataagggcaagttgggaggtggcaaagaaattgcggttaaaagactcagtacaggttccacacagggattagagcattttacaaatgaagtggtccttattgccaaattgcagcacaaaaatcttgttaggcttcttggttgctgcattcatggagatgaaaagctccttatttatgaatacttaccaaacaaaagcttggataacttcctttttgatccagcaagtaaatttattcttgattggccaacaaggttcaagataatcaaaggagtagctagaggacttctttatctccaccaagattcaaggttaactataattcatagagatctcaaaacaagcaacatcttgttggatgcggatatgagtcctaagatatcggattttggtatggcaagaatctttggcggaaaccagcaagaagcaaatactaaccgagttgttggaacatacggttacatgtctcctgaatacgcaatggatggggtcttttcagtcaagtctgacatatatagctttggtgttatactcttggagattgtaagcggtttgaagattagcttacctcagctgatggattttcccaacttgttggcctatgcatggagattatggaaggatgataagaccatggatttggtggactcatccattgctgagagttgctcaaaaaacgaggctcactcaataccaccaattaaaagtctgaaaaatatcctcaatctaaaaacttcgaccaagtcctag

SEQ ID NO: 3481 - DNA, 2664 bp, Oryza sativa
atgcaaggaaaaaaagaatcaacagttatggaagcagcaaccaccaacattttctaccgtcccgtcatcttcttctccgtgctcctttgtttccaataccgtgccgccggcgttgcatcggacacgctcagcaatggccgcaacctcactgatggcgacacgctcgtgtcagccaatggctccttcactctggggttcttctcacccggcttgccaagcaggagatacctcgcgatatggttctccgagtcggcggacgccgtctgggtggccaaccgcgacagcccactgaacgacaccgccggcgtagtggttatcgatggcacgggcgggctcgtcctgctcgacggcgccgccggccaggccgcctggtcgtcgaacacgactggctcgtctccatcggtggcggtgcagctgctcgagtctgggaacctcgtcgtgcgcgaccagggcagcggcgacgtgctgtggcagtcgttcgacaacccgtcgaacaccctgatcgccggcatgaggctcggcaggaacccacggaccggcgccgagtggtccctmacgtcgtggcgcgcgcccgacgacccggcgacggggggctgccgccgcgtgatggacacgagagggctagcggactgcgtctcgtggtgcggcgccggcaagaagtaccgcacggggccatggaacgggctgtggttcagcggtgtcccggagatggcatcgtactcgtccatgttcgcgaaccaggtggtggtcaagcccgacgagatcgcctacgtcttcaccgccgccaccgccgcggcccccttctcccgcctcgtgctgagtgaggccggcgtgatccagcgcctcgtgtgggatcccagcagcaaggggtggaacacgttcgcgcaggcgccgcgcgacgtatgcgacgactacgccaagtgcggcgcgttcgggctgtgcaacgtgaacaccgcgtcgacgctcttctgcagctgcatggcggggttcagcccgatgttcccctcccagtggtccatgagggagacctccggtggttgccggaggaacgcgccgctggagtgcggcaacgggagcaccacggacgggttcgtgccggtgcgcggcgtgaagctccccgacacggacaacgccacggtggacacgggcgccacgcttgacgagtgcagggcgaggtgcttcgccaactgttcctgcgtcgcctacgccgccgcggacatccgaggcgccggcggcggcagcggatgcgtgatgtggacgggtgacgtcattgacgttcggtatgtcgacaaagggcaggatctctatttgaggctggcaaagcctgaactagttaacaataagaagaggactgtgataaaagttctgctcccagttacagcagcatgtttgcttctgctgatgagcatgttccttgtgtggttacgcaagtgcagaggcaaacgtcagaataaggttgtccagaaaaggatgctaggatacttgagtgcattaaatgaacttggtgatgaaaatttagaactcccgtttgtcagttttggagacattgctgctgcaacaaataatttttctgacgacaacatgctcggacaaggtggcttcggaaaggtttataagggcatgctgggtgataacaaagaagtggcaattaaaaggcttagcaagggttctggacaaggagtagaagagttcagaaatgaagttgttctaattgccaaattgcagcacaggaacctcgttaaacttcttggctgttgcatacatggagatgagaagctgctaatttatgaatacttgccaaacaaaagcttggaagctttcattttcggtactgttcaaaaacataccatgcgatccaataaacttcactccatgcttactgatagagaaattttattgttcttgaaaaagtatctcaagatacctaaattttacactaaaatttttggtaccttgagatatttagtatctgaagatcctgcaagtaagtatgctcttgattggccaacaaggtttaagataatcaaaggagtagctagaggacttctttatctccaccaagactcaaggttgacaataattcatagagatctcaaatcaagcaacatcttgttggatgtggatatgagccctaagatatctgattttggtatggcaagaatcttcggtggcaaccagcaagaagccaatactaaccgagttgttggaacatatggttacatgtctcctgaatatgcaatggatggcgccttttcagtcaagtccgacacatatagctatggtgttatactcttggagattgtaagtggtctgaagattagcttacctcggctgatggactttcccaacctattagcttatgcatggagcttatggaaggatgacaaggccatggatttggtggattcatccattgctgagagttgctcaaaaatggaagttttactatgtatccacatagggctgttgtgcgtgcaagataatccaaataataggccacccatgtcttctgttgttttcatgttagagaatgaagctgcagcgcttccagctccaatacaacctgtgtattttgcacatagggcctctggagccaaacaatcaggaggaaataccagcagctctaataataacatgagcctcacggtattagaaggacggtag

SEQ ID NO: 3482 - DNA, 1020 bp, Oryza sativa
atggcgaggaggagcagcagcagagcgtgcgcggccatggcgacggccgccgtctttgcgctgctggccgcgacggcgacggcgtcggggctcgtacgggtggagcacccggccaagagcgacgggtcgctgagcctgctcgtcgtcggcgactggggccggaagggcacgtacaaccaatccagggtcgccgagcagatggggaaggttggggagaagctaaatatagacttcgtcatatccaccggtgacaatttctacgaggatggactcactggcgtcgatgaccaggcgtttgaggaatcgtttaccgatatctacacggcaaagagcttgcagaagccatggtacctggtgctgggaaatcatgactacaggggtgatgtgctagcacagcttagcccagtcttgcgaaagatcgaccagcgattcatttgcatgaggtcgttcattgttaatgcagagattgtggatttcttctttatcgacacaactccatttcagctgaaatattggactcgccctaaagaccatcattatgactggagaggagtggcacctcgacaaaaatacataactaatctacttaaggatatggatgaggcaatgaagaaatcaacagcgaagtggaagattgctgttgggcatcataccattaggagcgtcagtgaccatggtgacaccaaggagcttctgcaacttctacttccagttctgaaggtcaatggcatcgacttctacatcaatgggcacgaccactgcctggaacacattagcagcagagacagtcctatccaatacttcacaagtggaggtggttcaaaagcatggagaggagtcttgcagccaaattctgataagctccagttcttttacgatggacaagggttcatgtccctccagataaaccaggaccaagctgacttcatattttatgatgtttctgggaacatcttgtacaagtggagcaagagcaaagcaaactacctccagccctccacctatatcactgaagcatga

SEQ ID NO: 3483 - DNA, 1287 bp, Oryza sativa
atggccatggctcgctgttccttgctaccgatcttggccgccgtcctcttggcggcgtcgctgtcgctgccaccgcgcgctgccgcgtacgccgccatggtggacagcctcctccccgcgtcagcgacggctctctccttcgaggaaggctacacccagctgttcggcgactccaacctcatgctccacggcgacgggaagagagtgcacatctccctcgacgagcggacaggcgccgggttcgcctcgcagggcgcgtaccaccacgggttcttcagcgccagcatcaagcttcccgccgaccacactgccggcgtcgtcgtcgctttctacatgtcgaacggggacgtgtacgagaggacgcacgacgagctggacttcgagttcctggggaacgtgagggggagggagtggagggtgcagaccaacgtgtacggcaacggcagcacggcggccggccgggaggagaggtacggcctctggttcgaccccacccaggacttccaccgctacgccatccgctggagccatgacacgatcatattctacgttgacgagacgccgatcagggaggtggtgaggacggcgtccatgggcgcgcagttcccgtccaagcccatgtcgctgtacgccaccatctgggacggctcgagctgggccacctcgggcggccggtacaaggtgaactacaagtacgcgccctacgtcgccgagttcaccgacctcctgctccacggctgccccgccggctccccgccgccgtgcgagggcgccgccgcctccgcgacgatgccgcccgggcagcggtcggcgatggagaggttccgggcgaggcacatgacgtacgggtactgctacgaccgcgtccggtaccacgcgccgctgccggagtgcagcgtcggcgcggaggccgaggcgttcctcccgtccggcgaggcgagtcgacggaccgccgcggcggcaggcacggcaagcgccaccggcgcgccggcggcggcgtggattccgcgctctgaccgattctgtgatccgcacagcgccgctcgcgatggtggcgcgcgtgctcgactgtactatcgtgccgtgtgtgatgtcttcgtagacggcaccatatccacctctgtccagcgacgcgcgctcggaggcggtgaaaaaacacgtcacacgggatccctcccgggtgtacctactacaccctacttcgcgcagatgcgcgaggaggagaagcagcgcgcacttttgccgtgtcgactccctagcgctcaggcccacccactaattaagtaa

SEQ ID NO: 3484 - DNA, 930 bp, Oryza sativa
atggagggcggccgcggggggaagcgatggcgcttcgcgaccccgaatctggccgtggccgcggccggggaacgcagcatccagcggtacctccttcagctgcacgcgtgcctggacgagaacgggccacggcccgtcatcccgctcagccacggcgacccttcctcctccgcctgcttccgcaccgcgcccgaggcagaggaagccgtcgccgccgccgtccgctccggcgactacaacggctactcctccccsgccaccagcctccctgctcgccgagctattgcagagtacctatcctgtgatcttccttacaagctttgcacagatgatattttcctcacatctggaggtacccaagcaatcgagattgttatgtctgtttttggccaaccaggtgccaatatattgcttccaaagcccgggtacccaaaacatgaagcacatgcggtgttccacaggatggaagtgcggctctatgatcttgttccagagagaggatgggagattaatgttgaagctgttgaagctttagcagatgagaatactgttgcaatagtgattactaaccccaataacccttgtggtaatgtgtacacttatgagcatctgtccaagattgcagatacagcaagcaagttcggtctgttagtcattgctgatgaagtatatggtcaccttgtttatggaagcactccttttgtgccaatgggtgtgtttggagagactgttccagtactcacattgggagctatatcaaagagatgggttgtccctggctggagatttggatggatagcaatttgtgatcctaaaggcattctgaaagaaacaaagctctcaggatttgtcccaaaatataacgacttctccaccaacattctcttcccaaccaatcacaaccctccacaattcacttttcccacctag

SEQ ID NO: 3485 - DNA, 830 bp, Oryza sativa
atggcggtagctcaccttcttatccaactcatctccatggctggcaatggtgttggagcctgcagggtgcagattattccggccattatctttcttcagctcctctttagagctcttggcgcggatggcgcgtcgtcgttcagcttcaccaacagctgccagtatccggtgtgggtgggcgtgctccacggcgccagctcgccggcgctggcgcgctccggcttctacctcgcgccgtcgggcacgtaccacctcgccgcgccgtcgtcggggacatggtccggcacgttctgggcgcgcaccggctgcgccgtcgactcctccaccggccgcttcacctgcgccaccgcggactgcggctccggcgacgtcgcctgcaacggccgcggcccgtcgccgccggtcacgctcgccgagatcaccctcgccgcgccgggctccggcggccaggacttctacgacgtcagcctcgtcgacgggttcaacgtgccggtgcgcctcgcgccgtcgtcgtcgggcggcggcggcggcgaatgccacgccgtgtcgtgcgcgggcgacgttaacgccgcgtgcccctccgacctccgcgtcgtgtccggcgccggcgccgtcgtggcgtgccggagcgcgtgcgacgcgtaccggagcgcgcgctactgctgcaccggcgcctacggctcgccggcggcgtgcgggcccaccgactactcgcaggtgttcaaggccgcgtgcccggcggcgtacagctacgcctacgatgacgccagcagcacgttcacctgcttcggagcatccagctatgacgtcaccttctgccctcgatctta

SEQ ID NO: 3486 - DNA, 1740 bp, Oryza sativa
atggctctacccgggcgcctccgcgccctcatcctcgccgttgcattgccgctgctcttcctgtccgcttcagaggcgggcacggtggggatcaactatgggagggtggcgaacgacctgcccaacccggcggcggtggtgcagctgatgaagcagcagggcatcgcgcaggtgaagctgtacgacaccgagccgaccgtgctgcgggcgctggccaacaccggcatcaaggtggtggtcgcgctgcccaacgagcagctgctcgccgcggcgtcgcgcccgtcgtacgcgctcgcctgggtgcgccgcaacgtcgcagcgtactacccggccacgcagatccagggcatcgccgtcgggaacgaggtgttcgcctcggccaagaacctcacggcgcagctcgtcccggcgatgaccaacgtgcacgccgcgctggcgaggctcagccttgacaagcccgtcaaggtgtcgtcccccatcgcgctcaccgcgctcgccggctcgtacccgccgtcggccggcgtgttccgggaggacctcgcccaggcggtcatgaagcccatgctcgacttcctcgcgcagaccggctcgtacctcatggtgaacgcgtacccgttcttcgcgtactctggcaatgccgacgtcatctccctcgactacgcgctgttccgccccaacgccggcgtgctcgactccgggagcggcctcaagtactacagcctcctcgacgcccagctcgacgccgtgttcaccgcggtgagcaagcttgggaactacaatgccgtgcgcgtcgtggtgtcggagaccgggtggccgtccaagggtgacgccaaggagaccggcgccgcggcggccaacgccgcggcctacaacggcaacctggtgcgccgcgtcctctccggcaacgccggaacgccgcgccgccccgacgccgacatggacgtgtacctcttcgctctcttcaacgagaaccagaagcccggaccgacctccgagcgcaactacggcgtgttctacccgaaccagcagaaggtctacgacgtcgagttcgtcctcggcggcaactccgctggcggcggcggcagcagcggcaaggacaacggcgggctcggctggcaggacaacggcggggtaaacgccggcaatgcgccggccggcgcaggcggcggcgtgaaggcgacgtcgaccggtgaggcgtggtgcgtggcgaacgccatggccggggaggagcggctgcagaaggcgctggactacgcgtgcgggccgggcggcgcggactgcaaggccatccagcccggcgcggcgtgcttcgagccgaacaccatggtcgcccacgcctcctacgccttcaacgactactaccagcgaaagggccgcaccattggcacctgcgacttcgccggcgccgcctacgtcgtcaaccaagcgccaacgaaatgtacgtgttatacgaacgggtgtagggcttggtacacgctagtacacgttacacaacctggattgggccatcgtgttccgatggtgggtcacagtacgggtgcaaatgaaaggcgctttgcatcggcatcgtacgggaatgattctcgcttcactgtagtcttcgcagccacacactggcatgtgccacacgattcacacccatggcttcctgcctgggttaaacacaccttggaaagacgcagccggcggttgcaacttgcaaaattgcgactgcaagcagccgctactgtgtctctgtga

SEQ ID NO: 3487 - DNA, 966 bp, Oryza sativa
atggcgagtgttgcctccttcccggtgatcaacatggagaacctggagaccgaggagaggggcgcagcaatggaggtcatccgcgacgcctgcgagaactggggcttcttcgagatgctgaaccatggcatcgcgcacgagctgatggacgaggtggagcgggtgagcaaggcgcactacgccaactgccgggaggagaagttcaaggagttcgcgcggcggatgctggaggccggcgagaagggcgccgacgtgaagggcatcgactgggagagcaccttcttcgtccgccaccgccccgtctccaacctcgccgacctccccgacgtcgacgaccactacaggcaggtgatgaagcaatttgcgtcggagatcgagaagctctcggagagggtgctggacctgctgtgcgagaatctgggcctggagaagggttacctgaagaaggccttcgccgggtcgaacggcccaacgttcggcaccaaggtgagcagctacccgccgtgcccgcgccccgatctcgtcgacggcctccgcgcccacaccgacgccggtggcatcatcctgctgttccaggacgaccaggtgagcggcctccagctgctcaaggacggggartgggtggacgtgccgcccatgcgccamgccatcgtcgccaacatcggcgaccagctggaggtgatcaccaacggcaggtacaagagcgtcatgcaccgcgtcctcaagggccccgacggcaaccgcatgtccatcgcctccttctacaaccccggcgccgacgccgtcatcttcccggcgcccgcgsttgccgccgccgacgcggcggcggccgcctacccgaggttcgtgttcgaggactacatgaacctgtacgtgcgccacaagttcgaggccaaggagccacgcttcgaggccatgaagtccgccgccgaggtcgtccacgcggcgcccatcgccaccgcttga

SEQ ID NO: 3488 - DNA, 705 bp, Oryza sativa
atggcgacttgctccgctgcttgcgctcgcccagccgtcgtcgtcttcgcgtcgccggccgccgcgcggcggcgcgcggcctcctccgtctacctccctggtcggcctctgcgcggcggcggcgtcgtgcgatgcagcgctgggcctgtaagcggtgggatgatctcgaagaagggtggggtccagtctctcgcgccytctcgcggcgagccccgaggagcccagcgaggaggcccgccgcctccggagccggtgcaggtgggggagatcacggcggaggagttgctgcagtacgacgggtccgaccccgagaagccgttgctcatggcgatcaaggggcagatctatgacgtctcccagagcagattgttctatggacctggtggaccatatgcattgtttgctggtaaagatgccagtagggcgttggcgaagatgtcctttgagccacaagatctgactgatgatatatctggcctaagtttacttgaactcagtgcccttcaggactgggagtacaagttcagcagcaagtacgtgaaggttggaaccataaaaaaggtgctcgtagaacagggtggcgatagcactgccgatgcaatagaggaggcagctgtcgatggtgaagacagcatcctgactgctaagatgtctaatcaattactatatgaggaagaaatggaagtcggtagtgatgatccatga

SEQ ID NO: 3489 - DNA, 699 bp, Oryza sativa
atggcggcggcggtggcggagctgtgggagacgctgaagcaggcgatcgtggcgtacacggggctgtcgccggcggcgttcttcaccgccgtggcggcggcggcggcgctgtaccacgtcgtgtcggggatcttcgcggggccgccccagcagcagcagccgcggccgagggacgagcccgaggcggagccgctcccgccgcccgtgcagctcggggaggtctccgaggaggagctccgccagtacgacgggtccgatcccaagaagcccctcctcatggccatcaagggccagatctatgacgtcacgcagagcaggatgttctatggacctggtggaccttatgcgctattcgctggcaaagatgccagcagagcactcgctaagatgtccttcgagccccaggatttgaccggtgacatctctggtcttggcccatttgaactcgacgcattgcaggactgggagtacaagtttatgggcaagtacgtgaaggtcggtaccgtcaagaagaccgtccctgttgaagatggtgccccaagcacttcaccagaaacaactgaaaccgccgctgccgctgagccagagaaggcgccagcaaccgaagagaagccgagggaggtaagctcggaggaagtaaaagaaaaggaggatgctgttgccgctgctgcacctgatgaaggcgccaaagaaagttag

SEQ ID NO: 3490 - DNA, 1692 bp, Oryza sativa
atggcggcgatgcagagctggcgcaaggcgtacggcgcgctcaaggactccaccaccgtcagcctcgccaacctcaactccgacttcaaggatctggatgtggcgatcgtgaaggcgactaaccacgtggagtgccctcccaaggagcgccacctgcgcaagattgttgccgcgacgtccatcgctcggcctcgggcagacgtcgcctattgtatccacgcgctttcccgccggcttgcaaaaacacgcaattggattgtagccttgaaaacacttgtagtgatccatagacttcttcgagagggtgaccctacttttcgagaagagcttcttaattttgcacagagggggcgtattttgcagctctcaaacttcaaggatgactccagtccaattgcttgggactgttctgcatgggttcgtacatatggtctgtttctggaggaaagattggaatgcttcagggtcctcaagtatgacgttgaagctgaacgtttgtccaaacaaggtcaaggtcctgaaaaggggcacagcagaaccagagaattggagtcccaggatctgttagagcagttgccagctttgcagcagttactatatcgacttgttggatgtcggccggaaggagctgcaaataataactacttggtgcaatatgctctagctttggtgctaaaagagagcttcaaaatatattgtgcaataaacgatgggattattaaccttgttgataagttttttgagatgccaagacatgaagcactcaaagcccttgaaatttacaggagggcaggccaacaggctgggagcctatctgacttctatgaaaattgccggggtctagaacttgctaggaatttccaatttcccactctgagggagccgccacaaacatttcttgtcactatggaagagtatgtgagggaggctccacgcatggttccagtgcgagaaccattggaattacctgagaggcttcttctgacatataaacctgaagaacaagaggaagattctgtgcctgatcctgtcgaagaggaaaaccacctgttgaagaacctgttccagtaccacctgttactgaagctgtttcacctcctcctcctcccaagactaaggtggcagatactgggattaaatgatccgaaccctagtgtatcagcgatagaagaaagcaacgctctggctttggccattgttccagcagatgctggtgcttcaacatccagcaccgctacatggcaagataaaggatttgatccaacagggtgggaactcgcccttgttaccactccaagtaacacgaattcatctgctgcagatagtcaactgggtkgtgggtttgacaagctcatcttggaaagcctatatgaccagggggactacaggcagagacagcaacagcagttatatggttcttcagctcccaacccgttcatgtcaaatgatcctttcgtaatgtcgaaccaagttgctcctccaccatcggttcaaatggctgccatgtctcagcagcatcaacagataccaactatgatgcaagcgaatccctttggaccaccaatgcaaccgcagcatgtgggcatgggccctgcaacaaacccatttttggattctggttttggcccattcccaatggcgaacaacgggcatcagcaagccaacccatttggtggcacccaacttctgtag

SEQ ID NO: 3491 - DNA, 699 bp, Oryza sativa
atggcggggggcgagcttgtgctgctggacttctgggcgagcccgttcgggcagcggtgccgcatcgcgctggcggagaagaagctcccctacgactactccgagcaggagctcctcggcgccaagagcgacctcctcctccgctccaaccccatccacgccaaggtccccgtcctcctccacggcgacggagacggccgcgccgtctgcgagtccctcgccatcctcgagtacctcgacgacgccttcccggacgccacccctcgcctcctcccctccgccgccgacgacccgtacgcgcgcgcccgggccaggttctgggccgactacgtcgacaagaaggtgtacccggtggggacgcggctgtggaaggtcaagggggaggagggcgtacgcgcggcggcgggggcgcgcggcgagctggtggaggcgctgcggacgctcgacggcgagctcggggagaaggaattcttcggcggcgagtttgggtttgtggacgtggcgctggtgccgatgatgccgtgggtgtacagcttcgcgaggtacggcgggttcagcgtggaggaggagtgcccgcgggtggcggcgtgggcgcggcggtgcatggagcgggacagcgtcgccggcagcctccgctcgccggaggagatctacgacttcatcggcctcctcaggaagcactacggcatcgacgactag

SEQ ID NO: 3492 - DNA, 2295 bp, Oryza sativa
atggggcagtgctacggcaagggcgcgtcggggaggacggcggacgatgagggcggggtggtgacggagcaccagtcgccgccgccggcgaacgggctgccgtcgacgccgccgcggcagcaggcgcaggcgcaggcgcagcaggtggggacgccgaggcggcttgggagtaagtccggatcgacgacgccggggcaccagacgcctggggtggcgtggccgagcccgtacccgtccgggggcgcgagcccgctgccggccggggtgtcgccgtcgccggcgaggtcgacgcccaggaggttcttcaagcggccgttcccgccgccgtcgccggccaagcacataaaggccacgctcgccaagaggctgggtggggggaagcccaaggaagggacgataccggaggagggaggcgtgggcgctggcggcggcggtggaggggccgcggatggggcggagacggagaggccattggacaagacgttcgggttctcgaagaacttcggcgcgaagtacgagctcgggaaggaggtggggaggggccacttcggacacacttgctccgccgtcgtcaagaagggcgagtacaagggacagaccgtcgccgtcaagatcatcgccaaagctaagatgacaacggcaatatccattgaggatgttcgtagagaagtaaaaattttgagagcgttatcagggcacaataatctcgtcaaattctatgatgcatgtgaggatggcctcaatgtctacattgtcatggaattatgtgagggaggagaattgctagacagaatattagccagggatgaaaatgctcccatgaagttgattgattttggtctctctgatttcattagaccagatgaaaggcttaatgatattgttggaagtgcatattatgttgccccagaggttttacacagatcatatagtatggaagcagacatttggagtataggtgtcataacgtacattctgctctgtggcagtcggccattctgggcacgaacagaatcaggaatattccgatctgtgttgagagctgatcccaactttgatgattcaccgtggcctacagtatcagctgaagctaaggattttgtgaagagatttctgaacaaagattaccgcaaaagaatgaccgctgttcaagcactgactcatccttggttgcgagatgaacaaaggcagatcccgctggacatactcatcttcagattaattaagcaatacctccgcgctacacctcttaaacggttggcattaaaggcactatccaaggctttaagggaagatgaacttttgtatctcaaactgcagtttaaactgctcgaacctagagatgggtttgtatcacttgacaactttcggacggcactaacgcgatatttaactgatgctatgaaggaatcgagggttcttgaatttttgcatgcgccatacaaccaaagctattatgatgaactgatggccattattgctttgtttgtttcttttctaactcccttgcatcctgtgtttttttttaatttcttaaaatacatctcattggtggttgaagttgcygatcycagkgttgggaatatggattctatcccagttggaccacttgcatacagaaggatggactttgaagagttctgtgccgcagcaatcagtccttaccagcttgaggcactggaaaggtgggaggagattgctggaacagctttccagcaatttgaacaagagggcaaccgagtcatatcagttgaggaattagcacagactgcagagcccaaagggagattcttctatggccgtattgcagcattgcaaatgggcctgaagatggcaaagcgaagtgcaccaactcttagggctgttcatattgaaaccaaaataaatctaaccaaattttgggggttccagaaatcgaccggaaatgggattaattctgcaacttattactgtgtttccagctgggagatggctayacacacaccatctcatcagactacgactttttatacaagcctggaaaattcagagatattgcctcaaagtcaacatccaggtggtgaaaggagaggcagtggaggccattccaaggcagaggcaaagattgcaagggaatggaagagtccagaatggaatccatggaatactccactacacaagatagtctcatcacgcatgttttattctatttctcccgatgtgttgaacccaataattggtgatttttcgaaggaaaaagtagttggtgccgtcgataaaccactcgattcgactgtgtctcatgtgcacttctag

SEQ ID NO: 3493 - DNA, 2946 bp, Oryza sativa
atgtccccgagcttcttctttgtcgtcgtctcggcctggtcgctagcgctgatgctcgccgcggcggcgaggggagccgaggaggaaggaggaggaggctgcctgggcagccagaaatgcggcgacctgaatatctcctctccgttctggatcatccagggccaggcggataagccgtgtggtcctctggattaccaggtatattgcaacaactccaccggcgtcgcaactcttcgaagctctacagacagcgggtttgatatcatcaacatatcatatggggaccgtactatgctcgtctttgatgtccataagctagctcgcctgaataactccaccggctgcagtatcccagtgtttaacaccttcgccaagctgcccatcacgtttacaatcagcccttccaatcacaacctcgtcttctacaactgcaccgaggcgccgccggcggagcagcagcaacaactggggctcgtggagacgagatgcggtaacaacacgtttgctcgcctgggagggcgtttccacggggagggcgactacgacaagtactatttggaaggctgcagcagaaacagcaccgtcttcttgccggtgctggaaccgcctgatggcaaggcgaacgccagcaggtatgtggagctcgtgggtggaggcttcctcataacatgggacctgccaccgccagtgacatcttctgcaaagaatactcctgccatgttccgaggaccaacacctcctccaaggtcggcctcccggttctccatcagcaccaccaatctcaacctcttcctgtacagttgcaataaggcgcttgtgccgcgggacggagacgacgacctcgtggagacgaggtgcggcaacaagacgtttgctcgcgtaggagggaattacagtgattcgggcgactacccggcgttttacatggaaggctgcaatgctaccgtcgtgccggtgctgggcacggacgcgaggagctatgagcagctcatccgcgacggcttcctcttgacatggcaagagacgccgtcatctgcttccttcctcgagttgccggcaccggcgagctcgtctagtcctggctgcttgcccacgccatgcggcaagctgaccatctcctacccgttctggctggaggagcccggccggccgccgtgcgggtcgccgcccttccagctcaagtgcaacgccaccggcgcatacctcacgcacaccatctacgaggcgtatcgcgttgttgatatcttcaccggaaaccacaccgtccatgtggtggacgagaatctcccgctcgccaccggctgcccggcgccgccgttcaacatctccgatggcatctggcaggcgccgttcgtcatcagcgaagccaacgcagagctgcgcttcctctcgtgtaacaagtcacttccggcggcggctgctcctcccggcttccatagcctgccttgtgatgaccaaaactcctccgtccggctcgtcagcgaccaccatttacacgaggatgggattccaccgggctgtaacttcacggttgtgccgatcgttcagcgtcacaatgggagtatggccggctatattgccagcatgaggagtgggtttctactagagtgggcggtggtttcaggggattgtcccaaatgtcaagtaagcggcgggaattgcacgtacagcgacgacctggagttcgcctgcaattgccccgacgggatgcaccctgacaagtgtagagagttcagaaaatcggaagagcacgcatgtggatcaagcggcggaatattattgattgtatctatattcatttttgcttggcacaaacgcaagaagaggaaacaaacccgagatttgaaagatctcatgcatagttcatcttcaatgcaatcatacagcaaagaccttgagttgggtggttctccccatatattcacttacgaggaacttgaagaggctactgctggatttagtgcctcgagggaacttggtgatggtggttttggaactgtttacaaaggaaagctccgggatgggagagtagttgcagtgaagcgcctttacaagaacaactacagacgagtagagcaattcctaaatgaggtagacattttgtcccgcctactgcaccagaaccttgttatcctatatggctgcacgtctcgttctagccgtgaccttctcttggtctatgagtacatcccaaatgggacagttgcagaccatctacatggaccccgtgcaggagaacgaggcctcacatggcctgtaagaatgacaattgcgatagaaacggctgaggcactggcataccttcatgcagttgaaatcatacaccgtgatgtcaagaccaacaacatattgctggacaacaacttccatgtcaaagttgcggactttggactatcgcgcctgttcccgcttgaagtcacccatgtatcaactgttccacagggcacaccagggtatgttgacccagtgtaccaccagtgctacaagctaaccgataagagtgatgtgtatagctttggtgttgtgttgatagagctaatttcctcaaaaccagctgtggacatgtccaggagccacagtgacattaacttggctaacatggctctcaacagaattcagaaccatgaagttgatcagttggttgatccagagatcggctatgagactgacagtgaaacaaagaggatggtagatctggtggccgagctggcctttcagtgcttgcagatggacagagagagcaggccaccaattaaggaggtagtggaggtcctgaattgtatcaagaacggggaatgtccagcggaaaagatgaacaagaatgcgtctccaaaggaagattcgcatctgctgaaggacagcctacagtattcgcctgactcagtaatccatagatttcatagccaatctactaaccactcggtagcatcaaactctagcggatga

SEQ ID NO: 3494 - DNA, 453 bp, Oryza sativa
atgtcgctggtgaggcgcagcaacgtgttcgaccccttctccctcgacctctgggaccccttcgacagcgtgttccgctccgtcgtcccggccacctccgacaacgacaccgccgccttcgccaacgcccgcatcgactggaaggagacgccggagtcgcacgtcttcaaggccgacctccccggcgtcaagaaggaggaggtgaaggtggaggtggaggaaggcaacgtgctggtgatcagcggccagcgcagcaaggagaaggaggacaagaacgacaagtggcaccgcgtggagcgcagcagcgggcagttcatgcggcggttccggctgccggagaacgccaaggtggaccaggtgaaggccggcatggagaacggcgtgctcaccgtcaccgtgcccaaggccgaggtcaagaagcccgaggtgaaggccattgagatctctggctaa

SEQ ID NO: 3495 - DNA, 1086 bp, Oryza sativa
atgtcgctggtgaggcgcagcaacgtgttcgacccattctccctcgacctctgggaccccttcgacagcgtgttccgctccgtcgtcccggccacctccgacaacgacaccgccgccttcgccaacgcccgcatcgactggaaggagacgccggagtcgcacgtcttcaaggccgacctccccggcgtcaagaaggaggaggtgaaggtggaggtggaggaaggcaacgtgctggtgatcagcggccagcgcagcaaggagaaggaggacaagaacgacaagtggcaccgcgtggagcgcagcagcgggcagttcatgcggcggttcaggctgccggagaacgccaaggtggaccaggtgaaggccggactggagaacggcgtgctcactgtcaccgtgcccaaggccgaggtcaagaagcctgaggtgaaggccattgagatctccggtgtgcggtggtctgatttgaaacttcagccgaagaaatggaatgtgataagagtcgataagtttcaggaaagcaactgggtcagagacatcgacatcctccgcatcactgaggcggatcacgttcagcagtccgtccgcctatggactatgatcagaagaatgaaccccctgactgaagaccaagatagcatccactgggatttgacagccaatggtcaatactcagcaaagtctgcctacaggctccaattcctgggggccacgaggtctgccttcaatcaaactatctggaaagcgtgggcccctccaaaatgcaaattcttctcctggctcgccacccaaaataggctctggacagttgacagacttgagaaaagaggatggcaaaaccagaagatttgcccgttgtgctgcataattgacgagtcagcagtccacctgctggcacactgtagagttacaaagcgggtctggacagaaatacaaaggtggactcaaaccaacctccaaatgatcaaatggagcgattgcgactcggtagaacaatggtggaacctgtgtggtagattctctcaacaacccccgcattcccctgcgtactctggtgatcttggtctcctgggaaatatggtgtga

SEQ ID NO: 3496 - DNA, 429 bp, Oryza sativa
atgtcgctcgtgaggcgcagcaacgtgttcgaccccttcgctgacttctgggaccccttcgacggcgtcttccgctccctcgtcccggcgacctccgaccgcgacaccgccgctttcgccaacgcccgcgtcgactggaaggagacgccggagtcgcacgtcttcaaggccgacctccccggcgtcaagaaggaggaggtgaaggtggaggtggaggagggcaacgtgctggtgatcagcgggcagcgcagcaaggagaaggaggacaagaacgacaagtggcaccgcgtggagcgcagcagcgggcagttcatgcggcggttcaggctgccggagaacgccaaggtggacccaggtgaaggcccagcatggagaacggcgtgctcaccgtcaccgtgcccaaggctgaggtcaagaagcccgaggtga

SEQ ID NO: 3497 - DNA, 2526 bp, Oryza sativa
atgggggacgagacggtggcgccgcaccacctgctgctgggcctcgtcgcggaggaccggtcgccgctggggttcctcgcctcgggcgtccgcgtcgagcgcgcccgcgaggcgtgccgcgccgccgtgggcaaggaagggctcgcgcaggcgccggtcgggctggccacggacgtgcccttctcgggggccagcaagcgcgtcttcgaggccgccgtggagttctccaggaacatgggatgcaacttcatctcgccggagcacattgcgctcggcctcttcaacctgaacgatcccaccacgaacaacgtccttaagagcttaggagtagattcaagtcagctagcaaagcaggcacttacccgagtccaaggggagcttgcaaaggatggaagagagcctgtcggattatcttcttttaaagtgcgtgagaaatttactcctggaggtgggaagtctgcaattgtcaaatactcgaataaaaataaagagaagagtgcactggctctattttgtctagacttgaccatgcgagccagtggaggattgattgatcctgttattggtcgcaaggatgagattgaaagagtagttcagattatatgccgccgcacgaaaaacaatccaattcttttgggcgaagcaggtgttggtaagactgccattgctgagggtttggcccataaaattgccaatggagatgttcctattttcctcgtgggaaagcgtatattatcattggatgttgctctactaatggctggtgctaaagagaggggtgaactggaagccagagttactagtttaatacgtgaagtgcgcaaagcagatccaaaacttccgttcttggtcttcaatcttcaaagagctccaaagtttcatgcaggtgatgttatactgttcattgatgaagtccatactcttattgggtctgggattgctggaagaggaagcaaaggagctggtcttgatattgcgaatttgctgaagcctgcactggctagaggagaattgcagtgtattgcatctacaactctggatgaacaccgattgcattttgataaggataaggctttggctcgccgatttcagcctgttttggtgaatgagcctagccaggaggatgctgtgaagatattacttggtctgcgtgagaagtatgagacctatcacaaatgcaaatacactttggaaagcatcaaatgcagcaaacatcttcccgataaggccattgatctaattgatgaagctggcagtagagctaggatggaatcatttaaaaggaagaaggaggaacaatgctctattctctcaaaatcaccagatgagtactggcaagagattagagctgtccagaacatgcatgaagtgattttcaatgaattaatatttcattgcccaccacttttcagggcactgactaacaagggcataccagttcagcagttgactgcagatgaaagaaagcttctagtaggactggatgatgaactcaggaaacgtgtcataggtcaagacgatgctgttctagccatatctaaagctgtgaagagatcgcgtgttggcctcaatgaccctgacagacctattgctacactaattttctgtggcccaacaggtgttggaaaaactgagctcacgaaagctctagcagcaagttattttggatctgtgggtcactctttgctggaatcagctactgttaggttagatatgagtgagtatatggagcggcatgctgtgagcaagttgataggctctcctccaggatacatgggatttggtgaaggtggtactttgactgaagcagtcaggagaaaaccattcactgtggtgttgcttgatgaaatagagaaagctcatcctgatattttcaatattcttcttcaaatattcgaagacggtcatttgactgattcacagggccggagggtttccttcaagaatacattaattgtgatgacatcaaatgttggttccacatcaatttctaatggaaagaggagcataggtttccagacacaaactgatactgaagaaaagtcatatgctgcaatgaaatctttggtaatggaagaactgaaggcatttttccgtcccgaattgctcaatagaattgatgaagtggttgtgttccaccctcttgagaaaactcaggcatgttgcttttatagatactgcacttgcatattgccttgtacttttgttaatactatgctggctattctcaatataatgctgcaagaggtgaagggtaggattttagcccttgggattggcctagaggtgtctgattccatgaaggacctgatttctcagcatgggtacgacaagagctacggtgcacggccactaagaagagccgtcactcagctggttgaggatgttatcagcgaagcaattctgtctggtcagttcaagcctggtgacaccataatggtggacactgatgccacggggaaaccttgcttgagccgactgaatgatcagaccgtccaattatccgatccgacaccaacactttga

SEQ ID NO: 3498 - DNA, 1632 bp, Oryza sativa
atgggtgcctgcgtgtcttcaagcaaaaaacggagatcacagaaattgtgctgtatataccggcgttaccgcggaaaagttttgagcaatgcacctatagtacgcgccagtgatgcagggagccgtgctgctcctggagaagttgttcatgtggaggctaaatctgatggctcgaatgtaacatttcatctcacacagttgcagtggcatcatagtgagctagactcagaaaatggaaatgttgtgtgtcaagaagaagcatggttcgactctctcagtattttaggatctgattctgatgaagatttcagcagtgttaatggagacctccctgcaatgtcaaattcagcgggtacacaattaatgcactgtgaagatgcttcaagcattgctgatgcaatccagaagtttgagaggatttttgatggttcatgtgttgctcaagccattggacaatacctgaaaagagacgcgaacaaaatggatagaccaaaccaagcagatattcaagaatcggagaagcctaaaattccaagcccagaatcatgtgatgtatctgatgtgaaggttgatgaaacaaagactagaaatgagggtataaaaattctgacaaaactcagaagaggcgaggatgcatgtaatacgttgaaatcttcgaaagaaggagacaaggctcatgaaagtatcttcaaaagtttgacaccagtgtgcacgcctcgccatgctaataaggttcagcctttggccgtagcaagtcctcggggccaaaagaagaaatcaggagttgtcaggctctctttcaagaggaaatcttttgatggagaacaaactactgaaatatgctcttctaggaggtacttgattcatccaagagctggattgttggttcctcaaggcattacttgcagagacaaaaagaagttgcctgccccaggaagttcaccgtatactccgattggtgtggacatgttcatgtccccaaggaaaattcatcacattgcgcagcatattgagcttccatctgctgggccaagcgagaaaattccttccttacttatcgttaatattcagatgcctacatatcctactgctatgttccttggtgatagtgatggggaaggcattagtctagtgttgtatttcaaactgaatgagaactatgagaaggaaatttctcctctgtttcttgatagtataaagagacttgtaaatgatgagatagaaaaggttaaggggttcccattagattcaacggttccgtaccgagaaagattgaaaatattggcagggttagtaaaccctgatgatatgaatctgagttctgcagagaggaagcttgtgcaggcttataatgaaaagccagtcctttcgcgacctcaacacaatttttatgtgggaccaaattactttgagatagaccttgacgtgcaccggtttagcttcatctcaaggaaagggcttgaagcgtttcgagaaaggttgaaacatggtgtcattgatctaggtttaaccatacaggcacagaagcaggaagaactccctgagaatgtcctatgctgtgtaaggctgaacagagtcgatttcgtcgatcatgggcagataccgacgctcttgccttgcgacgacgactga

SEQ ID NO: 3499 - DNA, 1188 bp, Oryza sativa
atggcgacaagagcgacggcgatgggcagtgcagatggatcagtctcttcaacaggttctccacttgtttcagaatcaaaaaagaagaggataaaaacatacataatagcttctacatcaagtttattggggataagcgtattagtccttgcagtcttcctagtttacaagaaacataagtgcttgctcccctggcaaagatcaacaaccgcaccaagacttcattcactcctacgatcacaacttaaaagttacacttattctgaagttcgaaagatgactaaatcttttactcacacccttggtaagggtggatatggcactgtttacaaaggcagtctatctgatggtagcacaatagcagttaagatactggaagactccaacaatgatggggaagatttcattaatgaggtgtccagcattggcagaatatcacatatcaatgttgttactctattaggactttgccagcatggatcaaaaagagctctcatctatgagtatatgcccaatggttctcttgataaattcgcagttggtggaaatgacaccatgcaacaagagaagttccttataagctgggagaagctatatgatattttggttggagttgcacaaggccttgattacctccaccattggtgtaatcatcgtgttgtacatcttgacataaaaccccaaaacatcttactggaccaagacttctgcccaaaaatatcggatttcggattagcgaaactatgtaagccaaaagagagcaaaatctctattggttgtgcaaggggaacaattggctacatggcacctgaggtgttttgggggcaccgtggagcagtgaccaccaagtctgatgtatatagctatgggatgctgattcttcatatggttggagaaagggaaaacatcaatgcgagcacagagagtggaagcaagtatttccctgaatggttgtatgacaacctgaatcagttttgtggtgttcctagtggaggcatcgacggtagcaattccacatcagaggttgcacacaagttagtgataatagggttttggtgcatacaatctgcacctacggacagaccttcgatgagtgaggtcattgacatgtttgatagaagcttgactgaactgcaactaccaccaagaatctcttgttgcggaaattataatgagagttttggataa

SEQ ID NO: 3500 - DNA, 1677 bp, Oryza sativa
atggcagtgctcctcatgctcaactgcttcgtcaaggccacggcgccgccgccatggccgccgtcggcttcgtccgcctccttcctcgacgacctcggcgacctcggcatcgcgccgctcatccgcgccgacgaggcgggcaccgcgcgcgcctccgccgactttggcaacctctccgtcgccggcgtcggggcgcctcggctcgccgccgccgccgccgtgctctacccgtcgcgccccgccgacatcgccgcgctgctgcgcgcgtcgtgcgcacgcccggcgccgttcgcggtgtccccccgggggttttgccactcggtgcacggccaggcctccgcgcccgacggcgtcgtcgtcgacatggcgtcgctcggccgcctgcagggcggcggcgcgcggcgcctcgccgtgtcagtggaggggcggtacgtcgacgccggcggcgagcagctgtgggtggacgtgctgcgcgcgtccatggcgcacgggctcacgccggtgtcgtggacagactacctccacctcaccgtcggcggcacgctgtccaacgccggcatcagcggccaggccttccgccatggcccccagatttccaacgtgctagagctcgacgtcatcaccggtgtcggggagatggtgacgtgctcgaaggagaaggcgccggacctgttcgacgcggtgctgggcgggctggggcagttcggcgtcatcacgcgggcgcgcatcccgctcgcgccggcgccggcgagggcgcggtgggtgcggttcgtgtacacgacggcggcggcgatgacggccgaccaggagcgcctcatcgccgtcgatcgcgccggcggcgccggcgcgttgggcgggctgatggactacgtcgagggctcggtccacctgaaccagggcctggtcgagacctggcgcacgcagccgcagccgccttcgccgtcctcctcctcctcctcatccttcttctccgacgccgacgaggcccgcgtcgccgcgctcgccaaggaggccggcggcgtgctgtatttcctcgagggcgccatctacttcggcggcgccgccgggccgtccgccgccgacgttgacaagaggatggatgtgctgcgtcgcgagctgcggcacgagcgcgggttcgtgttcgcgcaggacgtggcgtacgccgggttcctggaccgcgtccacgacggcgagctcaagctccgcgccgcggggctctgggacgtgccgcacccatggctgaacctgttcctcccccgctccggcgtcctcgccttcgccgacggcgtcttccacggcatcctcagccgmacccccgccatgggccccgtcctcatctaccccatgaaccgcaacaagtgggacagtaacatgtcggcagtgatcaccgacgacgacggtgacgaggtgttctacacggtggggatcctgcggtcggcggcggcggccggcgacgtggggaggctggaggagcagaacgacgagatcttgggtttctgcgaggtggccgggatagcctacaagcagtacctgccttactacggcagccaggcagagtggcagaagcggcacttcggtgccaatctctggccaagattcgtgcagcggaagagcaagtatgatccaaaggccatcctgtcccgtggccaggggattttcacgtcaccactcgcatga

SEQ ID NO: 3501 - DNA, 1710 bp, Oryza sativa
atggacggatcggcggagctggaggcggccgagcgggtcgtcatgcgctgggactccacctccgcctccgacgagccgatgctgttcgacggcgcccgcgccgaggccgagcgcttcctccgcgccgtcgacgacctgcgccgcctcgcgccgccgtccccggccgccgtcgggagcccgcgccggctgtcgtccggtgaccggtcgaactcggcctcgtctgctgagctccaggtggtggatgaggatgactccgtgtcgtcgttggttgggcggcggagcagctaccgctcgctccccagcatccgcgagatcgacctcctccccgacgacgccgtctccgacctccgcgccatcgcctcccgcatggctgcggccgggtacggccgcgagtgcgcgcaggtgtacgcctccgtccgcaagccggcggtcgacgcctccctccgccggctcggcgtcgagcggcttagcatcggcgacgtccagcgcctcgagtggaaggccctcgaggccaagatccgccgctggatccgcgcggcccgcgccgccgtccgcggcgtcttcgccagcgagcgccgcctgtgcttcctcatcttccacgacctccccatctcgaacatcaccgtcaccgccgccgcccccgccacgcacgacacccccttcgccgaggccgtcaagggcgccgcgctgcagctgttcggcttcgccgaggccatcagcatcggccgccgctcccccgagaagctcttcaagatcatcgacctccacgacgcgctctccgacctcctcccggacgtcgccgagtcgatatacgtccaggccgccgagatccggtcgcggctcgccgacgccgtgcgcggcatactctccgagttcgagaacgccgtgctccgtgacccgcccaagacggcggtgcccggcggcaccgtgcacccgctcacccggtacgtgatgaactacagcagcctcatctccgattacaaggtgacgctctccgagctgatcgtgtcgcggccatcggcgagcgcgcgcctcgccgccgagggcaatgagctcgcgccgtccttggccgagctcgacctccccgagcctgacaaccagacgccacttgctgctcatatcatctggatcattgttgtcctggaacacaacctcgagggcaaggcctcactctacagggacacggctctctcgcatttgttcttgatgaacaatgtgtactacatcgtgcacaaggtgaaggattcgccggatctatggaatctgattggtgatgattacttgaagcggcttacgggtaaattcacaatggcagccacgaactaccagcgcagcgcatggttgaagatcttgaattgcttgcgagacgaggggctccatgtaagtggtggcttctcgtcagggatatccaagtcagcgctgcgggagcggttcaggtccttcaatgccgcattcgaggaggcgcatagggtgcaatcaggatggtgtgtgccggacacacagctgagggaggagctaaggatctcaatttcagagaagctggtgccggcataccggtcattccttggcaggtttcgacatcatattgagaatgggaagcacccagagttgtacatcaaatactcagcagaggaccttgagattgctgtgaacgatttctttgagggggttcctccttccccacatatcaggaggagatcacatagctga

SEQ ID NO: 3502 - DNA, 3066 bp, Oryza sativa
atgaaggtgggcgtggagatattggacgcgtcggagcttgcgcccaaggacggcgccggcgcctgcaacgcgttcgtagaggtggagttcgacgggcagaagcagcgcaccccgaccaagcccgccgatcgttccccgcaatggaaccacaccctcgtgttcgacgtccgcgacccctcccgcctcccctccctccccgtcgacgtctccgtccaccacgatcgcagcctcaccgaccaccacgccacccgcctccacaccttcctcggccgcgtccgcatctccgctgcctccctcgccccctccccgcaggacgccctcctccagcgctacccgctcgagaagcgcggcctcttctcccgcgtctccggcgacatcgccctccgactctacctcatcgccaacgactcccctgatcctcctcctgctcccgctgtccaccaccaccagcaccagcctccccagtccgtctccgccgagcaacccgacagcaggcctcctcccgcctttccccatggagaggcgcaggcgcaggcgcagccaccgcccccggagtcggagtccaagggcaagaccacccacgaccacgagcctcctcgtgtgttccgctccgtccccgtccaagcccccgcccccgccgcctctcaacccaggcgtgccacgctccasgcggtggccgcgccgcaacggccgcaaggcaaaaccgtgatcatgccgggccttccgggcccggccccgggggggcccccctcggcgttcggcctggtggagaccaagccgccgctgccggccaagatgggcccacgcgccgcggtggccgccgcggccaagatcgcctccacctacgacatggtggagcccatgtcgtacctgtacgtgagcgtggtcaaggcgcgcgacctccccaacatggacatcaccggcgcgctcgacccctacgtcgaggtcaggctcggcaacttcaagggcgtcacccgccacctcgagaagaaccccaacccggtgtggcgccaggtcttcgccttctcccgcgatcacctgcagtccagccagcttgaggtggtcgtcaaggacaaggacgtcctcaaggacgacttcgtcggccgcgttgtcttcgacatgaccgacatccccaaccgcgtcccgcccgacagccccctcgccccgcagtggtaccgcctcgccgaccgctccggcgagaagattcgccacggcgagatcatgctcgccgtctggaacggcacgcaggccgacgaggcgttcccggaggcctggcactcggacgcccactccgtctcccttgacagcctcgccagcacgcgctccaaggtgtactactcccccaagctcatctacctcaaggtggtggccatcgcggcgcaagacctcatccccgccgagaagggccgcccgctggcaccgtccatcgtcaagatacagctgggcgggcagacgcggcggacgcggtcgcaggggtcggccaacccgatgtggaacgaggagttcctgttcgtggccgcggagccgttcgacgagccgctggtggtracggtkgaggagcscctggcggcggggcggracgagccggtggggcgcgtgatcatcccggtggcggcgccctacgtgcctcgcaacgacctggccaagtcgatcgaggccaagtggttcagcctgtcgcgggcgctgacggcggacgaggccgcggcggcggaggcgacgaagctcaagtcgtcgttcgcgagcaagatccacctgcggctgagcctggagacggcgtaccacgtgttggacgagtcgacgcactacagcagcgacctgcagccggcggcgaagaagctgaggaagagcccgatcgggatcctggagctgggcatcctcggggcgcggaacctggcgggcgggaagagcccctactgcgtggccaagtacggggcgaagtgggtgcggacgcggacgctggtggggacggcggcgccccggtggaacgagcagtacacgtgggaggtgttcgacctgtgcacggtggtgacggtggcggtgttcgacaactgccacctgacggggggcggggacgccaaggaccagcggatcggcaaggtgcgggtgcggctgtcgacgctggagacggagcgcgtgtacacccacttctacccgctgatgacgctgacgccggggggcctgaagaagaccggggagctccacctggcggtgcggttcacgtgcacggcgtgggccaacatgctggccatgtacgggaagccgctgctgcccaagatgcactacacccaccccatctcggtgctgcagatggactacctgcggttccaggcgatgcagatggtggcggcgcggctgggtcgcgcggagcccccgctgcaccgtgaggtggtggagtacatgctggacgtggactcccacatgttcagcctgcgtcggagcaaggccaacttcaagcggatgacgtcgctcttctccggggcggtggcggtggcgcggtggatggatgggatctgcaagtggaagaacccggtgaccaccatcctggtgcacgtgctgttcctcatcctggtgtgctacccggagctgatcctccccaccgtcttcctctacctgttcgtcatcggggtgtggaactaccggaggcggccgcggaagccggcgcacatggacacggcgctgtcgcacgcggaggcggagcaggtgcacccggacgagctggacgaggagttcgacacgttccccaccagcaagcccggggacgtggtgcggatgaggtacgaccggctgcggagcgtggccgggagggtgcagacggtggtgggtgacctggccacgcagggggagcgcgcccaggcgctgctcagctggcgcgacccccgtgccacctccatcttcgtcctgctctcgctcatcatcgcggtggtgctctacgtcacgccgttccaggtggtggcggtggtggtggggctgtacctcctccgccatccgcgcttccgcagcaagcagccgtccgtccccttcaacttctacaagcgactacccgccaagtccgacgtcctcctctga

SEQ ID NO: 3503 - DNA, 726 bp, Oryza sativa
atggcctcctccgcgcgcgacctctccggcgacccaccggagtccacccggctgcggatcggcgacgacatcgcctggtcggacgtgggcggcgtctacgaccgcgacgactcgctcaaggagaacaccaaccccaagtgcatcctcaagaaccacctccccggcgcccacaacggcgggtcgcagaggttctccggcaacctcaagcccacggcggcgcccatcatcgggatatcggggaagctcgggcagggcggcaagaaccgccaccacccgccggcgatgttccccaagaaggtggccgtcacgggaggcggcggccgcaaccccaaggcggccgtccccgagcacgagccgacgtcgcccaaggtctcctgcatcggcaaggtcctctccgaccgtgagcgcgcgcgccggggtcgccggccggcggggcggatggtccccgccggtggctgctgccccgggctcggcggtctgttccgccggagtcactcgcggaagaagaacgccgtggagtgcgtcgaccagtccccgcctccgctgcctccatgggcgtcgaggcggggagagccgaaggaggtcaaggaggcgacgccggcggcggcggcggcgatggcgccggggttgggagggatgatgcggttcgcgtcggggaggcgggcggcggattgggcgaccgagatggagccggatggacgcgtggcgagatctgggccgttgtag

SEQ ID NO: 3504 - DNA, 2025 bp, Oryza sativa
atgacaaaccaattcgcctactctggcttctctggtgctaacctgaccatggatggtgcaactatcacatcaggtggcctcctagagctcaccaatggcacagtccagcagaagggccatgcattctacccggtcccgttgcgctttgtccgatcacccaatggatcagtgctctccttctcggcatccttcgtattcgccatcctatctgtctacactgatctaagtgctcatggcatggccttcgtcattgtgccaagcatgaacttctcagctgcgttgcctggccaattcctgggcctcgccaacatccagagcaacggcaatagcagcaaccatttcttcgctgtcgagctcgacaccatccaaaacaaggagtttggcgacatcaatgcaaaccatgccggcgtcaacatgaacggtctccgatcagagcagtcctactacgccggctactacgatgacaaggatggtaacttccataacttgagcctgattagccgtgaggccatgcaggtgtgggtggactacgatagcaacaacacgcagatcactgtggccatggctcccatcaaggttgcgagacccatgaagccattgttcacagccagctacaacctcacatctgtgattacagatgttgcgtatgttggtttctcctctgcaactggcacaatcaacgtgcggcattgtgtactcggctggagctttgcgataaatagtcctgcttcagccattaacttaggtaagctaccaaagctgccacgcatgggcccaaagccacgatcgaaggtattggagattgttctaccagtagcaacggcaagttttgtccttactgtgggcattattggtcttgtactcatacgaaggcatatgaggtatacagaactgcgcgaagattgggaggttgagtttggaccgcaccggttctcttataaggatctgtatcatgcaactgaaggattcaagaatgagaatctgctgggtgtaggaggatttgggagagtatataagggtacccttccagtgtcaaaattggagattgcagtaaagagggtgtgtcatgaatcaaggcaaggaatgaaggaatttgttgccgagattgttagtattggtcgtctccaacaccataatctcgtgcaattacttggctattgtagaagaagaggtgagctgttcttagtgtatgactacatgccaaatggaagtgttgacaaatacatacatagtatagagggaaaaaccattctaacttgggcccaaaggtggcatatcatcaaaggcattgcatcttgcttggtctatctccacgaagagtgggaaaaagctgttatccatcgggacataaaagctagtaatgttcttcttgatggcgatatgaacggacgacttggtgactttggccttgcaagattgtatgatcatgatgatgacccacaaaccacgcatgtggttggaacaataggatacctagctccagaactaggacacactagcaaggcgacccctcttactgatgtatttgcttttggcatgtttgttctcgaggttgcctgtgggcagagacccatcaatcaaagttcacttgatagccaaacgatgttagttgactgggtgcttgagcaatggaacaaaggatcactagtcagtacagtggatagcaggcttgaaggaaattataatgttagagaggcagttttagctataaatcttggacttttatgctctcacccttttgctaatgcaaggccttctatgcggcaggtcattcattaccttgatggtagcattccattaccagagatgtcaccaacagatttgagctatcatatgatgacaataatgcaaaatgaagggtttgacgagtacatcatgacaagttcatcgatgagtgaaatgctcaggcattccagcagcacgtctgcaggtttgcgtcgcaagtggctcaagcgatctgggaggaatgggaatggtgcaactggcctgggaggatactgcagcagggctcctttctttgtgtag

SEQ ID NO: 3505 - DNA, 1635 bp, Oryza sativa
atgccgcaccaaaccaaagccacagtccagcagcagcgaccaccagcagcagcttccgtcgtccgcgccggcgcccaagaagaggatgcctctgctgcaggctctctccgtgccatcctcgcccagatccccctccagattcgccctcctcaaggcctccatcctgcccaacaagtgacaatgcgagtgagaagcagaatggaacccatgaaattaacggtgaagagccggtgcggcgtgtgctcccacggcgtgaagaccggcgcggcggcggtgttcacggcggagtgctcccactccttccacttcccctgcatcgccgcccacgccaacgccttcgccgccgccaccgctctctcctgccccgtctgcgccgcgccatggcgccaggcccccttcatcaacaagcgcaccaccaccaccgacgaccacaagcgcaagtcctacgacgacgacgagcccctcctcgcgcccaaggccgccgccggcgccttcaaccctatccccgaggacgacgaggacgacgccaccggagttcaggggcttcttcccggcgcgccccaggagcgggctggccgtcacccttgccccggacgccgccctcgtgtccgctgggcggaggcacggcaaggccaggaacagccgcaggccgtctgcgttggcgacgcgctgcgcaaggccaccaaggtgctcgaggaccgccgcgaccgcaaccccgtcgccaccgtcatgctcctctccgacacgcagcagcagcagcagcagcagcaggatgcgatccggcgcccgccagccgcccctccggccacgcgattcacgcacgtcgagatccccatcgggccaggggaggagccgrcccggtcggcgctggtggcggaggaggacgacgaccagttctcggagcacgccttcgcgaaatgcctgggcggcctcgtcagcgtggtgatgcaggaggtgcagctggagctggcgttcccgacgggcgagatcacggcggtgtactcgtgcggccacgggcagcaggcggtggcccttgggggcggtggcggcggcgcggcggtgagtgtctccctgggcgagatgtacgcggaggaagagcgggagctgctggtggagctgcgcgcgccgctgagccagagccacccacactcgctgtccgtgcggtgcagctaccgtgagccggcgtcgcaggagacggtgcgcggcgcggagcagcagctggtggtgccggccctccacggcgggagctcgtcgcggcggctgcacgacctgttcgtggcgacacgggcggtggccgagtcgcggcggctggcggagctgaacgactacgcgacggccatccacctgctgtcgtcggcgcgggcggtggtggtgcagtcggcggagcaggggctggttggcagcctggacacggagctgagcgacatgcggtggcggcgcgggcagtcggcaggcaggcggcgtggcggcgagtcggaggagactccggtggggacgccgcgggcscgggggggagagccgctgacgccgacgtcggcgtggcgcgcggcggagcagctggccaaggtggccatcatgcgcaagtccatgaaccgtgtcagcgatctccacggtttcgagaacgccagattctga

SEQ ID NO: 3506 - DNA, 888 bp, Oryza sativa
atggcgacgacgacggcggcggcgatggtggtggcaatgtcggtgctgctgctgggtggcggcgaggcggcggcgccgcggaagccggtggacgtggcgttcgagaagaactacgtgccgacgtgggcggaggaccacatccactacgtggacggcgggcgcgaggtgcagctctacctcgacaagtccaccggcaccggcttccagacccggggctcctacctcttcggccacttcagcatgcacatcaagctcgtcgccggcgactccgccggcaccgtcaccgccttctacctgtcgtcgcagaactcggagcacgacgagatcgacttcgagttcctggggaacaggacgggggagccgtacatcctgcagacgaacgtcttctccggcgggaagggggaccgggagcagaggatctacctctggttcgaccccaccaaggactaccactcctactccgtcctctggaacctctacatgatcgcgttcttcgtggacgacacgccgatcagggtgttcaagaacagcaaggacctgggcgtgcggtacccgttcaaccagccgatgaagctctactccagcctgtggaacgccgacgactgggccacccgcggcgggcgggagaagaccgactggtcgcgggcgccgttcgtcgcctcctaccggggcttccacgtcgatggctgcgaggcgtcggcggaggcccggtactgcgccacccagggcgcccggtggtgggaccagccggagttccgcgacctcgacgccgaccagtaccgccgcctcgcctgggtccgcaagacgcacaccatctacaactactgcgacgaccgcgaacgctaccccgccatgtcgcccgagtgccaccgcgaccgcgacgcctga

SEQ ID NO: 3507 - DNA, 1305 bp, Oryza sativa
atggcgttcttccggggcctgaccgcggtttcgaggattcgatcccgcatggcacaggaggccaccacgcttggtggtgtgagatggctgcagatgcagagtccatctgatcttgatcttaagtcccagctgcaggaattgattcccgagcaacaggatcgcttaaagaaacttaaatcagaacatgggaaggtccagcttggaaacataactgttgatatggtccttggcgggatgagaggaatgattggaatgctttgggaaacatcattgcttgacccggaggaggtgccaaccaaagagcaagtcgatgctctatcaaaggaattggttacccgttcgagtgttccaggccatgtgtataaggcaattgatgctctccctgtaactgctcatccaatgacacagtttaccacaggggtgatggcacttcaagttgagagtgagtttcaaaaagcttacgacaaaggaatgccaaaatcaaagttctgggagcctacctatgaagattgcttaaatttgatagctcgccttccaccagtggcttcgtatgtttaccggaggatcttcaaggatgggaaaactatagcagctgataatgcactggactatgcagcaaacttttcacacatgcttgggtttgatgatcccaaaatgctcgagttgatgcgactatatgtgacaatccacactgatcatgaaggtggaaatgtcagtgctcatactggacatctggttggaagtgctctgtcagatccttatctttcttttgcagctgcactgaatggtttagctggaccattgcacggcctggctaatcaggaagtgctgttgtggatcaaatctgtaataggtgagacaggtagtgatgttacaactgatcaactcaaagagtatgtgtggaagacactaaaaagtggaaaggttgttcctggcttcggtcatggagttctacgtaagaccgatccacgatatacatgtcagagggagtttgctttgaagtacttgcctgaggatccacttttccaactggtctccaagttgtatgaagttgtgcctccaatcctcactgagcttggcaaggtcaaaaacccatggcctaatgttgatgctcacagtggagttctgctgaaccactttggattatctgaagctcggtattacaccgtccttttcggagtttcgaggagcataggcataggatcccagctcatttgggaccgtgctcttggtctgccgctcgaaagaccgaagagtgtcaccatggagtggctggaaaaccactgcaagaaggctgctgcttga

SEQ ID NO: 3508 - DNA, 747 bp, Oryza sativa
atggaagagagacctcgcgatcgcaccgtcgaggaggccgcggcgttctccggcgatgagtccgatggggaattcgagttcccgttcgtgagcagggagacggacgccgggggcgtggccgacgagctcttcgcggacggccgcatcagggcgttctacccggtgtttggccgcgtgctcgacgacgtggcggtgacgcctgcggcggcggcsgcggagragcgragccgccgctcgggaggctgttcctcgaggaggggcggacctcgtccktcggktcgacgtcgtcgtcgtcgtcgtccacggacatcgccgagctggacggcttttcccccgacagctactgcttctgggtccccgggtcgtcgccggcgtcctcgccgtcgcgccccccgcggaaagagcgggtcgacggggtccatcgcgcggtggcgccgcatcagcgagctcgtcgtcggccgcagccacagcgacggcaaggagaagttccgcttcctctccgcgccgtcgtccccggccagggatcaccccaaaccgaagcccacgacgaakggcggcgccgccgcsgccaccaagctccacaccgagctcgacaccatcgccgccggccaccggctgtcctactcccccaaccacaaggcgcacggcggcgcaacgcggcggacgttcctgccgtaccgccaggatctcatgggcatcttcgccaacgtgaacggcctcagccggactcaccacggccccttctga

SEQ ID NO: 3509 - DNA, 1950 bp, Oryza sativa
atggcgggcaagggcgagggtccggccatcggcatcgaccttggcacgacctactcgtgcgtgggcgtttggcagcacgaccgcgtggagatcatcgccaacgaccagggcaaccgcaccaccccctcctacgtcggcttcaccgactccgagaggctcatcggagatgctgccaagaaccaggtcgccatgaaccccatcaacaccgtctttgatgccaagcgtctcattggcaggaggtttagcgatgcttctgttcagagtgacattaagctctggcccttcaaggtgattgctggacctggtgacaagcctatgattgttgtccagtacaagggtgaggagaagcagtttgctgcagaagagatctcctccatggtcctcatcaagatgcgtgagattgctgaggcctaccttggcaccaccatcaagaatgccgttgtcactgttcctgcctacttcaatgactcccagaggcaggccaccaaggatgctggagtgattgctggtctcaatgtcatgcgtatcatcaacgagccgactgctgcagctattgcctatggtcttgataagaaggccaccagcgttggtgagaagaatgtcctcatctttgaccttggaggtggtacctttgatgtctccctccttaccattgaggagggtatctttgaggtcaaggccacagctggtgacacccatcttggtggtgaagattttgacaatcgtatggtcaaccactttgtgcaagaattcaagaggaagaacaagaaggatatcactggcaaccccagggctctcaggaggttgaggacagcttgtgagagggcaaagaggaccctgtcctccactgcccagaccaccattgagatcgattccctgtatgagggcatcgacttctactcaaccatcacccgtgccaggtttgaggagctcaacatggatctcttcaggaagtgtatggagcctgtggagaagtgcctcagggatgctaagatggacaagagctctgttcatgatgttgtccttgttggtggctccactaggatcccgagggtgcagcagctcctgcaggatttcttcaacggcaaggagctttgcaagaacatcaacccagatgaggctgttgcttatggtgctgctgtccaggctgccatcttgagtggtgagggcaacgagaaggtccaggacctcctcctgttggatgttacccctctctctctcggtttggagactgctggtggtgtcatgaccgttttgatcccaaggaacaccaccattcccaccaagaaggagcaggtcttctccacctactccgacaaccagcctggtgtgctcatccaggtttatgagggtgagaggaccaggacacgtgacaacaacctgctggggaagtttgagctctctggaatccctcctgctcccaggggtgttccacagatcactgtttgcttcgacattgatgccaatggtatcctgaacgtgtctgctgaggacaagaccaccgggcagaagaacaagatcaccattaccaacgacaagggcaggcttagcaaggaggagattgagaagatggtccaggaggccgagaagtacaagtcagaggatgaggagcacaagaagaaggtggagtccaagaacgcgctggagaactacgcctacaacatgcgcaacaccatcaaggatgagaagatcgcctcgaagctcccggcagcggacaagaagaagatcgaggatgccatcgaccaggccatccagtggctggacggcaaccagctcgctgaggctgatgagttcgatgacaagatgaaggagctggagggcatctgcaaccccatcatcgccaagatgtaccagggcgctggcgcggacatggccggcggcatggacgaggacgatgctcccccggctggcggcagcggtgctggccccaagatcgaggaggtcgactaa

SEQ ID NO: 3510 - DNA, 1659 bp, Oryza sativa
atggagggatggagtttgacacgagacgatggatcagggaacgagacatgcgaaaggctggggacgatcggcacgacggcgaacctgctggtgtacctcaccaccgtcttccacatccccagcgccgccgccgccaccctcctcaacgtcttctccggtacctccaacctcgcccctctcctcggcgccttcctctgcgacgcctacctcggccgctacgccaccctcgccgccgcctccatcgcctccttcctcggcatgcttgtgctcaccctcaccgccgccatcccatctctccaccccccaccttgtgcctcctcctcgtccacgtcgtgccagggccccacgcaccgccagctcgccgcgctcctcgcctccttcgccttcctcgtcgtcggcgccggcggcatccgcccctgcaacctcgccttcggcgccgaccagttcgacccggccaccgccgcgggccgccgcggcatcgccagcttcttcaactggtactacttcaccttcaccatcgccatgatggtgtccgccacgctcatcatctacctccagagcaacatcaactgggccatcggcctcgccgtgcccaccgcgctcatggccctctcctgcgcgctcttcttcatgggcacccgcctctacgtccgcgtccgccccgagggcagccccttcaccagcttcgcccaggtgctcgtcgccgccgcccgcaagaggcgcctccctgccccggcgtctcctgccgacgacctgttcgatccgccgcaccggagcaagctggtggccaagatcaagcacacggaccagttccggtggctggacaaggccgcggtggtgacggcggaggacgcggtggtggacggcatgagcgcggcggcggcgaacccgtggcggctgtgcacggtgcagcaggtggaggaggtgaaggtgcttgcgcggatgatcccggtgtggtcgtcgtcgatcgtgtactacgtgatgctgacgcagctgggcactcggacccggcggktggggaggtcggggttcgaggtgccggcggggtcgatggtggtgttcaacatggtggcgctcacggcgtggctgccggtgtacgaccgcgcggtggtgccggcgctgcggcgggtgacggggcgtgaggaggggatcagccagctgcagcgcatcgggatcgggctggcgctgtcggtggcgacgatggcggtggcggtggcggtggagcagaggcggcgcggggcgggaggagggtcgtcgtcgtcgtgggcgtggatggtgccgcagcaggcgatggcggggctgtcggaggcgttcgcggcgatcgggctgaacgagctgtgctacaaggagtcgccggagagcatgaggagcgtggcgggggcgctgtcgccgctggcgctggcggtggcgagctacgcgagcggggcgatggtgacggcggtggagcgggcgacggggtggctggcgcaggacatcgataagggccgcgtcgacctcttctaccttgtggtgggcgccatgtcggccgccaacctggcttacttcgtggtctgcgcgctctggtacaggtccaagaacatcgccgaccacggcggcgttgagcttcttcagaccagctccaagcacaacgccgacgcgccgccggccatggcggtctga

SEQ ID NO: 3511 - DNA, 1065 bp, Oryza sativa
atggcgggagcaagagccattggttctctcccagtgcctaatgtgcaggagcttgcaaaaacttgcaatggtccagatgaacacatacctgaaagatacatcaggccagaggctagttctgaggaggtcatcagcaactaccatggtgaggcgattccgatcatcgatctcaataagttgctttctccgcaatcatcagaagaatgtgtgaagctgagatctgcctgccagtattgggggttctttcagctcatcaaccatggagtgccagatgaagtgattgcaaacctcaagagagacattgttgatttcttcagccagccactggacgccaagaaggagtacacacagctacccaacagcctcgaaggctatggacaggccctcgttttctccgaggaccagaaacttgactgggcagacatgctgtatcttcaagtccatcctagcgattcaagggacttgaggttctggccgacttcccctgcatctttcaggcgatcccttgatgcatactcatcagagactaaaagcctggcactctgcttgtttgagttcatggctaaggctgtgggcgctaagccagaggctcttttaggcatatttgaagagcagcctcgaggcttaaggatgacctactacccaccgtgcctgcaatctgacaaggtgatgggcatttcgccgcactctgatgtggttggcctaacactgctgctccaggttaacgacgtgcagggcctgcagatcaagaaagatggcaagtggttatccgtagacgctccgaatggtgcattcatcgttaacattggcgacacacttgagatcctaagtaacggaaagttcagaagtgttgagcacagggccgtgataaacccaaataaggagcggatttcagcatcactgttccactatccgtgtgagaatatggtgatcagacctctgacggaatttgtgaaagatggtaaagtgaattacagatcaattagttaccttgatttcatgacacaattcttcacacaacagcttgatggaaagaacagactggagatgttgaagttggaatag

SEQ ID NO: 3512 - DNA, 792 bp, Oryza sativa
atggaggtcattgttgatctccatattatgaatagatctgagaagtcgagctatcgaacaacacctcaatctcgatgtgctgtgttggttgccacccgagcagaagaggcagcggtgaagacactgatggtgtggacatttcatcctttcatccttcaaaccaagcgcttctacactgttcttatttggcgtagagttcttgccttcttatgtgcttctcaattcttacggatagtcacattctattccacacaacttccagggcccaactatcattgccgtgagggctcagctcttgccagattaccacatcctcaaaatgtagcagaggtgcttctcattaatttcccaagaggagtaatttacgggtgcggtgacttgatattttcatcccacatgattttcactatagtcttcgttgtaacataccagaaatatggaaatataaggtttataaagatgcttgcatggtgcatagctattgctcagagtcttcttatcatagcctctcgcaagcattacagtgttgatgttgttgttgcatggtatacggtaaacttggttgttttctttgtggacaagaagcttacagaacttcctgaccgatcagctggatcaacatctgtactacctgtgagcataaaggagaaagacagcaagttgaaagaggataagactagaatgttgaatggtaactctgttgattctgctgattggagaccatggacacaaatgaatgggaagcacattgagaatgggaaccatcttgataccgaaacaacaaaaacatga

SEQ ID NO: 3513 - DNA, 756 bp, Oryza sativa
atggcctcacgcagtagtgccctgctcctcctcttctcggccttctgcttcctcgcccggcgagccgccgccgactacggctcctggcagagcgcccacgccacgttctacggcggcggcgatgcgtccggcacgatgggcggggcgtgtgggtatgggaacctgtacagcaccgggtacggcaccaacacggcggcgctgagcacggtgctgttcaacgacggcgcggcgtgcgggtcgtgctacgagctgcggtgcgacaacgatgggcagtggtgcctgccgggcagcgtcaccgtcaccgccaccaacctgtgcccgccgaactacgcgctccccaacgacgackgcggctggtgcaacccgccgcgcccccacttcgacatggccgagccggccttcctccagatcggcgtgtaccgcgccggcatcgtgcccgtctcctacagaagggtgccgtgcgtgaagaagggcgggatcaggttcaccatcaacgggcactcctacttcaacctggttcttgtgaccaacgtggccggcccaggcgacgtgcagtccgtgtcgatcaaggggtccagcaccgggtggcagcccatgtcccgcaactggggccagaactggcagagcaactcctacctcgacggccagagcctctccttccaggtcgccgtcagcgacggccgcaccgttaccagcaacaacgtcgtgccggccggctggcagttcggccagaccttcgagggcggccagttctga

SEQ ID NO: 3514 - DNA, 657 bp, Oryza sativa
atggtccactcgctgttattctcgatccatgagtcagaccttctggctttcaaaagaggtcaatgcagtgccagctgcatccgtcatttacttgtgaagctcttgagatattcgggatatgatgcagctgtttgcgtatcaaaatggcagggattcgacaagatacctggaggtgatcatgagtatatcgatgtcatcatgaatagtgatactgaatatcgtctgatcattgatatcgacttcaggagccactttgaaatagccagggctgttgattcttatgacagtctgctcaattcacttccggtggtctatgttggcactcttcccagactgaaacagttcttgcatgttatggtagatgctgcaaaatggtcgcttaagcagaactctatgcctctgcctccttggagatccttgccttatctccaagcaaaatggcattccaagtatgagaggatagacctgcacattgagcaagacttccacagcacagcttcagatcacgcactatgcattgggcacctcaaaaggctgaaatcctccctgcagtcagaactggataccgaaaggttgcttatgatgccaatcaagactgatatgaagcggagggcaaagtttgagaggcggcggcgccgttccttgctcagcttctga

SEQ ID NO: 3515 - DNA, 825 bp, Oryza sativa
atgagaagtccagcagcgcttctcccggtggttgcagatggtggtggtggtgttggggtggaggaggagatggatgtggacgaggacatggcgatgtgcggcggccgcggcggcggcggcggggagaagaagcggcggctgagcgtggagcaggtgcgcgcgctggagcggagcttcgagacggagaacaagctggagccggagcggaaggcgcggctggcgcgcgacctcgggctgcagccgcgccaggtcgccgtctggttccagaaccgccgcgcgcggtggaagaccaagcagctcgagcgcgactacgccgcgctcgccaatcctacgagcgcttcgggccgaccagagcgctttgccgcracaaggacgcccttcttgccgaggtacgcacgccaagaaacgatcaaggagctgaaggggaagctcggcgacgaggacgccgcggcgagcttctcgtcggtgaaggaggaggaggacccggcggcgtccgacgccgaccccccggccaccggcgcgccgcagggctcgtccgagagcgactcgagcgcggtgctgaacgacgcggagatccttccacacaagccagcgccggcggccgccgccgacgccgcggcctcggaggagacggaggcggtggtgaccggcgccgcgctgctccaccacgccgaggtgttcttccacgggcagcttctcaaggtggacgacgacgaggcggcgttcctaggcgacgacggcgcggcgtgcggcggcttcttcgccgacgagcatctcccgtcgctgccgtggtgggccgagcccaccgagcaatggacgacctag

SEQ ID NO: 3516 - DNA, 1314 bp, Oryza sativa
atggggttgggtgtagagcctctaggattgagggctatggacagagatttcgctaagcagatagggattgaggatgtgagcgagtgcccccacctttgtgcactagcttacggttatctgaagaagactgagggttatgaacaaaacctactcgcgttcttccataacaaaataaactcggacgctcttctcgtgctgttgattgaggagctagacaaatgtatactcggctacttctccttccattggaaatttgccactgaagtaatcacacaggttctaacagcagagcagcctagaagaaagctcaaaaccatggtgttagaagccactagaaagatgaggtttgagagggtgtcaaggaagctgaaggtgacgaggctgttctccacgctggtggaggaactgaaggtcatcggggtcacctgcaacgacggccagctgcgcgacgccgacgccgacgtgatggtcccggcggctcaccgcgaccgcagcccggtcctgctcctgatgggcggtggcatgggcgccggcaagagcaccgtgctcaagcagatcatgaaggggttgttctggtccggcgcggcggcgcacgccgtggtggttgaggcggacgcgttcaaggagtcggacgtcatctaccaggccatcagctcgcgcggccaccacaacgacatgctgcagacagccgagctggtgcaccagtcgtcgatcgacgcggcggcgtcgctgctggtgacggcgctgaacgaggggcgggacgtgatcatggacggcacgctgtcgtgggagccgttcgtgctgcagacgatcgccatggcgcggtccgtgcaccgcagcggtacggatgggcgtgggctacaaggtcgccgcgacggcaacgccaccgagcagtactgggagcccgtcgagggcgcccccgtgcccagcgggaggaggccctaccgaatcgagctcgtcggcatcatctgcgacgcctacctcgccgtcgtcagggggatcaggcgagccatcatatcggggcgagccgtgcgggtgagctcgcagctcaagtcgcacaagcggttcgccggctcgttccgcaagtactgcgacctcgtcgacagcgccagcctctacagcaccaacaccatcgccggcgcgaagttgatcgggtggaaggacgtggggagcaggctgctggtggacgtggagagatcgggctgctggacagggcagccctcgacgcttagggccatcttccttgaagaggttagaaacgtattaggcctgaaaaggggcccgagtacagcgctgcaagagaaaagaaggtag

SEQ ID NO: 3517 - DNA, 1734 bp, Oryza sativa
atgagagaagagagcgccaagaagagcaagctttcatggtccaaatcgctcgtgaggaagtggttcaacatcaggaccaaggcacaggacttccatgctgattctgaaaccacaacccaaggtagggatggtggtggtggagcaggggggagggccagcttctcagcgagctctgcaagcacaagttcagccaagaaaagcagaacagaccggtcgtcgtcgaagcggagcgctgatcgcgtccgccgagggaggaatgatttcgatctagcacgcctgacagaggttcaagattacagaatctttgccgcaacatggaatgtcggaggcaagtccccaccaagggggctaaatttagatgagtggcttcactcttctcctcctgctgatatctacgtgttaggatttcaggagattgtccctttgaatgctggaaatgttcttggcactgaagataatattccagcaaagaagtgggtatctcttattaggaggaccctgaacaagaatcctggggccagtggttctggtgtctatcatacgccgtcaccagtccttaatccagtcgtagaactagaagctgattttgaggcatctgcaagaaggcaggagaactactctttctttcaccgtcgatcattccataatctcagccgcagtttaagaatggatgcagactacatgttcccacaaccaaagttggacagaagatttagcgtttgtgacccagtcagcttaggaggtagaccaagtgactttgatggtaatttgcggtggcttgggtcaccagatgaggagaacatcgatgaggaactctctaacgctgcacaatgttctccacttccttatagctgcaatacaacggcacctactgaagctaacgacgagcaacccaatggatcaaggtattgtttggttgccagcaaacaaatggttggcatatttctcactgtctgggtgcgcaatgaaataagagatgatgtgagaaacttgaaagtttcttgtgtgggtagaggattgatgggttatcttggaaataagggttctatatcaataagcatgtctttgcaccagacaagcttctgcttcatttgttgccatttgacctcaggggaaaaggaaggggatgaattgcgcaggaattctgatgttatggaaatattaagaaagacaaggtttccacgggttcgtggtgctaatgatgtcaaatcacctgaaacgattcttgagcatgaccgtataatatggcttggggatttgaactatcgtattgccctctcctattgttcagcaagagctcttgtcgaaatgcataactggaaacaattattagaaaaagatcagcttcgaatacaacaaagatacgggagagtttttcagggctggaaagaaggaaggatttattttcctcccacgtacaagtattcgttcaattcagatcgttatgccggagagggcatgcatcccaaagaaaaaagaagaacgcctgcatggtgtgatcgcattctctggtatggtaatggcctcaaccagctgtgctatgttcgtggggagtctcgcttctccgatcacaggccagtgtacagcattttcatggcagaagttgagattgtacaccataggaggaaaaacatgggatatttcagctctagaattgagattagggtactggccaaaaatacaaacatgcagggttcaagagtcagctcattaggtgatcagatatataattaa

SEQ ID NO: 3518 - DNA, 1140 bp, Oryza sativa
atgggtgtaggaagggttatgaacgatgcgaagccgtacctggcgatgatactgctgcaggtggggttcgccgggatgtacgtggtggccgtcgcctcgctcaagcgcggcatgagccacttcgtcctcgtcgtctaccgtaacctcttcgccaccgccgtcatggcgcccttcgccctctggttcgagaggcgagtaagaccaaggttgaccctcatcatcttcctgaagatcatggggctcgccatacttgagcctgtgcttgatcagaacctgtactacatgggggccaacctgacatccgccggcttcgcctccgctctcatcaacgtcctccccgccgtcaccttcgtcatggccctcgtcctcagcatggaatgcgagagattaatggatggagaaggtgaagctgaagagcgtgcacagccaggcgaagatcgccgggacactgttcacggtggccggagcggtgctgatggtgctgtaccacggcccggtggtgcagttcccgtggaccaaggggcagcaccacgacggcggtccggcgccggcggcgcggcgggcggcgggttcctccagggcaccatcttcatcgtcgtcgcctgcgtgtgctggtcgggcttcttcgtcctccagtccaacaccctgcagagttacccggccgagctgtcgctcaccacgctcatctgcctcatgggctccgtcctcagcggcaccgtcgccctcgtcgccgagcgccacaacacccacgcctggctcatcggcttcgacacccgcctcttcacctgcgtctacgccgggatcgtgtcgaggcagaggggcccagtgttcgtgacagcattcaacccgctctgcatgatcatcaccgccatcatgggctccatcattctcaaggaagaaatcaaccttggaagcgtgatcggcgcggtgatcatcgtgatagggctgtacgcgctgatctggggcaagggcgccgacaaagtcgagcagacagacgccggcgcggcggcggcgggcagcaacaagggcggcggcgagctgccattgacggcggtgcccaacggccacggcagcaagcacggcaacggcggccatgtctacgacgtcgagacgccgccggcggcgaacgggcactactag

SEQ ID NO: 3519 - DNA, 786 bp, Oryza sativa
atggcggcgccagcagccagcgcgctcccgctcgacggccgcgtcgcgctcgtcaccggcggctcccgcggcatcggccgcgaggtgtgcgcccacctcgcctccctcggcgcccgcgtcgtcgtcaactacgcctccaactccgccaacgccgacgccttcgccgccgacctcaactcccgcggcgccgccgccttcccgcgcgccgtggcggtgcgcgccgacgtgtccgacccggcggcggtkcgcgcgctgttcgaccgcacggaggaggcgttcggcacgccgccgcacatcgtcgtcgcctgcgcgggcctcctggagtccaagtacccgtcgctggccgacaccgccgtggaggacttcgacgccatgctcgccgtcaacgtgcgcggcacgttcctggtgtgccgcgaggcggcgaaccgcttcccggcgggggcggggggccgcgtcgtgacgttctcgtcgtccatcctcggcacgctcctccccgggtacgcggcgtacacggcgacgaacggcgcggtggaggcgatgacgaggatcatggcgaaggaggtggcggcgaagggggtgacggcgaacgtggtggcgccggggccggtgaggacggagctgttcatggcggggaaggacgaggcgttcgtgaagaaggtggaggagaggtcgatggggcggatcgccgagacgacggacgtcgcgccggtggtggccttcctcgtcagcgacgccgcggcgtgggtgaacggccaggtcatccgggtcaatggcggcttcgcgtga

SEQ ID NO: 3520 - DNA, 1155 bp, Oryza sativa
atgggaagaagcggcgcgggtggggaccgcgaggcctkggcggatcaggagcaggggaacggccggggccgcggcggcggcggcggggaggcgaagcggtcggagatctacacgtacgaggccgggtggcacatctacggcatgaactggagcgtgcggcgcgacaagaagtaccggctcgccatcgccagcctgctcgagcagcacaacaaccacgtccaggtggtccagctcgacgagtcctccggcgacatcgcccccgtcctcaccttcgaccacccctaccctcccaccaagaccatgttcgtcccggacccgcactccgtccgccccgacctcctcgccacctccgccgaccacctccgcatctggcgcatcccctccccggacgaggccgccgccgccgccgccgccagctccaactccggctccgtccgctgcaacggcaccgcctcgcccgacgtcgagctgcgctgcgagctcaacggcaaccgcaacagcgactactgcggcccgctcacctccttcgactggaacgacgccgacccccgccgcatcgggacctcctccatcgacaccacctgcaccatctgggacgtcgagcgggaggccgtcgacacccagctcattgcccatgacaaggaggtctacgacatcgcctggggcggtgccggcgtctttgcatccgtctccgccgacggctccgttcgcgtgtttgatctccgggacaaggagcattccacaattatctacgagtccggttctggcggcagctccaattcggcaggtgcagatggcggcgctgcctcgccaacaccgctggttaggttagggtggaacaagcaggaccctaggtacatggcaaccatcatcatggatagccccaaggtggtcgtgcttgatatccgctacccaacactaccgctggggatgactcgcaggccttatatgggactgtcatccatgggcactgggagcaacaatggtggcaatggaaatggcaatgctgcagctgctgcggcagctgagggcggtcttgatcccatattggcgtacactgctggggcagagattgagcagctccaatggtcagcgacccagcctgactgggtcgctattgcattctccactaaactgcagatcctcagggtctga

SEQ ID NO: 3521 - DNA, 906 bp, Oryza sativa
atggggttcaagggatttgtggagggtggcatcgcgtccatcgtcgctgggtgctcgacgcacccgctcgatttgattaaggtgaggatgcagctgcagggggaggcgtcggcggcggcggcggcggtcgcgccggcgcaggcggcgctgcggccggcgctggcgttccacgcggggcaggccgtggcgatcccgcatgacgtgattgcgccgccgaggaagcccgggccgatagccgtcggcgcgcagatcctgcgggcggagggcgcggcggggctcttctccggcgtgtcggccaccatgctgcgccagacgctctactccaccacccggatggggctctacgacatactgaagaagaagtggacccaggagaacggcggcgtgctgccgctccaccgcaagatcgccgctgggctcatcgccggcggggtctgcgccgccktggggaacccggccgacgtcgccatggtgcggattcaggccgactggcggctcccgctcgccgarcgccggaactaccgcarcgtctgggacgccatcggccggattgcgcgcgacgagggcgaccaggccaaggaggccatcctggggcgccgcggccccggcgccgacgggctgggcacgcacgtcgtggccagcttcgccgcggggctcgtcgccgccgcggcgtcaaaccccgtggacgtggtgaagacgagggtgatgaacatgaaggtggcgcccggcgcgccgccgccctactccggcgccatcgactgcgcgctcaagacggtgcggtcggagggcgtcatggcgctgtacaaggggttcatccccaccgtgtcgcgccagggccccttcaccgtcgtgctcttcgtcacgctcgagcaggtgcgcaaggtcttcaacggcgtcgagttctaa

SEQ ID NO: 3522 - DNA, 1455 bp, Oryza sativa
atggcgagtgatggccacctcgcggcgccgctcctcgacggcggcggcggggtggacgacgcggcgcttctccggcggctctacgtggggcacttcctggcgaggtggggcgcgaggatgtgggagttctcggtggggctctacatgatccgaatctggccgggctcgctgttgctcacggcggtgtacggcgtcgtggaggcctccgccgtggcggcgctgggccccatcgtcggcgccgtcgtcgacaggctcgcatacctgcaggtgctcaggctgtggctgctgctgcagggcgcgtctttcgtcgccgccggcgtctccgtcacggcgctgctcgtctacggcgcccggctcgccgccgcggggttcccggcgttcgtggcgctcgtcgtcgtcaccaacgtctccggcgcgctcgccgcgctctccaccctcgctggcaccatactgatcgagagagaatgggtggtggtgatcgccggcgggcaaccggcggcggtgctgacggggatcaactcggtgatccggcggatcgacctgagctgcaagctgctggcgccggtgctgtccgggttcttcatcagcttcgtgtccatggaggcctccgcggcggcgctggcggcgtggaacctcgccgccgtgtgggtccagtactggctcttcgtctccgtctacgccggcttcccggcgctcagcgagaccagccagatctcaagacggcgcgccgacgatgacgaggcagcggcggcggcgcagccgcagaaggtggagcggctgtggatgacgatgctgccgtgctgggagtcgtgggcggtgtacgcgcggcaggaggtggtgctccccggcgtggcgctcgcgttcctctacttcaccgtgctgagcttcgggacgctgatgacggcgacgctggactgggaggggatcccggcatacgtgatcagcctcgcccgcggcgtcagcgccgccgtcggcatcgccgcgacgtgggtgtacccggcggcgcacgcccgcgtgtccacgctccgcgcgggcctctggtccatctgggcgcagtggtgctgcctcctcgtctgcgtcgcctccgtctgggccggcggcgccgcgccattggcgtcggcgtggatgctgatgggcggcktggcggcgtcgcggctggggctgtggatgttcgacctagccgtgatgcagctgatgcaggacggcgtcccggagagcgaccggtgcgtcgtcggcggcgtgcagaactcgctgcagtccatgttcgacctgctcacctacgtcatgggcatcatcgtctccgaccccagggatttcggcgagctgatcgtgctgtccttctttctcgtgacctgcgcggcggcaatgtacacgatgcatgtgtaccgggtgaggaagcatctgttccatctcgacaggatcctgcccaagatgaactggatcaaagcttcttga

SEQ ID NO: 3523 - DNA, 1980 bp, Oryza sativa
atggagcccamcggcacgatcgtcttcgccaccgtcggcgtcaccaacttcggcttcgacgtcttctccgccgccgtgccactgccgccgatggaggaggacgccgagcgccgccacacggacggcgtatccgtgaacttcaacgcgcagttcgtcgacgatggcggggaggaggtggcgttcgtgtcggagcgaggcggcgcggcggggctgttccggtgccggccggggcccgagcagcgggccgagccgctgccgacggtggaggggagcctgttccatgaccgcccgacggtgaggggcgggaggttgtacttcgtctccgcccacgagcagccgccggcgccgttcaggagctgggcggcggtgtacgcgacggagattgggagcaaggagacggtgcgggtgagtcctccgggcgtcgtggacatgagccccgccgtgtcggactccggggagctcgttgccgtcgcgtcgtacggggatcggccgtgggcgttcgacttccgcgtgctggaaacggaggtcgccgtcttccgcgccgccgatccagccaggcgcgtcgtcgtggtggggcgcggtgggtggccgacgtggcacggcgagggcacggtcttcttccaccgcgtcgccgacgacgggtggtggagcgtgttccgggtggacgtctcgcctgagaccctcgagcccaccggcggcgagaggcgagtgacgcctcccgggctgcactgcttcactcccgccgcggtcggccgcggcggcggcgggcggtggatcgccgtggcgacgcggcggaaggggcgcgcgcagcggcacgtcgagctgttcgacctcgagacggagagcttctccccgctcaccgagcgcctcaacccggagctccaccactacaaccccttcttctccccgtccggcgaccgcgtcgggtaccaccgcttccgcggcgccggcgcgcggggggactcggtggtgccctacctgcagccggtgcagagcccggtgagctcgctccggatgctgcgcgtgtacggcacgttcccgtcgttctcgccggacgcggcgcacctcgccatgaacggcgacttcttcaagacgccgggcgtcaccatcctccgatccgacggcgccaagcggtgggtgctcacgcgggagcccaacctgttctacacgtcgtggagccccgccgagagcggggtcatcttcacctccatgggccccatcttcgagaccaccaaagcgacggtgaggatcgcgcggctggagttcgacgccggcgagctcaccaccggccgcgacgaggtcgcggccacgctcaaggtgctcacccggccggaggccggcaacgacgcgttcccggcggtttcgccgtgcggraagtgggtggtgttccggtcaggccgctccggccacaagaacctctacatcgtcgacgcggcgcacggcgaggacktcggcgccggcgaggggacgatccggcggctgaccgacggcgagtggatcgacacgatgccgagctggtcgccggacgggagcctgatcgcgttctcctccaaccgccacgacccgacgaacgccgccgtgttcagcatctacctggtccggccagacggctccgggctccgccgcgtycacgtcgccgggccggcggggarcgcggcggcggacagggagcggatcaaccacgtgtgcttcagcccggactcgcggtggctgctgttcacggccaacttcggcggcgtkatggcggagcccatctcggcgccgaaccagttccagccgtacggcgacctgtacgtgtgccggctcgacggctcggggttggtcaggctcacctgcaacgcctacgagaacggcacgccggcgtggggcccggcgagctcgccggcggcggggctggagtcgctgtcgctgggcccgggcgccggggacgagtcgctgggcgagtttgatgagccgctctggctcacttgcgacgtctga

SEQ ID NO: 3524 - DNA, 2007 bp, Oryza sativa
atggagcatcctcccttctttctgctccttgtgtcgcttggcttcaaccttatagccctttgtgccggtcaaaaccaattcatctaccatggtttcaccggcaaaaacctcactatcgatggcaccaccaaaatcacaccggaaggactccttgagctgactagtgacaagaatgatctcaatggccatgcattcttcccaacacctatgcatttccgcagttcacccaacagcaccgttcagtcattctcggtgaacttcatgttcgccatccagtccttctactccgatagaagctacgatggcatggcgttcttgatagccccaagcaacaatctctcgactgcgtggccagatgggtacctgggtctctttaacatcagcaacagagggaattcaagtaaccgcatcctcgcagtcgagctcgacacctttcagaacaatgagtttggggatatcagtaacagccatgttggcattgatatcaatgacgtccgctccgtgaattcctcctttgctggcttctatgatgacaagaacgggattttcacaaacttgactctgtacaatggtcgggctatgcaagtttggatggaatacagcgaagaggccacgcagatcaccgtgaccatggctcccattgatacaccaaagccgaagaggccactgctctatgccacctatgatctctcgactgtgctcacagaccctgtgtacataggtttttcagctgcaactggcgtaattagcacacgacatatcgtgcttggctggagctttggcatgggtgttccagctccggacattgatatcaccaaactaccaaagctacctcgtgttggaaccaagcctcgttccaatgtcttggaaatcgtcctcccaatagccagtgccatgttcatcatcattgtcggcaccatggtcattttgattgtgcggaggaagctactgtatgctgagctacgagaagattgggagattgattttgggcctcagcggttttcatacaaggacctgttccatgccactcaaggatttaagaataaaaacatgattggagtaggtggatttgggaaagtctataaaggagtccttgcgacatccaaattggagattgccgtgaagaagatctcccatgagtcgagacaaggaatgaaggagtttataacagagattgttagcattggtcgtcttcgacatcgcaaccttgtgccactacttggctactgtcgacggaagagtgaactacttttggtctataactacatgccaaaaggtagtcttgataagtatctacatgatgtagacaatagggctatacttaattgggctcaaagatttcagataattaaagatgttgcatgtggattgttctatttgcacgagagatgggagaaagttgttatacatcgagacataaaggcaagcaatatactccttgatgctgaaatgaatgggagattaggcgactttgggcttgcacgactatatgatcatggtactgacctacagactacacatgtggttaggaccatgggctacctagcacctgagatggtacagacaggtaaggcatcccctctcacagatgtgtttgcttttggcgcattccttcttgagaccacttgtggacaaaggccagtgaaacaaaactctcaaggcaaccaacttatgctggttgattgggttcttaagcattggcatgatggatctctcactgaggcagtggacatgagactccaaggtgattataacattgaagaggcatgcctagtcctaaaattagctcttgtgtgtttgcatccatttcctgcttcaaggccaaatatgcggcaggtaatgcaatacctcgacaaggacttgccacagccagagttagcaccaacacgtctaggtttcagcaagctacctttgatgcaaagcaaaggatttaacccatcagccatgtcatatccggagtttaggacaagcatcggcacattctctggcctctcaggtggacgatga

SEQ ID NO: 3525 - DNA, 4125 bp, Oryza sativa
atggaggcggtggtgagcgtgtccaccggtgcgctgaacaccctcctccccaagctcgccgacctcctcctcctcgtcgccggcgagcagcacagcagcaggcgcgccgtcaaggacggcgtcgagcacctcgagagcgagctgaccagcatgcgcgccgccctcgacaaggtgtcggcggcgccgcccgaccagctcgacgggcaggtcaggctctgggccagggacatccgcgacatgtcctacgacatcgaggacgccatcgacacctacctgstccgcgaggccgccgccgccccacgacgtccgtgctgcatcggcttcgcccatggccatggccgaagccggcggcgcgccgccatcgtcgtggagatcgagcgcatcaagaaggaggtggaggaggtgagcaggcgccgggaaaggtacaggatcgacgaccatgtcgtcgtcgtcgtcgacgacgctccggtggacctccggctgccggcgctctacacgaacgccgccagcctcgtcggcgtcgacgcctcagtggaggaagtgatcaagctgttatccatggaaggagatcaaggtgcagtgatggtgaggcgaaagctcaagctggtcgccattgttgggccaggaggaatcggcaagacaacgctcgccaaccttgtgtatcagaagctccatggccaattcgagtgccaagctttcgtctcggtttctcgaaagccaaacatcaaggttgttcttagcagcatactctgtcaagtgagccaactcaagtatgaaaatttcagttcttggggtgagaaggaaatcatcgacaaaatcagggatattctcaaggatatcaggtacttcattattattgatgatatatgggataaaccaacatggcaacttctaaaatgtgttctcatcgacaatgatcatggtagcaaaataatcaccactactcgcaacatggatgttgcaaagttgtgttgctattctgatgatgttgatggtaccatacaaatacaacagcctctttcagttgctgactctgaaaaactactatatcacaaagtattccataatgaaagatgccctcctcagcttmagggcatatctcagaaaattttgaaaagatgtggtggcttaccattagctataattactattgctagcttatttgcaaataggcagacacaaactgaggaccactggaactcggtatgcagttctttccataccggacttgaaagtaatactgatgtgaaggacatgcgctggataatatctcttagttattgtgatatgccttctcctcttaaaacttgttttatgtatctaagtatatttccagaggattatatcatcgatagagatgacctaatatggagatggatagctgaagattttatccagccaagacaaggtacaagtctatatgaaaaaggagagagttactttgatgaactcattaatagaaacttgatccaaccgatatgcattgatgtgcatgctgaggcgcaagcttgtcgtgtgcatgataccatactggaatttatcgccggcttatcaattgaagaaaattttgttgccattttgaatggtcagtgttcggtgtctgatctaccgaaaaggatctaccggttatccctacaaaacagcaaggatgatattacaatacctgatgcaaccgagagattttcccatgtgaggtcactttggcaaggtattgatttgaagatgcccctttcgggctttcgagttttgcgtgtcttggatttaggagattgcagcagtcaaaatattgataatatagataatttggttcacctgaggkatctaaggttgcgtggtacacattataataagcttccaaaagaaattggaaacctaagatttttgcaaacattagatattaagcagacaagaatwaaagaattgccatcaactgttgtacatcttacacaacttatgcgtcttatggtggacacatggacaaagttgccaaatgggattgggaatatggaatgtctagaacaactgtcagagattgataccagcatgtatccaagtcttatgaaagagctaagcgatctgcccaatctacgggttctagaaattttgataagcacatgggagcagaccaaagaggaacaatttcttgattgtttaggctctatgaagaaacttcaaattgtccatatttttgctccagatatatcccttgatttcatgttgaataaagattggacccttcatgaactccaaaaacttacagttggtgttcgccgagaaagcgaagacatatttaagctcaacccattgtctgggtgggctgagtttagcccattctctatcctaccaaggtggatcaattcatcactcaccaatctctcatacttatcgatcattgtcaagatactacaacaaaaagatcttggagttcttggggacttgcctgcactttgttctctatacttgagcgtgacaggcgctttaaaggaaagattgatgataataggtcatagtagaggtaatggtcaggcaatagcattccaatgtctggctaacttcaactttacaagtcctgcaatgatgctagtttttagacatggagccatgcagaggcttcaaatgctttccttttgttttcaactaaaggagacaaaagtttttcacagtgatttggacatgggcttggagaatctcacctccctcaagactgtacattttcagattgactgtcgttacgctaggctctgggaggttgggattgtcaagattggaccatggggtggaaatagagggaggcgttatgatattgaggtggctcctcaccatctagaaagcatcagagttcacagcgatttggctgtacattcatttgaatttgaatatagcgaccgtaatggacagaaacatgttgcgggtccttggggaggatatggtggtagwaatgttcatatgattcaacttgaatcttcagaggttcttgtggaggtttctggaacatttggtcgatttgctggatttcaaaatatcataacctctcttacatttgttacaaatactcaaagctatggaccttttggacaaagagagggaacccctttccacataccagtgcagtgtggtggccgcattgttggattcttcgggcgtgcagggtggtgttttgatgcaattggtatctatgtgaaccctgatctccaaacaataaaagacaagggcaaagttgtgcttgccaagattgggccatgtggtggaaagggaggggaggcttgtgacatcatggtgcctccccatcatttggaaagtgtgacaatttgcagtaacattgtgatacactcactcacattttcttacaatgaccataatggagatcatcacttggcaggtttgtggggcagccatggtgggagtaatcagacgattcaatttggcccttcagagttcataactagagtttatggaacaattggttcatacaatacaccatctgatgttgtaacatctattacattggttactaatgctggctgctatggaccttttggtcaagaaaatgggatccctttcgactttccagtccagggtaatggcagcattgttggcttctttggacatgcgaacctttatgttgatgcaataggtgtctatgtgacaccttccatgggaacaaggaaagaagaagaaaatgttgggcttaccaagattggaccattcggccgacgtggagggaacccttttgacatcaaggtcacaccacaccagttggaaagcataacaattagtagtaacattgtaatcaattcacttgcattttcatacataagccatgacaaacaacaacacattgtaggtccatggggcagtggtggtgagagcaattatacgatccagcttggtccttcagaattttttgtcaaagtttcaggaacatttggtccatttggtgaattccccaatgtcataacctctcttacctttgtcaccaatactcatcatcagtatggaccttttggacaaggaggaggcactccattccatgctccaatgtcgggcaatggcagcattgttggcttttttggccgtgaagggttatgtattgaagcagttggtttttatttttgcgcattatga

SEQ ID NO: 3526 - DNA, 1254 bp, Oryza sativa
atggtcatcggccagacttcctccctccagctcgctgccctagggcctggaacggtgttctgcgattacctctgctatatattcatgttcctttcgatcgcgacctccaacatggtggccacctccttagctaaaaaggatgaagaacttgcacagcaccagtatctatgtgctgtttgtgctactactgtgtttagatgtgtcaccaagctttttgggactcaagtgttaactgtgtttactggatcggggaactatgatatcatttctgctgccaatacatatgcacagattagaggctttgcatggcctgcagttctggttggcttagttgctcaaagtgctagtctaggcatgaaagattcttggggtcccttgaaggcattggcagctgctagtgttatcaatggtgttggggaccttcttctctgttctgtatgtggatatggaattgctggcgctgcctgggcaactatggtttcacagattgttgcagcttttatgatgatgcaaaatctaaataagagaggatttcgagctttttcattcacaatcccatcatcaagtgagcttctgcagatttttgaaattgcagctcctgttttcataacaatgacctccaaggtagcattttacgcgttacttacgtattctgcaacttctatgggagcaataacacttgcagcccaccaggttatggttaatgtcctatgcatgtgcactgtttggggtgagcccctgtcacaaactgcacagtcattcatgccagagttgatatatggagctaagtgcaatttgatgaaggcaaggatgctattgaaatcacttgtcatgattggagcaataactggaacgactgtgggggcagtaggaacacttgttccgtggctttttcctagtctctttactaatgattttatggttgtccaacagatgcataaagtgctgattccatatttctgtgcattattggtgacaccttcagtgcatagtcttgaaggaacattattggctggaagagatctcaggtttttgagtcaatcaatgggagcatgctttggcattggaacctttctactaatgatcattcgcaacaaatttggtagtttgcctggatgctggtggatacttgtcttgtttcagtggggtcggtttggaagtgctttacaacggcttctttctccaacgggcatgctatataacgaaaacttcaataaccatcatgatgagtatgtcaaggtgaaggccacataa

SEQ ID NO: 3527 - DNA, 2472 bp, Oryza sativa
atgcaaatgcccttctgcccgaagctctggagctcggcggcgccggcgccggtgcagccggggagcgtggtcatcaatggcacggtggtcgtcgccaaccacttcggcctctcggctcccggcaagtccaccaccctccgcctcttcagcggcacggaggtcgatcacggtgacgctgaaagtctgaaaagaattgcagagacgaggaaggggaggctgagcgcggaggcggcgttgaggggagggaagaagacgaggcatgggaaggcgagcacgacgatgtaccaggtgacgttcttcgtcgacggcgagttcgggacgccgggcgccgtggccgtcaagaacgggaaccggaacgaccagttcttcctccggcacgtccggctggacctcgccgaggaccggagcatccacttcgactgcaactcctgggtctacccctataagaagaccacctccgaccgcgtcttcttcatcaacacgagctacctgccagataagacgccagaggcgctgcggctgttacgggaggaggagctcagaagcctgagagggaatgggcgcggggagaggaaggactgggagcgcatctatgacttcgactactataacgacctcggcaaccctgacaacgatgaccatgtccgccccgtcctcggtggcaccaagacccacccctaccctcgccgctgccgcaccggccgccccctcagcaagaccgacggggtgacggagacgcggaagcacaagctgataaacctggactactacatcccgccggacgagcggttcagcccggggaagctggcggaggtgctggcgatgggggtgcaggcggtgacccacttcgtcatcccggaggcccgctccatcttccacggcgacgtcgtcaacttcaagtccacggagcagctgcgcgccgacctctacggcaagccgccgcagccggcggcggacgccagggtcatggacgagctcaagtcctccgtgccgtcgcacaagacgtacaagcaggtttccaggattgtcaaggacaaccccgccaagttccccacccctcaagtcatccactatgacactgaggcgtggaggagcgacgaggagttcgcgagggagatgctggcagggctcaacccggtggtgatcaagcggctggaggtgtttcctccaaacaagagcaagataaccacggacgatatcatgacccagattggaggtctgaccattcaacaggcgatggagcagaaacggatgtacatcctggaccaccacgactacctgatgccatacctccggcggataaacacggagggggtgtgcgtgtacgcgtcgcgcacgctgctcttcctcagggacgacggcgccctccggcccgtcgccatcgagctcagcttgcccgacggcggcgtcggcggcagcgagatcagcagggtgttcctcccggcgagccagggcaccgatgcgcacctttggcacctcgccaagactcatgtcgccgtcaacgattctgggtaccatcagctcatcagccactggctgttcacgcacgcgacagtggagccgttcatcatcgcgacgaggaggcagctgagcgcgatgcacccgatccacaagctcctggacccgcacttcaaggacaacatgcagatcaacaccttggccaggagcatactgctcaacgccggtggcctcctggagaagaccatgtacccggggaagtactccatggagatgtcctccgatatctatgcccattggaggttcaccgagcagtccctgcctaatgatctcatcaagagggctgggtgcgcagctactgcgaccaayttctaccaagccgacgcggcggtkgccggcgacgccgagctgcaggcctggtgggacgacgtccgccgcgtgggccacggcgaccggcagggcgacgccgcgtgctggctggacctcgamaccgtcgcgggcctcgtcgagacgctgtcgacgctcatctggaccgcgtcggcgctgcaygccgccgtyaacttcggccagtacggctacgccgggtacccgccgaaccggccgacgcggtgccggcggttcgtgccgctcccggggtcgccggagatggcgcagctggaggccgacccgggccggttcttcctggagacggtgcccgaccggttcacggcgacgctggggatcgcgctgatcgaggtgctgtccaaccacacctccgacgaggtgtacctcgggcagcgcgcgacgtcgacgtggacggacgacggcgaggtgctgctgctgctggacaggttccgcgacgagctccggcgggtggagaagagggtggaggagaggaacaaggaccccaggctcgtcaaccggaggggccccgtgagggtgccgtacacgctgctctacccggacgccggcgacgtcgccggcaaggagaaggggatcaccgggagagggatacccaacagcgtctccatctga

SEQ ID NO: 3528 - DNA, 2505 bp, Oryza sativa
atggcgtcgccgtacgaccaccagtcgccgcatgcgcagcacccgtcggggttgccgaggccgccgggggcgggggcgggtgcggcggcgggcgggttcgcgcgggggctgatgaagcagccgtcgcggctggcgtccggggtgaggcagttcgcgtcgagggtgtcgatgaaggtgccggaggggttgggggggatgcggcccggtggcgggaggatgacgcggatgcagtccagcgcgcaggtggggctccgggggctccgcttcctcgacaagacgtccggcgggaaggaggggtggaagtccgtcgagcgccgcttcgacgagatgaaccgcaacggccgcctccccaaggagagcttcggcaagtgcatcggcatgggggactccaaggagttcgccggcgagctgttcgtggcgctggcgcggcggaggaacctggagccggaggacggcatcaccaaggagcagctcaaggagttctgggaggagatgaccgaccagaacttcgactcgcggcttcgcattttctttgacatgtgcgacaagaatggcgatgggatgctcacggaagatgaggtcaaggaggttattatactgagtgcgtcggcgaacaagctggcgaagctgaagggacacgcggcgacgtacgcgtcgctgatcatggaggagctggacccggacgaccgcgggtacatcgagatctggcagctggagacgctgctgcgcggcatggtgagcgcgcaggcggcgccggagaagatgaagcggacgacgtcgagcctcgcgaggacgatgatcccgtcgcggtaccggagcccgctgaagcggcacgtgtccaggacggtggacttcgtgcacgagaactggaagcggatctggctcgtcgcgctgtggctcgccgtcaacgtcggcctcttcgcctacaagttcgagcagtacgagcggcgcgccgcgttccaggtgatgggccactgcgtgtgcgtggccaagggcgccgccgaggtgctcaagctcaacatggcgctcatcctcctcccctccacggcgctcagccacgtcatccccttcgacgacaacatcaayttccacaaggtgatcgcggcgaccatcgccgccgccaccgccgtccacacgctggcgcacgtcacctgcgacttcccgaggctgatcaactgccccagcgacaagttcatggcgacgctggggccgaacttcgggtacaggcagccgacgtacgccgacctgctggagagcgcccccggcgtcaccggcatcctcatgatcatcatcatgtccttctccttcacgctggccacgcactccttccgccggagcgtcgtcaagctgccgtcgccgctgcaccacctcgccggcttcaacgccttctggtacgcgcaccacctcctggtgctcgcctacgtcctcctcgtcgtgcactcctacttcatattcctcaccagggagtggtacaagaaaacgacatggatgtacctgatagtcccagtgctcttctatgcatgcgagagaacgatcagaaaagttcgagagaacaactaccgcgtgagcatcgtcaaggcagcgatttacccaggaaatgtgctctctcttcacatgaagaagccgccgggtttcaagtacaagagcgggatgtacctgtttgtgaagtgccctgatgtctctcctttcgaatggcatcccttctccatcacttctgcacctggagatgactacctgagtgtgcatatccgtacactaggtgactggacgactgaactcagaaacctgtttgggaaggcttgcgaggcacaggttacttctaagaaggctaccctttcaagacttgaaactacagttgtggcggacgctcagacagaggatactaggtttcctaaggtccttattgatgggccctatggtgcaccggcgcaaaactacaagaagtatgacattcttttgcttattggtcttggaattggtgctactcctttcatcagcattctgaaggatctgttgaacaacattaaatccaacgaagaggtggaaagcatacatggttctgagataggcagcttcaagaacaatgggccaggaagagcttacttctactgggtgaccagagagcaagggtccttcgagtggtttaaaggagtcatgaacgatgtcgctgaaagtgatcacaataatattatagagatgcacaattacctgaccagcgtgtatgaagaaggcgacgcaaggtcagctttgattgccatggttcagtcacttcaacatgccaaaaatggtgtggatatcgtctccggcagcaggattcgcacacattttgcgaggcctaactggagaaaggtgttctctgacttggcgaatgcccacaaaaactcacgcataggtgttttctattgtggatcccctacactcacgaaacaactcaaggatctttcaaaagaattcagcccagacaaccaacaactagattccacttcccacaaggaaaacttttaa

SEQ ID NO: 3529 - DNA, 1425 bp, Oryza sativa
atggaccgcatcgtcggcggcaagttcaagctcggccggaagatcgggtgcggctccttcggggagatctacctcgccacgcacgtggacacctacgagatcgcggcggtgaagattgagagtagcaagacgaagcatccccagctgttttatgaggcgaagctctacaacgctctccaaggaggaagtggcattgcgaatgttaagtggtgtggtgtagatggagaggaaaatgtcctcgtcatcgatttgcttgggccgagcttagaggatctgtttgtctattgcggcaggaaattcactctgaagacagttctaatgttagcagaccagatggaattgagtttatgcattcccaaaggatacttgcacagagatataaagcctgacaactttctgatgggcctcggtcggaaagcaaatcaggtatacataattgattttggacttgcaaaaagataccgggattccactacaaatcgtcatatcccttatagagaaaataagaacctgactggcactgcacgctatgcaagttgcaacactcatcttggggttgaacaaagtcggcgggatgatttagaatctcttggttatgttcttctatattttctccgaggaagcctcccgtggcagggacttaaagctgcaacaaagaagcagaagtatgacaagatatgtgagaagaagatttcaacacctatcgaggtgttatgcaaatcctgtccagtggaatttgcttcttacttccactactgtcattccttgacatttgatcaacgacctgattatgcctttgtgaagcgccttctccgtgacttgtttacgcggcaagtctatgagtttgattatgtcttcgactggactgtgttgagatataaacaaggccaaaaggttcagcatggttccggagcgactattacaagagcaacccctggggaccttgacaaaacagcaggtgtaaatggtgctttccctcataatgaagcccgggagcaaacagggccaagccatctggcagggtcagctgcacaattgcaggtgaaacggtcaactgagagaggtccccaccctaacattcagcatactgagaatattacacaagacatgactgccagaaagcatctcgccgcatctgttttacctggtgccgaatggagaaaagatggggtcatctattatatgaggcagcggggaaatgctcagaagatgctccatctatttcaagtggttcagagtcatgtatctcaaaagtcaattaagcatcaccatgcaacatatatatggtatgggcatattgcaataatgatgatccagacttcttcaggtatgatgctacaaatgctctaccttggcctatcccctgtcaacctcctgaacagccagaaaggaaaaaaggcgttggcaccaggagatgaggaatga

SEQ ID NO: 3530 - DNA, 1059 bp, Oryza sativa
atgatcttcccccctgccttcctggattcctcgagctggaatgataacaacaacaacaaccacaaccagcagcagcagcagcaacatgctcacggccaccaccagcatcatcaggtcgccgccggttgtggaggcggcggcggcggcggcgacggcaatagccatgagcttctgcagcagcagtcaatgattccgggcacgcttgccgatggcggcggcggargcggcgcggtggggccggcgaagccgatgtcgatgtcggaragggcgcggctggcgaggatcccgctgccggagccggggctcaagtgcccgcgctgcgattccaccaacaccaagttctgctacttcaacaactactccctttcccagccccgccacttctgccgcgcctgccgccgctactggacccgcggcggcgcgctccgcaacgtccccgtcggcggcggctaccgccgccacgccaagcgcgccaagcccaagccggcgtccgcggcgggctccgcctcagccgccaccaccaccgccggctcgacgccagcggggtcgacgacgacgacgacgacgtcctccacctgcgccacgcccaacgcgcccgccctcccggcgatgctgggcggcaacctctccatcctgccgccgctgctccgcctcgccgacttcgacgccatgagcctcggctccaccttctctggcatggcggcggccgccggcaagccaccgcccgtcgacgcggccggctgctactccgtcggcgccgccaccggcctcgagcaatggagactacagcagatgcagagcttcccgttcttccacgccatggatcaccaggcggcgatggcggcgccaccgccggcaatggcaatgccggggatgttccagctaggcctagacggcgacggccatggcagcggcggcggcgaagacggtggagagctccaccatgcgatgccatcatcgaagagagaaggctacccaaggggcatgtatggcgatcatcacctcgctggaggatacacctcctactccagtgcaaccacaggtaaccatctcttgtaa

SEQ ID NO: 3531 - DNA, 1740 bp, Oryza sativa
atggaggaagattctggtagatcaatatcaacaactggttttcttagaagaggctctagtgtctccttaaaagatcaaggcaatgaggagaggccaaacaagacaaaactcaacccaatgaatgccaggtgggctgacagtaaggagaagccaagatatttacgtgagccatttcgttcatcaggcactaaggctgcatgtccaagctcttcaaaagctcccgtcagaaaatatttcgaggaaaaacaaggacggacatttttaggagaggcagataatgcagaaagtagtagcagaagaactgaggccaaccgtctgcagtgtagcaagaaagctgttgttgaggaggatgtgcatccatatggtcagcaggatgagccagaagatttgttgtccacatcaactactgaagatcagcctgcagaacttgatcctgaactattagattcttctgtttcttcaggggtgtctgcacatgcaattggttctgtagtcagaaatgctgctttgagatctaaatcacgtcagcagaagggtaaagaagaattgtgtcagattagacctcaaactgcttctgcttttgttaatcggtccactatacctcgaaattctaccaatggtgtgaaatcatcaaatgctgctggccctggggtacagagacgtactctaaaaaaccttggctgcacatcaatatctgatgttttgccttctggctgttcttcagctaattctattcataataagagggctgaggttatgagaaacagggcatttgacggagagagttcttctagaccaaggggcttaaatggacactctagtttaggccattcacctgccatgtattctggtatcactggtcctagagtcagaactgctgaacaatcagcttctcagcaaacacggactagtagcagaagtattcaggagtctgcagattcttcaaggattaggcgaccttctactcagcatgccagagtaagggtgccaaatgaaagggaggatagcgtgtttgctcttcgtgaaactcttgcaagggatcgccaaccagaatgggctcatttctccttgggtgaagctgccccacggagatcgatgaggcctttttctatggaattaccacatgagatatactcatctagtcgtcaaggctcaagtaatcagacagcaaggagcagatcaagttaccgccctgacgaaagccctccacaaatgtttcatggtttgctggtggagagagagaactacaggcgtataaacatggaaggcatcgctgaggtgttgctagcattggacaggattgaacaagatgatgaattgacttatgagcaattgctggtgctagaaactaacttgtttcttagcggccttggcctgcatgaccagcacagagatatgagaatggatattgacaacatgtcttatgaggaactattagcactagaggagcgaatcggttctgtcagcactgccctatctgatgagcagcttgtgaagtgtctcaagcgaaatgtgtataagttaccaaattcagatcttgaagcgaacagagctgtactagatgacgccaagtgcagcatatgtcaggaggaatacattgagggcgaagaagttggtaggatgcagtgtgagcatcaataccatgtgtcctgcattcatgaatggcttagacagaagaactggtgtccaatatgcaaaacttcagcaataccttcagagatggacaaggggggcacatga

SEQ ID NO: 3532 - DNA, 2240 bp, Oryza sativa
atgaagcggctggcgtccatggtgcccgacacgatgaagctgaagcggacgcactycagsgcgcagccggcgctgcgcggcctgcgcttcctcgacaagacgtcggcggggaaggacgggtggaagaacgtcgagaagcggttcgacgagatgagcgccgacggacgcctgccccaggagagcttcgccaaatgcatcggtatggcggattctaaggagtttgcaagcgaggtgtttgtggcattggcgagaaggaggagcatcaaaccagaagatgggataacaaaggaacagctgaaagaattttgggaggagttgactgatcagaactttgattcacgactacgaatattctttgacatgtgtgacaagaatggtgatgggcagcttacagaggacgaggtcaaagaggttattgtgttgagtgccgcagcaaacaaacttgccaagttgaaaagccatgctgcaacctacgcctcactgatcatggaagagctggatcctgatcatcgcggttacattgagatttggcagctggagacgctactccgtggtatggtgacagcccaagggcctccagagaaggtgaagctggcttcagcaagccttgcaaggacaatggtcccttccagtcaccggagtccaatgcagaggcgtttcaacaagactgttgacttcatccatgagaattggaagaggatatgggtgctctccttgtgggcgatcctcaatattgcattattcatgtacaagtttgtgcagtacagtaggcgggatgcatttcaggtgatgggctactgtgtctgcatagcaaagggtgctgccgaaacactcaagctgaacatggccgttatactcctcccggtgtgccgaaacacactaacaaggctccgatcaacagcactcagcaaagtcgtaccatttgatgataacataaacttccacaaggttatcgcactgacgattgcaattggagcggctactcatactcttgctcatgtaacctgcgacttcccaagattggtatcatgtccaagggacaagttcgaggccacactggggccttacttcaactatgttcaaccaacatactcatcgctggttgcaagcactccagggtggactggcatcctcatgatcttgataatgtcattctcgttcacacttgcgacacattcgttcaggaggagcgttgtgaagcttccatcaccactgcaccaccttgctggtttcaatgccttttggtacgcccatcacctactggtgattgcatatatcctcttggtgctgcactcctacttcatatttctcaccaagcagtggtacaatcgaacgacgtggatgttcttggcagttccagtcctcttttactcctgcgagagaactatcagaagagttcgtgagagcagttatggggtgaccgtcatcaaggcagcaatttaccctggaaatgtgctctctattcacatgaataaaccatcaagtttcaagtacaaaagtgggatgtatatgtttgtaaaatgcccagatgtttcgccttttgaatggctatggattaatagattcttcaatgcttccaggcatcccttctccataacttctgcacctggagatgactacttgagtgttcatatccgtacattaggtgactggacaacagaacttagaaacctatttgggaaggcttgtgaggcacaagtaagttccaagaaggctacacttgcacgacttgaaaccactatcatagcagatggtctgaaagaggagacttgctttcccaaagtctttatagatggtcctttcggcgcaccagctcaaaattacaagaaatatgacattcttttgcttatcgggcttggaattggagcaacgcctttcatcagcatactgaaggatctcctgaacaacataaaatccaatggaaatgtaatagagatgcacaattacctgacaagcgtgtatgaagaaggagatgcaagatcagctctgattgccatggtccaatcacttcaacatgccaaaaatggtgtggatatcgtctctggcagcaagatccggacacattttgcaaggccgaactggagaaaggtattctcagatctggccaatgcccaccagaactctcgtataggcgttttctactgtgggtctccaacacttacgaaaatgctgagggatctttcactagaattcagccagacgacaacgactcggttccatttccacaaggagaacttcta

SEQ ID NO: 3533 - DNA, 2283 bp, Oryza sativa
atgctcccgcgctgcctcgtcgccgtcgcggttctcctgctcgtcgcgtcccamgccgcgcggggggaggagcggcggcggctgctgctcgcgaggcaggacgtgctcgcgctccacggcctgcgcgggtcgatcggggtgcgggcggagtactggccggtgaagcgctatccctgcagctggactggcgtcgtgtgccgcgccgggcgcgtcgcggagctccgtctcaccgggctccgccgcacccgcgcgggtgcacggagccaggggttcaccgtcgacccgctgcgggagctcacggcgctcgaggttttcaacgcctcggggttcccgctccctggtcggatcccggcgtggtttggcaccggcctcccggcgtcgctggaagtcttggacctccgctccacctccgtcaatagcacgcttccagccgatcttggcatgtccgggaacctgacgacccttgacctcgccggtaatagcatctccggctcgattccggcgacattgttcctcatcaagggcctcaaatttctcgatctttctgacaacaatctcaccggggagctaccaaacgtgtctatctctgccggtgatggaaccggagttttcaacgcttccgggaattcgttgtacggtgccattggagatgtgcttgggcccctcaggaagagatttcgtcaggttgatttgtcgagaaattacttcactgaggtgattggaactggatttgggaacagctccgatggagcagtggacataaacatgaattgcttgtccggatcaagccagcgaagccagggggattgtgaagcattctacaagaggattggtgtttcattgccagagccaccaaatgcattgccatcaccaagcaagaaaggggtgaagtggaagtatgtacttgccggagtcctggcagccgcagcatttttggtggttcttttccttgtagcattagtgttctgcttgatgaagagtgggggacggcgaccgagaggaagagggttggagcagaatgaggaagggattcgttcggggcgcaggagtagcagcgttaatcctgtgatgctgtcatccatggcagcatcaccggcagcaaatggtgctgtgaaaggtctgcctaccattgtagatgagttcacctatgagcagttgcataatgttactgggggttttggggatgacaatcttgtcaagcatgggcactctggggccatttaccttggtgaactggagagtggcttcaatgttgttgtcaaaaaggttgatctgaagagcagtaataagaacttgggggaattgggcttccttgcaaagaattcccatgggaggattgttccattgctggggcatttggccacagatgaggaggaattgctggtctacaagtacatggcaaagggagacttgacttccgcattgcacaggaagtcagtggatgctgaggaggggctgcgctcgttggattggataacaaggctgaagattgccattggtgttgctgaggcattgtgcttcctgcacgatgagtgtagtccaccattggttcacagagatatccaggcaagcagtgtgcttcttgatgacaaatttgaagtgtgtcttggaagtttgagtgatgtatgcactcaacaaagtgagggaagcaggagtttcttctccaggatgttgagatcatcgaagtctcttgacaagaacgcatcaggtccaccagctagctgctcgtatgatgtatactgctttggaaaggtgctactggagctaatcaccgggaattttggtgtgagcggctcaaatgacactggttcagaggagtggttggcaagaacactggattttattgacgcccatgacaaggagggtctttcaaacattgtagacccttcacttgtagtagatgaagaccacctagaagaggtatgggcagtctccattgttgcgaagacatgcctgaacccaaagccctccaggcgtccactggctcggtacattctgaaagcattggagaacccgcttcggttgttaaggggggatttacagtcgaattcatcactcacgagtacttcatctcgaagctcttggcattttgcttttcatggggactcgcgcaggagctcggagctcaggccaacattggggcagtcagccaggaagcagtcagtgaagtcacaaggaagtgacgaggatgaggacgaggaggaggattcattctccttcaagagggcttcaagggagattctccctgacccggtagagttggaaaaggatgcagttgtgtag

SEQ ID NO: 3534 - DNA, 1530 bp, Oryza sativa
atggagcaagtcgcgtactggttcatctgcgcatgcgccttcttggctctcgtgctcctcgtcaggctgggcgccgcgcgccgcgacgtcgtgcgcctcccgccgggcccgtggcggctgccggtcgtcggcaacctccaccagctgatgctccggggaccgctcgtccaccgcaccatggcggacctagcgcgcggcctcgacgacgcgccgctcatgcgcctccagctcggcggcgtccccgtcgtcgtcgcgtcgtccgcggacgccgcgcgcgaggtgacgcgcacgcacgacctcgacttcgcgtcgcggccgtggccgcccaccgtgcgccggctgcgcccccaccgcgagggcgtggtgttcgccccctacggcgccatgtggcggcagctccgcaaggtgtgcgtcgtggagatgctcagcgcgcggcgcttgcggtcgttccgccgcgtkcscaaggaggaggccgcccgcctcgtcgcgtccatsgcctcgtcgtcgtcctcctcgccgaccggccacgacggcggcgccgcccccgccgtgaacgtcagcgcgccgatcgccgcggccgtggcggacgcgacgatgcgcgccgtgatcggggacaggttcgagaggcgggaggagttcctggagtcgatcacggagcggctcgccgccgccgtcggcggcatgacgcgccgcgcggaggccagcatccggaagggccaccagctaatggacagcgccttccgacagcaccagcagctgagggacgccatggctgcgcagccgcatcttgatgattgcgccatggaggaggacctgttggacacgctcctcaggatccagaaggaagacaacctcgacgtgcctctcaccaccggcaacatcaaagccgttctcctggacatctttggtgcggggagtgacacatcttcacacatggtccagtgggtcttgtcagagctaatgaggaacccagaagcgatgcacaaagcacaaatcgagcttcggagtacccttcaagggaagcagatggtaagtgaagacgacttggcaagcctgacgtacctaaagcttgtcatcaaggagaccctgaggcttcatcccgtggtgccattgcttctcccgagggagtgtcgtcaaacatgcaaggtcatggggtacgatgtgcctcaaggcaccaccgtgttcgttaacgtatgggcgattaacagagaccctaggcactgggatgagcctgaggtgttcaagccggaacggtttcacagtggaaagatcgactttaaaggtgcaaatttcgagtatataccgtttggtgcgggtaggaggatttgccctggcatgacattcggacatgctaccgtggagctcatgcttgcaatgcttctgtaccacttcgactgggagctccctaaaggagttgcaccgaacgaactagacatgacagaggagatgggcatcactgtgggtaggaagaatgctctttatctgcatcctatagtccgtgtgcccttggaacaagctactatgtcgtag

SEQ ID NO: 3535 - DNA, 1095 bp, Oryza sativa
atgccgttgaaaggggtgaagtgcacggtgctagagtcgtcgccggagctcagggcgtcggggttcgccatcgcgacgtggaggaatgcgttgcaagcgcttgacgcccttggggtaggcgacaagatcaggaagtgtcatctgcatcttcaggagttgcatgtcttctcttcgttcaccggagagatggcacatgcaacgtctctcaatgagcaggggaaacgatgcagaggacccaacgaaatgctctgcgtcaggcgggactggctactgcgagcactggaggaagagctaccagaaggcaccatccgctactcctccaagatcgttgaaatcgaagaggacggcgacgccaagatcctacacctagccgacggcgcaattctccgagcaaaggtagtgatcggttgcgacggggtcaattccgtggtggcaaaatggctggggctcgcaaagccgtcctactcggggcgcttggctacgagaggcctcgcgtgttaccctggcggccacggcttcgatcccaagttcaagatgttcttcggccatggctttcgtctcggcgtgatcccctgcaacgatactgatgtctactggttcttcacctggtctccttctgagcacgatgatgatgctctcgccaagaataagaagttcgttctgaccaagctgaatagcgcggagatcccagccgaggtgctcgagatcatcgagaggagcgaaggcgaaggacgtgctcaccgcgccgctgcgtttccggccgccgctctcgctgctgctggcgagcatcagcaaggggaacgtggcggctgcgcggcgctggaggacggcgtcgtgctggcgagatgcctcggcgacgccatcctcggcggcggcggcggcggtgcggagagcgagaggatcgaggcgggtctgcgtgagtacgcgaggatccggcggtggaggagcgccgagctcatcgggacagcctacgcggtcggcttcatgcaggagagcagcaatgcggtcatcagctttctgcgtgacaattggttggccggagcgctggtgagaaagcttctgaaaatggcggactatgactgtggcaagctctaa

SEQ ID NO: 3536 - DNA, 1152 bp, Oryza sativa
atggccggtgacagcggcaacagcgacggcggtagcaaccgggatgaggaggtccagatacagatcgcagaccatattaacttttcagactatcgtgacatcatcgagtggcagagtaggcatgatttccctgagattccaagtaactcgctttcatttgatagtttcaccaatggacaatactattcatccaaagctgcaacttcgtcaactcatgaagtacctatacagaactctcctgtcaagagttggcaatggtggctgatggtgggagttaacatgttcttcctcattgccggtcagaccgcatctacacttcttgggaggttctactacaatcaaggcggcaatagcaagtggatgtccacattcgtccaaactgctggctttccgattttgttcattgccctatttcttttccattcaaagacatcttctacacaaacagtcactagtagtcctgcccctacaatttctatccccaaaattactctgatatatgttgtcctgggcctcatcattgctgcagacgacttgatgtattcctatggcctactatatcttccggtctcaacatattcgctcatctgtgctagtcagcttgccttcaatgctgtcttctcatatttcctcaatgctcaaaaattcacccctctgattttcaattccgtagtcctccttacgttttctgcttcactccttggagttgatgaagattctcagggaactactagtatatcacatgggaagtacattttgggtttcctgttgacactaggggcatcagctacatactcgctcattctctccctgatgcaagtcacatttgagaaggttattaagagggagaccttctcagttgtgttgaacatgcagatatatacagctctcgtggcaacattggcttctcttgttgggttatttgcaagtggtgaatggatgactttacaaggagagatgcatgcattccagtctgggaagctgtcatatgtaatgacactgctgtggacggctatatcttggcagatggatggagtaaagattatagctatgctgatggccatttggggatttatgtcatatggccaccaattatatgttgatggcaagaaaggtagaaagactacagtcagtgtagaggaaacttcctaa

SEQ ID NO: 3537 - DNA, 1728 bp, Oryza sativa
atgtctggcaacgacggagacatgaagatgagggtgatcgtcgtggaaggcgatgagacgagtaacgccccgaaggatgtatgctgcgagtacaccctcgatggctccgtggatatcaagggctcaccggcggtgaagggcaagtccggcggatggctcgccggcggccttattcttcggtatgtggagtacgatatcgccctaccacagtttggctttattgctgctttcatgggggagttaagcggcgcactgtttgcattgaaccagggtctggcaaccctggcgttcttcggggtaaacgtgaacctggtgttgttcctgacgagggtgctgcagcagagcaacggcgacgccgccaacaacgtgagcaaatggaccggcacggtttacatgttctccctcatcggcgccttcctcagcgactcctactggggccgctacaagacctgcgccatattccaggccatctttgtccttggcctcgcgctgctgtccctgtcgtcgcggctgtacctgatcaggccggtcgggtgcggcacggagcacgtgccctgcgagccgcactccggcgcggagctggggatcttctacatcgcgctgtacatgatcgcgttcggcaacggcgggtaccagcccaacttcgacggcgaggacccggccgagtcgcactccaaggtctccttcttcagctacttctacctggcgctcaacctcggctcgctcttctccaacaccttcctcagcttcctcgaggacgagggcaactgggcgctcggcttctgggtctccaccgccgccgcggccaccgcgctgctgctgttcctcggcggcacgctccgctaccggtacatccgccccagcggcaacccggttggcaggatcttccaggtcgcgttcgccgcgtgcaggaactggaaggccggcgagtcgccgggcgccgtgacactctacgagagcgacgagaaggcggattccggtgggaggaagctcctgcacacggaaggtttcaggttcttggaccgtgcggcggtggtgggcgctaacccgaagcttggcacgtgcacccaaccgcgtgacccctggaagctgtgcacggtgacgcaggtggaggaggtgaagagcatcctgcggctcctccccatctggctctgcaccatcctctattcggtcgtgttcacgcagatggcgtcgctgttcgtcgtgcagggcgccgcgatgcgccgcaccacccggttcccgggcttctccgtcccgccctccagcatgtcggccttcgacatcctcaccgtcgccaccaccatcttcctgtaccgccgggccgtctgcccgctcgtgccgcagtacgcgctgatcggcgtgtcggaggtgatgatgtacgtcggccagctcgagttcttcaacggggagatgcccgacgcgctcaagagcttcgggagcgcgctctgcatgatgtccatgtcgctcggcaactacttcagcgacgtcatcgtgagcgcggtgaccaaggccaccgccgtgcgcggccgccccggctggatccccgccgaccttaacgagggccacctcgacaagttcttcttcctgctcgccgtgctggccgtcgcggacttcgccgtgtacctcgtgtgcgcgagccggtacaggagtggcacggtggacgtcgaccggagcgacggggaggaggaggatggcgtggccggcaggcagatggcggcaacggtgtaa

SEQ ID NO: 3538 - DNA, 777 bp, Oryza sativa
atgttggccatattccagaagcaggtggcgcacgcgccggcggagctgaacagcccgcggagcagcgcggcgaagcccaagaaccccgacgagatcctcagggacttccacgccctccaccccatcgaggccttctccacctccttcggcggcggcgccgccttcgcctgcgtcgccggccacgcccgcaatggcctctctggctacgagaggatgttctgtgggctggatgacatctactgcgtgttcatggggaggctggacaacctgagcagcctgatccggcagtacgggctgtgcagccgctccaccaacgaggcgctgctcgtcatcgaggcctaccgcaccctccgcgaccgcggcccctaccccgccgaccaggtcgtcaaggatctctccggctccttcgccttcgtcgtcttcgacaacaagtccggcgccgtcttcgccgccctgagtacggatggggaggtgccgttgtattgggggatcgcggcggatgggtcggtggtgatctgcgacgagagggagatcgtgaagggagggtgcggcaagtcgtacgcgccgttcccggtggggtgcatgttccacagcgagggggggctcaagagcttcgagcacccgatgaaccggctgaaggcgatgccgcgggtggacagcgagggcgtcatgtgcggcgccaccttcaaggtcgacaccttcaccaagatcaactccatgccccgcgtcggcagcgccaccaactgggccgccacctgggacgacgctgccgcctga

SEQ ID NO: 3539 - DNA, 654 bp, Oryza sativa
atggatgtttccatgtatgacgggcggcccctttggatacgggaccctggtggacgtggtgccgatgaaaacgcgggtgggcccggtaagccccgtgctgttcaagggcggcaagggtccggcgcctgctacaaggtgcgttgcctcgacgccagcatytgytcgcgccgcgccgtcacggtcatcgtcaccgacgagtgccccggcggcgtttgcgccttcggccgcacgcacttcgacctcagcggcgccgccttcgccaggctcgccgtcgccggccacggcggccagctgcagaaccgaggcgagatctcggtggtgtaccgcaggacggcgtgcaagtacggggggaagaacattgccttccacgtgaacgagggctcgacgaccttctggctctcgcttctcgtcgaattcgaggatggagacggcgacattggatccatgcagctaaaacaggcaaactcggcacaatggcaggacatgaagcacatctggggggccacctggagcctcaccccgggcccactggtggggcccttctcggtgaggctgacaaccctgaccaccaggcagaccctctcggcccaggatgtcatccccaagaactggacccccaaggccacctacacctctcgcctcaacttcgcctag

SEQ ID NO: 3540 - DNA, 903 bp, Oryza sativa
atggcagcatcgcagaggagcaggagcacggcggcgcagctcgacgtcgacgaccaggcggcggccgatcagctgatgacgatgatgcggcggccagcggcggtactacaggatgaggccgccgccgaggaggaggcctccgcggcggcagcggacctgcagctggagctccggcgagggccgtggaccgtcgacgaggacctcaccctcgtcaactacatcgccgaccacggcgagggacgctggaactccctcgcccgcgccgccgggttgaagaggacggggaagagctgcaggctgcggtggctgaactacctccggcccgacgtgaagcgcggcaacttcaccgccgacgagcagctgctcatcctcgacctccactcccgatggggcaaccggtggtcaaagatagcgcagcatttgccagggaggaccgacaacgagatcaagaactactggaggacccgagtgcaaaagcatgccaagcagctgaactgcgatgccaacagtgctaggttcaaggatgctatgagatatctatggatgcctcgcctcgccgatgcaagccagctcggtgatcaccakgggtataatagtaccactgccatgggcgatgctcatgggatgccagtgatgacatcgtcgtcgtcggactcgttcgcgacatcagagtcatacgatgggggcctttatgcaaatgtgcaggacaatgagatggtgaatggtggggactactggatgcagggagcaaataaagggttttgtagtaattatgagtcagagcaacttcatcctcatgagcatagccagtttcaggatccagatcttgttggttgggttcagggcttttctgagggcatttccgagaatttttggagcttggaggacatttggaagatgtag

SEQ ID NO: 3541 - DNA, 2523 bp, Oryza sativa
atggcgcccaccgccgcggttgccgggggtggcgtggaggcggaggcgctgctggggctgctgcagcgggtgcagtcggaggcgctgcgggcgttcgggccgaacgacttcgaccccaagctctacgtcgacctgccgctcgccgcctactcagcgcggcggccgcgctggcgtcgctgccgcgggcggccccctccaggggcgagatggaggcctacatctcgagtggcttccacagaaaatgatgcaggtcttgacttcatgcttacatttttgctaataccaggtttactggtgagcaaaatgtatgagacggcaaaggatatcgtgcttaatcttgtgtatcttgttgagaaatatggttttgttctgaacggggcaagatcgtactacactaaccgaagccagccaccacttttaagctccatggttttagacatatacatggcaactggtgatatggcttttgtgaggagggtatttccctcactgctgaaagagcatagtttctggatgtcagaggttcacaatgtggcagtaatggacaatcatggacgggatgaggaatttgcttcaaaactttctacggctgctaaagaaaaattctaccaccaagttgcttctacagctgaaacaggatgggattttagctctcgatggatgagggattctactgacatgacaactctgacaacatcttgcataatacctgtggacttgaacacattcatattgaagcttaaaaatgctcagaaatttgacatggtcctcactttgtacacaactcagatggaacaggacatagctttctttgctaaactcattggagagagcacaacatcagaaatattttcagaggcttcaaaagcacgccataatgcaattgattctgttctgtggaacgctgacatggagcaatggcttgactactggcttcctactgatggaaactgccagggagtctaccaatggaaatctatctcacagaaccgcgccatctttgcttctaattttgtacctttgtggttaaatgctcaacattcaggcttggagcaatttgtcgatgaggcaaaatcagtgagagtcatgagaagcctccagaaatcaggattactgcaacctgcaggaatcgcaacttccttatcaaacacagggcaacaatgggattttccaaacggatgggccccgttgcagcatctgatagtcgagggattgttgaggtctggttcaggagaggcaagggaacttgctgaggacattgccacgaggtgggtgagaacaaactatgatgcctataaggctaccggcgcgatgcatgagaagtacgatgtggtgacctgtggaaaatctggaggtgggggtgaatacaaaccccagatgcagaatgtggctaggctaggcagtcgcctctgcctcggcaaaaccatggcccggggagtagggcgctgccggcgaaggtcactaccgcaaacaagtaggccgcagcgcgtcgctttgatggacgccgccgccggtcgcgatccggcggacgcggtagaatctctcagcgagctcgcactcgtgcctcgcaggagcagaggggaggagccagagccggccagcgaggaaggaggcgcatggccctggtcatgggctcatggcggcgcgccggcggcgaggcgggatgtccgagcaaaggggattgttttgcaaagtgccgttgccaattcaccttggatggatcagatccgcctatatttgaatgcaaatgctaacctatgctcatggaaaattaaagggttagagaaaggagggttcctcggcttagagggaggcgggggaggccttgtgggcgctggtgctaggaggacgaagagggtgccagtggagccgcagggatggaggacggtgcggcgagagccaccaaagacggagaaggatgggatgggggtgctcgctgtagctcagcgagaaaccatggtgggtgatggttggtggagggctcattggcagtttcccgacaccgaggttgctgacaccaaagaccatccgcgcggcggccaaagcaagcagtcccaaggcatccagctcgtgcccctctccctccgccacgccatcaagcggtaccttcgagaccaggacaaggcacagatgaacctgaaggtgttgctgctctcggcctccttcgagcgcaccaagggaacctgcaccgagctagccgcgactgccacgggcggcgtgctcatcgatgacctgcgtgcgccctcgggctctgagcagcaagccgcgcggtggaaggtgcggtatgcctatggagatattggccttcagtatcgcgagtatgagacggtcacgtacgttgcctcccggatgctggccatctatgccgcgtgccaccgtgtgctccatgaggttcgtcggaggttatcagatgttgcgcttgccaaagtgttggatttttccactcctctcgagggttttttccacgccttcggactagatgatcttttcccaggtctggacaataggggaaccccgtggtga

SEQ ID NO: 3542 - DNA, 2187 bp, Oryza sativa
atggccagcggcgccgagtcgtgcggcagccgcgggggggagtcgccaccaccgccgcggacgcggggggcgtcggcggggggcaggcggcggaaggcggaagcctaccgcgaggttctccgccggatccgcgggggcggcggcgcgctcgacgacgacgagctctgggcccacttctacagcctccccgccagacatgcttggcttcatgcattgaacaggtatgctttggatgtgaatgtcgagcgggttgatgatgttctactgcacaagaggttgcttgaccaggcccgtgaaccaatgaatgggctggtcttcgatgttcgtcgttcgcaggctgctactctggatggaagcactgaagttgagcaatcaacttcctttaagcatgaagtacaagatcctcagtgctcatcgttcacatcgagagaccaaaggtgtttccatgaaattatatttgcatgtgacgataagcctaagcttcttagccagctaaccgctctacttggggaacttggccttaacatccaagaagcacatgcattttcgacgagtgatggctattctcttgacatctttgttgtcgatggctggagtcatgaggtcgatgttctacgagatgcattaaggagaggagttgaaaagataaagtacaaagcatggccattggttcagtccatgcctactaggacaggtcacgagctaatggaggattctcctccagctgattttgtccagattccagctgatgcaactgatgtttgggaagttgatccaaggcttctaaaatttgaacgaaaattagcatctggatcatttggtgatctataccatgggacatactgtagtcaagatgtagcaatcaaagtactcaagcctgagcgggtcagcgttgatatgctgcgtgagtttgcacaggaagtatatataatgaaaaaggttcgtcacaagaatgttgtgcaatttattggtgcatgcaccagaccacctattttgtgtatagttacagagttcatgcgtggaggaagtattttcgactttctttacaattttagaggaacttttcagctccctgatgtgttaagaattgcctctgatgtatccaaggggatgaactacctgcatcaaattaacattgtccacagggacttaaagactgctaatcttcttatggatgaccaggttgtcaaggttgcagactttggagtagccagagttaaagaccagtcaggagttatgactgcagaaacaggaacctatagatggatggctcctgaggtcatcgagcacttgccctacgatcagagagcagatgttttcagtttcgggatagttatttgggagctgctgactggaaagcttccttatgaagatatgacgcctcttcaagcagccgttgccgttgtccaaaaggatctgagacctatcattcctgctgatactcatcctatgcttgctggtctacttcagaaatgctggcagaaagatccagctctaagaccaactttttcagagattcttgatatactaaattctataaaggagatatctgagcccacatgtcaacatgctgagtcacccatgccgtttcaacgtgctctcgttggctgtttggcaggatgtcctcctacgcctgcagcgcgtccactgacatcgattgatagagacaccgacgctgtgatgatggtgtgcatgaactgcatctccctcagctcatcaaggtcaaatcaaatcattcacgtcgtaacgagcgggctagagccggattgcaccattcacgctgtaacgagagggctagtgctgggccgtcactctacctctagggccatcaccactacgctcaaggccatgccgccacatgcatccaagccgcctaagccggcgtgccattgttgcgccttgagggcaggccactgctacgcgttgggcccgcccagacgcgactgtgcctcaatgctatccgattctacgtgtcggggccaaccaaccgatgcgctgttgctccatctaaaggctgcaccgtggctcgaccatgaggctggggctgcccagccaccactccggcttgagatggcgaacttggcgctagcggtggagtcatcatcaacctctatgcaaacgctgctgccgtcaggagctagcaaacaggcaacgagagagctcactccgttgacacggcattggtga

SEQ ID NO: 3543 - DNA, 3090 bp, Oryza sativa
atgaggcggtcgcaggaggaggacgaggtggaggagcgagtgataagggagtcgtcggaggcggaggagaggaagcgggtcagggagaaggaggacgacgaccttgaggagttccagctgcagcttgtgcttgagatgagcgcgcgggacaatcctgaagagatggagattgaagttgccaagcagatcagcctgggcttctgcccgcctcagagctctactgcagaggccctcgcggcccgatactggaatttcaacgcccttggctatgatgacagaatatcagatgggttttatgatctctatgtgactgggaatggcccggcttcaataaccatgccctctcttaaagatttgcgagcgcagtcactatcacatagggtcaactgggaagctgtattggtacacagaggtgaagatcctgagcttatgaaacttgaccagacggctctaatcatgagccttgaactccgtgaatctaaaccttcagaatttgttggaaatgatttggttcagaaacttgctggcctagtagccagacacatgggtggaactttttttgattctgagggcatgttggtgaaataccagaaaatgatgagatacctgagaaccagtattggaagtgtagttgttcctcttggccaattaaaaattggtctggcacgtcatcgtgcactgctatttaaggttttggccgataacattggtatcccctgtcgactcctgaaaggaaggcagtacactggatcggacgatggggctttgaatattgtgaaatttgatgatggaagggagttcattgttgatcttgtcgcagatcctggtacacttattccttcagatggtgctgttttgtctacagaatttgaagaaagttccttctcaaataatcatcattttaacaaagataatgacatcaggcagttgggatcttcaaatagtttatcgaattctgcatgtagttcttttgagtgtgagttacttgacagaagatctacatggatcaacgttggtccttctgatagtgatggagctacaacgagccagacaagtaaaaacaatcaacaaaatacactatcagattcattcgggattttatctgttagcacattcactagtgaaaataggcctattacaaatgaatcaagaagtacagacgacattgctgccgcaaagaacaaagaaagatcaagtgtaacaattaattcttcgtcaacttcaccttcaccttcttccccagaagtaggcagtactccagctgtccggaggatgaaagtaaaggatatttcggagtacatgattaatgctgccaaagagaatccacaactagctcagaagatccatgagcaccacccgaacttgttttcagaagattccatggaagagccaaaggacctcatcgtgtatgacaccaccctttttcaaagcaaggatgaaatgaaaaagaggatgaatgaacttgggtcgagggaatatgctgatcgtggtcatggtccattattgcctcatcatcctggacatgaactcccatcaaaagttcctcaccgggcacctctagactcacttaagccagttgagggtttgggcattgaccacccccctgacatccaagataacacatcttttatttctcagtatgaaccttctgcacctccccaggaagcttcatcgcagcttacaaagcaattgcctgttacggctgctgctgttgcaactgctgcagtggttgcgtcttcaatggttgttgctgctgctaaatcaaacaatgatgtgaactttgacgtgcctgttgcagctgctgcaacagtcactgcagctgcagttgttgccacaactgctgctgttagcaagcaatatgaacacttggagcctggtaatcagctgcatagtttaccaagtccctccgaagggaatgaatcaatcgagaaaagtgcagatgagttttgggataaacagaattttgaaattgatcatggtcaagataatactttggatcaagaaaaagattcagctgaagttcgccaggatgctgaaagaacctcagataagtcaagcggaacagagagtgcaaaatctgaaatcactctggatgatgttgcggagtttgaaatccaatgggaagaaattactattggggaacgcattggtcttggatcatttggagaagtttatagaggagagtggcatggaacagaagttgctgtaaagaagtttctgcaacaagatatttcaagtgatgctctggaagaatttagaactgaggtgcgaataatcaagaggttgcggcatccgaatgttgttctcttcatgggtgctattactcgtgtacccaatctttctattgtcaccgaatttcttccaagaggtagcttatttcggttaattcatcgtcccaacaaccagttggatgaaagaaagcgcttaagaatggcacttgatgtggcacgtggtatgaattatctacataactgcacaccggtgatagtccatcgagatctgaagtctccaaacctactggttgacaagaattgggttgtgaaggtttgcgactttggtttatctaaaatgaagaacaagaccttcttgtcatcaagatcaacagctggaacagcggagtggatggcacctgaagtacttcgtaatgaaccatcagacgagaaatgcgatgtttttagctatggggtcatactgtgggaactttgtacattactgcaaccttgggaaggcatgaacgccatgcaagtcgtcggagctgttgggtttcagaatcgtcgccttgatattccagataacactgatcccgccattgcagaaataatagcaaaatgctggcagacggacccaaaattgcggccatcatttgcagatatcatggcctcattgaaaccactgctgaaaaacatgaccgctcaagcgccaaggcagagagtacaacaaaccgacgagtwagaaaaaagaggatgttaccagctgcccgaaggcctaagttgttcactatatctcaattatttcccaatgagccatcttgcagaagaaggtcatgccaagaagcctgcaaggttaatgaaggctgctgagggggattga

SEQ ID NO: 3544 - DNA, 2028 bp, Oryza sativa
atgggggaaatagaagatggtattgcttgttggactgaaggtgcagggtgcagacacccaatggaaaatctaggagaaaggtgtgcattccagctcagattacatacattctcttcgccgtacaagagcacaaaatctagcagcagccgaagaggcaacgaccagtccaccacattggaatcgaacactcctagagccactggtctcctcctctccgatttggagtaccaaagcttgtcaaaagaaaggaacaagagcagggaaaaaaagagcatgaaagggacaaagaaaaacaaacaaattaggggccgtagcatatcggcacccagcccaaaaacgcaagaaaaacgtcttggaagtttgtttggctgcatgagtgttcccctgagaaacaatgagagatggcagcaacactaccaagaagagcaaggaggtgatgatgaatggaggggaagcagcttcacccggagggaaccaagcacagtcaagaagagcaaaacagagaggtcgtcgaggaggagccatgagcggtcgaggcgcggcaagatcgacctcgacgccgctgaggccaccgtaacattagactataagatctttgttgccacatggaatgtaggtggccgatcacccccaaacaccatgagcctcgaggactggctccatgctgcacctcctgctgacatctacgtccttgggtttcaagagatcgtcccattgaatgctgggaacgttcttgggacagaggacaatggcccggcaaggaggtgggtgtcactggtcagaagaactctgaacaacttgccgggtactagtggcaatggtagctttcggacgccatctccggcgcctgatcctgtggtggagatggatgatgactttgagggattgtcatcgaggcagaacaatgcgtccttcttccaccgccggtcattccaggccggacttagccggagcttgaggatggagggtgacattcttgcaccccagcctaggctggaacggcggtacagcgtctgcgatcgagctatctatggccgtcggcctagcgactacgaggccacctgccggtggggtggctcatcggacgatgagaacaacactggtgaatcgccaagtacagtttattcaccaatgtcgtatggatacggtaatccgtcatctctggaagaaagccatagaccggctggtcatactagatattgcctagttgcaagcaagcaaatggtaggattgtttctgatgatttgggcccggaaagacataagggatgacattagaaatctgaaggtttcttgtgttgggagaggattgatgggctaccttggaaataagggttcgatttcgattagcatgtcattgcaccaaacaagcttctgcttcgtctgcagccacctgacatcaggacagaaggatggtgatgagatgaggaggaattcagatgtattggaaatccttagaaagaccaggtttccaatggtttatggacagtatgagcgttcaccagaaactatcttagagcatgaacgaatcatctggcttggggacctaaattacagaatcgcgctttcctaccgatcggtgaaggccctcgtggagatgcgcaattggaaagcattgctggagaaagatcagttaaggattgagcaaagaggtgggcgagtattcgttgggtggaacgaggggaaaatatacttcccgccaacatacaaatactcgaataattccgacaagtacgctggggatgacatgaaccagaaggaaaagaagagaacgcctgcatggtgtgatcgtattttatggtatggaaggggccttagtcaactgtcatatgttcgaggtgaatctcgcttttcagatcatagaccggtctacagtgtcttcagtgcagaagtagaatcaatcaatcatagtagaatccagaagatgagttgttcaagttcacaactggacattgaggaattgctgccctactcatatggatatactgatattaatccatatggatacactgacctgaatttctactga

SEQ ID NO: 3545 - DNA, 1269 bp, Oryza sativa
atgggattggggaacgaggcgagctcgtcgtcgtcgcggctgctggatccggcgcctctgctgccgcaccacggtggagatggcgccgggaagctgtcgtcgcagcccaagaccttcgcgaacgtcttcatcgcggtggtcggcgccggcgtgctggggctgccgtacacgttctcgcggaccgggtgggcggcggggtccatcctcctgctctccgtcgcggcgctcaccttctactgcatgatgctgctcgtcgcctgccgccgccgcctcgccgacgagcacccgaagatcgcctcctttggggacttgggggacgccgtgttccgcggtccggggcgcctcgccgtggacaccatgctggtgctcagccaggccagcttctgcgtcgggtacctcatcttcatctcgaacaccatggcgcacctttaccccgtcttcgcgccctcctccaacgcgctcctctccccaaaggcgctcttcatctgggccatgctgccgttccagctcgggctcaactccatcaagacgctgacgctcctcgcgccgctcagcatcttcgccgatgtggttgacctcggcgccatgggcgtcgttctcggggaggacgtgtccgtctggctcgccaaaccaccacccgtcttcgccttcggcggcctgagcgcgatcctgtacggcatcggcgtgtccgtgtacgccttcgagggaatcggcatggtccttccgcttgaggcggaggccgccaacaagaagaagttcgggaccacgctcgggctatccatggggttcatcgccgtcatgtacggcctgttcggcgccatggggtacatcgctttcggcgacgccacgcgcgacatcatcaccaccaacctcgggaccgggtggctctcggccgccgtgcagctcgggctgtgcatcaacctcttcttcaccatgccggtgatgatgcaccccgtgtacgaggtcgccgagcggctgctccacggcaaacgctactgctggtggctgcggtggctgctcgtcctggccgtcggcctctcggccatgtacgtgcccaacttcaccgacttcctggcgctcgtcgggagcagcgtctgcgtcctgctcggcttcgtgctgccggcctcgttccacctcaaggtgttcggcgccgagatgtcctggtccggggtgctcagcgacgtcctgctcgtcctgctcggcctctcgctcgccgtcttcggcacctacacgtccctgctgcagatcttccattcctccagcgcttaa

SEQ ID NO: 3546 - DNA, 3027 bp, Oryza sativa
atggagagcggcggggtcgacggcgagaggcccctgctgcgcgaggcgggggatttgggtggcgaggacggcggcgcargcggagtccccgaggarggggatgcgaagggcgatgtgatggcggcggcggcggcgcaagggggcgatggcgatgagggtgtggaggcggtagatggggacgggagtaacgaggaggaggaggttgtgcagacgcccgatgtgaagcagacgcccggcgccgcggccgcggcggcctggcgggaggcggcgtgggaggaggctgacggcgaggagttcgtggatgtcttggaaggggacgtggatgagaagcgtgaggatggatcggccttggagaatggggaggatttgttggcctcccgttctctcgctgtcgagggtgacgaagaagggtatggttcttgtgctgatattggtatagaagaagacgctgagggtgatgcgagtcgggagcgcttggaggaggaagccatgacggaatcaatcagggagtatgtgacagaagctgttttggctgaccatatccaggagcaaccggacaaatcgaagagtgaatctgaacatgtgaaggttgctcagcacaagtcgcagattgcgaagagcagggaagagggacccaaacaatctggaggcgaaccgtccgttgttgtcgaggaattgaatggatcaagctcgtctgatgatgagagtaaagctacctccgctcctcctgcacgatccattagtggtgctgcaggtcgttctaatggcccctctttgccatctcgtcctgctgggcttggagcatcgacttccttgtcgcagccctcagctcgacctgttcagcagacccgcgctaatggtccagtcgctgtggacagagaaactcggcaggatgttgaatctcctgaggatggagacgaaaatgatgaaatccgtgagaaactccagatgatccgggttaagtttctgcgtcttgctaacaggtttgggcaaacacctaataatatggtggtttctcaggttctttaccgacttgggctggcagaacagcttagaagaaatacaggccagggtgtttttagttttgaccgggcacaagatatggcagaacgtcttgaagctgctggaaacgagccccttgatttttcttgcaccatcttggttcttggtaaaactggggttggcaagagtgctaccatcaattctatttttgatgatgtccggttggaaacaaatgcttttgataccagcactagaaaggttcaagaagtagttggtgcagttgagggaatcaaagtaaaagttatcgatactcctggcctgtcatgctcatcttcagaccagcaccacaaccagaagattctcaattctgtcaagcgacttatcagcagaaaccctcctgatattgttctttattttgatagactggatatgcagaccagggactatggtgatgtgcctcttctgcaaaccattacaagagtctttggagcatcaatctggttcaatgccatagttgtgctaactcatgctgcatctgcaccacctgatggtctgaatggaattcccctgagctatgagatgtttgtaacccaaaggtctcatgtagtccagcaagctataaggcaagccgctggtgatgtccgtcttatgaatccagtgtccctggttgaaaaccactcagcgtgcaggaccaatagggcaggccagagggtgttgccaaatgggcatgtctggaaaccacagttgctattgctttgttttgcctcaaaggttttagcagaggccaacgcgcttctcaagctgcaggacaatcctgctggtaaacctcgtatgaggattcctccacttcctttcctattgtcttcgcttcttcagtctcgagccccactgaagttaccagaggagcagtttggtgatgatgatgatattgaagacgatttggctgatgattcggattcagatgatggttcagactatgatgacttgcctccttttaaacgcctcacaaaagctcagcttgcaaagctaaaccatgctcagaggaaggcatatcttgaggagctggattacagagagaagttattctacaaaaaacagctaaaggaggaaaggatgcgccgtaaaataatgaagaaaatggcagcagaggccagtgcaagaacagatgacttcagtaacagcaatcttgaagatgatggcagtgctccaacaaatgttgcagtgcctatgcccgacatggtattgccctcatcgtttgattctgaccatcctagccatcgctatcgtttcctggacacaccaagtgaatggcttgtcaggccagtgctggagacccagggatgggatcatgatgttggttatgaaggtctaaatgttgaaaggttgtttgctgtgaaaggtaaagttcctttatcagtgtctggtcaactttcaaaagacaagaaggattgctccctccaaatggaggtcgcaagttcacttaagcacggtgaggggaaaaccacttcactggggcttgatttgcagtctgttggcaaggacatggcatacactcttcgtggcgagtcgaggtttaaaaacttcaggcgcaataacacggctgctgggatatccgccacactccttggagattctgtatccgctggtgtgaaggttgaagacaagcttgttgtgaacaagcagctcagggttctggttagtggaggcgctatgagcgggaggggagatgtggcttacggagggcggcttgaagcaacattgaaagacaaagattacccaattggccgcatgctttctaccatagcgctctctgttgttgattggcatggggatcttgctgttggctgcaacatccagtctcagattcctgctggaagagctagcaatttgattggtcatgcgaatctaagcaacaagggaactggtcaagttggcattcgcctcaacagctcggagcatcttgagatcgcccttattgccctcgtgccaatataccaaaacatcaagaagttattgcagagttaa

SEQ ID NO: 3547 - DNA, 1640 bp, Oryza sativa
atggcggcggcggcgtcgtctgttctggcctacctgctcgtcgttgctctccttgccatcgtgcctctcgtctacttcggctgggtggcgcgccggcgcggcgagggcgggcggctgccgccgtcgccgtgggggctgccggtgatcgggcacctgcaccacctggcgggcgcgctcccgcaccacgccatgcgcgacctggcgcggcgccacggcccgctcatgctgctccgcctcggcgagctccccgtcgtggtggcgtcctccgcggaggcggcgcccaaggtgatgaggacgcgcgacatcgagttcgccacgcgacccatgagccggatgacgcggctcgtcttccccgcgggcaccgaggggatcatcttcgcgccctacggcgacgagtggcgggagctccgcaaggtctgcaccgtcgagctgctcagcgcgcgacgcgtccagtccttccgcgccgtccgcgaggaggaggtcggccgcctgctccgcgccgtggcggcgacgtcgtcgtcgccgtcgccggcgcaggccgccgtgaacctgagcgcgctgctgtcggcgtacgccgccgactcggcggtgcacgccatcatcgggagccggttcaaggacagggacaagtacctgatgctcctggagcgagggctcaagctgttcgccaggcacaccttgccggacctctacccgtcgtcgcgcctcgccatgtggctcagccgcatgccgcggcggatgatgcagcaccggcgggaggcgtacgcgttcacggacgccatcatccgggaacaccaagagaaccgagccgccggcgccggcgacggcgacggcgacgacaaggaggacttgctcgacgtgctcctgaggatccagagggaaggtgacctgcagttccctctgtccactgaaagaatcaagacaacggttggaataatccgcgttaacaatatgctcaataatctaagtcaaacgaggcaccctaagaattatgatattactttgtcacatgacatgtttgcgggaggcagcgagactgcggggacggcgttgcaatggatcatggccgagctcataagaaacccaagagtgatgcacaaggtacaagatgaggtacgacaaacacttgccggtcgtgacagagtaactgaagatgcaataagcaacttgaactacatgcaccttgtcatcaaggaggcgttgcggctgcatcctcctgtgcctctactactgccacgggagtgtagaaacacctgccaagtcttaggattcgatgtgcccaaaggagcaatggtgcttgtgaacgcgtgggcgattagcagggaccctcagtattgggatgaacccgaggaatttatccctgagaggtttgaggatagcaacattgatttcaaggggacaaactttgagtacacaccattcggggcaggacgaagaatgtgccctggcatcgcatttggtctggcaaatgtagagcttatgctcgcaagcctcctataccatttcaactggcaattgccagatgggatggatactgcggatctagacatgacggaggagatggtggttagtgcccgacggctccatgaccttttacttgttcctgtggtccatgttccattgccagtagcctcatcata

SEQ ID NO: 3548 - DNA, 894 bp, Oryza sativa
atgggcgtcgccaccaacggctcctcctcctccacctcggagtcggcggagaccgcgcagtcgcaggcgtacaagttcctcatctacggccggaccgggtggatcgggggcctgctcggccagctctgcgccgcgcggggcatccccttcgcctacggcgccgggcgcctcgagaaccgcgcccagctcgagaccgacatcgacgaggtcgcgcccacccacgtgttcaatgccgcgggggtcaccggccgccccaacgtcgactggtgcgagacccaccgcaccgagaccatccgcgccaacgtctgcggcacgcttacgctcgccgacgtctgccgcgcccgcggcctcgtgctcatcaactacgccacgggctgcatcttcgagtacgacgccggccaccagctcggcacagggatcgggttcaaggaggaggacacgcccaacttcgtcggatcattctactccaaaaccaaggccatggttgaggaactgctaaaaaactacgagaatgtatgtacacttcgtgtaaggatgcctatttcatccgatctatccaatcctcgcaacttcatcactaaaatcgcccggtatgataaagtggttgatataccaaattcaatgacaatattggatgagcttcttcctatctcaatcgaaatggcaaagagaaacctcactgggatctggaatttcactaatcctggcgtggtgagccacaatgaaatattggaaatgtatagggattacattgatccgaatttttcttggaagaactttaccctggaggagcaagccaaggtcatagtgcaccgagaagcaataatgagcttgattgtacccaagctgaaggcgaatttccagaacttttgtcaatcaaggattctctggtaa

SEQ ID NO: 3549 - DNA, 1992 bp, Oryza sativa
atggcgaggaggctcgccgccgcgctgtgtctcgcggtggccgcggtgagcgtggccgtggcgacggcgaggttcgtggtggagaagaacagcgtgaaggtgctgtcgccgcggtcgctgcgggggcggcacgaggcggcgatcgccaactacggcgtgccggactacggcggcacgctcaccggcgtggtggtgtacccggcggacgcgaggctggccgacgggtgcaggccgttcggcgaggcggcggcgaaggcgctcaggtcgcggtcgcgccgccccgtcgtgctcctcgtcgaccgcggcggctgctacttcgcgctcaagacgtggcacgcgcagctcgccggcgcggcggccgtgctggtggcggacggcgtcgacgagccgctgctcacgatggacagccccgaggaggagacccccgacatggcgttcctcgccaacatcaccgtcccgtcggcgctcgtcaccaagcagttcggcgacgccctccgcgccgccgcctccgccgccgacgacgaggtggtggtgcggctggactggcgcgagtcgatgccgcaccccgacgagcgcgtcgagtacgagctctggacgaacagcaacgacgagtgcgggccgcggtgcgacgagcaggcggcgttcgtcggcgcgttccgcggccacgcgcagctgctggagaagcgcggctacgcgctgttcacgccgcactacatcacctggttctgccccgacgcgttcctggagacgacgcagtgcaaggcgcagtgcgtcaaccgcggccgctactgcgccccsgaccccgacggcgacctcgccgccggctactccggccgcgacgtcgtgctcgagaacctcaggcagctctgcgtccaccgcgtcgccaamgcgcgcaacgcctcctggctctggtgggactacgtcgccgactaccacctccgctgctccatgaagggcgaccactacacccgccgctgcgccgacgacgtcgccaagtcgctcggtttgccgatggatttgatcgacgagtgcatgggggatcccgacgccgacgtcgagaacgacgtgctcaagacggagcagattgttcaggttggacatggcaccagaggggatgtgacgatcttgccgacgctggtgatcaacaatgtgcagtaccggggcaaattggagagcacttcggttctcaaggcgatttgtgctggattcaaggagtccactgagcctgatgtctgcctgacaccagaaatggagactgacgagtgcctgaacaacaatggcggctgctggcgagacgagaagaccaacatcactgcctgcaaggacactttcaggggaagaatttgccagtgccctgtagttgatggtgttcagtaccaaggagacggctacacccactgcaaagcggtcggaccagggcggtgcgcgatgaacaacggtggctgctggaaggggacgagagacggcaagacgttctctgcttgctcggattcagacttgagtgggtgcaagtgcccacctgggttcaagggcgacgggctccattgcgaagacgtcgacgagtgcagcgagaagctggcgtgctcctgccctcactgctcctgcaagaacacatggggttcgttcgactgcagctgccatggcaacaacctgatgtacatcaaagctgaagatacctgcattgcgaagaacatgtcggcgtttgggtggctggtgacgacgctggtgctgtcctgcctcgccggcgccggcgtcgccggatacgtgttctacaagtacaggctcaggaggtacatggattcagaggtgatggcgatcatgtcgcagtacatgcctctcgagggccagaacggcgagaggctgccgctgagagaggaggcccagttgcagaggttgaacattttggcaatgtccattcgttttgagacgccaagacacatgacagcgacgaatgccgcgatgtacatggcgaagttcagacatcatacttga

SEQ ID NO: 3550 - DNA, 1002 bp, Oryza sativa
atgggcgctgtggctgcggttcgtgccgcggtcctggtcgtggccgtggcccttgccgcggcggcggccggcgcgtcggcgcagctgtgcgacaagtactacgacgggacgtgcccggacgtgcaccggatcgtgcggcgcgtgctgaagagggcgcggcaggacgacccccgcatcttcgccagcctcacccgcctccacttccacgactgcttcgtccagggttgcgacgcgtcgatcctgctggacaacagcacgagcatcgtgtcggagaagttcgcgacgccgaacaacaactcggcgcgggggtacccggtggtggacgacatcaaggcggcacttgaggaggcctgccccggcgtcgtctcctgcgccgacatcctcgccatcgccgccaagatctccgtcgaactgtccggaggcccccggtggcgcgtgcccctcggccggcgcgacggcaccacggccaacctcaccggcgccgacaataacctccccagcccccgcgacaacctcaccacccttcagcagaagttcgccgccgtcggcctcgacgtcaccgacctcgtcgccctctcaggggcgcacacgttcgggagggtgcagtgccagttcgtgacggacaggctgtacaacttcagcgggacggggaagccggacccgacgctggacgccggctaccggcgggcgctggcgaagagctgcccgcggcggggcgggaactcgtcggcgctgaacgacctggacccgaccacgccggacgccttcgacaagaactacttcgccaacatcgaggtgaaccgcggcttcctccagtccgaccaggagctcctgtccacgccgggcgcgcccacggcggcgatcgtcaacagcttcgccatcagccagaaggccttcttcaagagcttcgccaggtccatggtcaacatggggaacatccagccgctgacgggcagccagggggaggtccggaagagctgcagatttgtcaatggaagttaa

SEQ ID NO: 3551 - DNA, 1008 bp, Oryza sativa
atggagtacgctactcgtggagatcgcacggctagctgcctgagtttcctctgcaatatcgtcgttctgctgggcctcgccgccgcggcggcgagcgggcagctgacggacgactactacgactattgctgcccccaggtttaccgcatcgtccggtcccgcgtggccgccgcgatgaaggccgagatgcgcatgggcgcctccctgctcaggcttcacttccacgactgcttcgtcaatggctgtgacgcgtccatcctccttgacggcacaaacagcgagaagttcgcggcgccgaacaacaactcggtgagagggtacgaagtcatcgatgcgataaaggccgacctcgagagcgcctgcccgggagtcgtctcctgcgccgacatagtagcccttgcagctaaatacggagtactacttagtggaggacctgattatgatgtcctcctgggaagaagagatggtctggtggcaaatcagacgggggcgaacagtaacttgcctagccctttcgattcgatcagcgttatcactgcgaggttcaaggatgtcggtctcaacgcaaccgatgttgtggtcttatcaggggcgcacacgatcgggcgatctcgctgcctgctgttcagcaaccggctggcgaacttctcggcgaccaactccgtcgacccgacgctggactcgtcgctggcgtccagcctgcagcaggtgtgccgcggcggcgctgaccagctggcggcgctggacgtcaactccgccgacgcgttcgacaaccactactaccagaacctgctggccaacaagggcctcctcgcctccgaccagggcctcgtctccagctccggcgaccccgccgtcgccgccaccaaggcgctggtgcaggcctacagcgccaacggccagcgcttctcctgcgacttcggcaactccatggtcaagatgggcaacatcagccctctcaccggctctgccggccagattcgcaagaactgcagggccgtcaactga

SEQ ID NO: 3552 - DNA, 1776 bp, Oryza sativa
atggaagaggcagcagaagataggcgattgcaggtgcgagaagagggtggtgatcaagaaccgctccttcttcttcctcaggatgctaatctttacaccggagatggatctgttgatatcaaagggcgccctgcattaaagcatgccactggaaattggcgtgcatgttttttcatcctaggggatgaatgctgtgagagactggcctattatggtattgcaaagaacctagttacttatctgaaaacaaatcttcatcaaggcaaccttgaagctgcaagaaatgttacaacttggcaggggacatgctacctaacacccctcattggtgccctcctagcagattcttactggggaaagtactggactattgctgctttctcagcaatttattttattggtctggttgctttgacgctgtcagcatcagttccagctctgcagccgcctaaatgttcaggatctatttgtccagaagcaagcttactccagtatggtgtatttttctctggcctctatatgatagccctcgggactggaggcatcaaaccttgtgtatcatcctttggagctgatcaatttgatgacagtgatccagcagacagagtaaagaagggctccttcttcaattggttttacttctgtataaatatcggtgcatttgtatcaggcaccgttatagtttggatacaagataactcaggttgggggataggatttgccattcctactatatttatggcattagcgattgcaagtttctttgttgcctcaaatatgtacagatttcagaaacctggtggaagccctcttacaagagtgtgtcaggttgttgttgcagcattccgtaagtggcacactgaagtgccacatgatacatctcttttatatgaggttgatggccagacttcagcgattgagggaagccggaagctggagcacacaagtgaacttgaattctttgacaaggctgccatcatctcatctgatgatgccaagagtgactcctttacaaatccgtggaggctatgcactgtcacccaggtggaagaactgaaaattctaatcagaatgtttcccatttgggccactactattatattcaacgcggtgtatgctcacaactcttctatgttcatagagcagggaatggttcttgacaagcgagttggatctttcattgtccctcctgcatccctctcaacttttgatgtcatcagtgtcatcatctggattccgttttatggccgtgtgcttgtgccaatagctagaaagttcactggaagggagaagggtttctctgagttacagcggattggaatcggattagccctctccatccttgcaatgctatctgcagctcttgttgagttgaggcgtttagggatcgccagatctgaaggtcttattcatgaggatgttgctgttccgatgagcattctttggcaaataccgcagtatttcttggttggcgctgctgaggtctttgctgccataggtcaggttgagttcttctacaatgaagcccctgatgccatgaggagtttgtgtagtgcatttgcgcttgtaacagtctcactggggagctatttaagctcaatcatattaaccttggtgtcatattttacaactcaaggaggggatcctggatggatcccagataacctgaatgaaggccacctagatcggttcttttcattgattgctgggatcaactttgtgaatttactggttttcactggttgtgcaatgagatacagatacaagaaagcatga

SEQ ID NO: 3553 - DNA, 3900 bp, Oryza sativa
atggcctccaccaccgacgccgacgccgctccggtcgcccccgtgctcgaggagaagccccccaccccgccgcctgacggcgacgaggtcccttctgctcctgcggcggcggcggcggcggagcaacccaaggtagtcgaggaggaggaggtgagattggaggggaaaggtggggggttcggtggccaggaggtggaggtggccggagacggggaagatggcggcgaggtggaggtggcggaggctaaggatgagggaggcggcggggagttcgccgggggagatgcgaaagctgcctcctcgttgttggcggcggcggcgraggaggaggaggaggaggaggcgagcaacggcgaattgggtgaggaggatgcttatccggcttcctccgatgccgcggtaggtgaggagaagggcgaattgggcgaggagccggaggagaaggctccggctctggctccggaggcgaatggcgccgccgaatcggatgtggaggagaagccggaggaggataacgagggggaggaggtggctactgggggtggggatgatggtgaattgggaatggagaaagaggttgatgtttctgctggggccgcggaggcgccgcagccggaggataaggtagctcctgaagctgaagctaatggagatttgggcgacaaggcggaggaggaagcgagtgcttcggcggcggtggaggtggtggaggagagcaatgctccagaagaattgttggagaaggctgtggtttcggaggcaaatggcgtggctgccgccgtcgaattggctgtggaggagaagctagaggataacaagggagaggaggaagaaatggaggcgaagcctgagccagttgttgacgacactagctccgagatgattgcgcctgtgagtgccgaaagtgcagttgaagagagtactgagaaggagcaaactgttgacgacactagctccgagatgattgcgcatgtgagtgccgaaagtgcagttgaagagagtactgagaaggagcaaactgttgaaagcgaggccagtgaatctgtggagattgttggtgttgagaagcctactgaggatgagagtaatgttgatggcggtgctagttctgttgtgtctcgagaattggctccagaggaaaccaaggaaaataatgttggtcaggaggatgaaggtgttgctgaggttattgaccgtgaagaagacgctgatgatgatgaagagatagttttagctgcagctgatgatgaagatgatggtactaacgaggctgatgacgatgaagatggagtgagctctgacagggggcctgcacgagttgctattatagagagttcagaagctgcgaagcagatcatgaaggagcttggggaaggttctgctagtgttagtcctgtatctggcttgagcagctcgagagagtacactaatagcatggatgggcagattgtccttgatgattctgaggaggatggggatgatgacgataatgaagatgacgatgagaaggggtttgattctgctgccttggctgccctgctgaaagcagcaactggtgcatctgcagacgggaatgtcacagtttcttcccaagatggctctagaatcttctccatggatcggccagctggcctgggctcatcagccccatctctcaggccaacagtcccacgcccagttgcacggtcaaacctattcagcccctctgagctagcagtgactgctgagcctactgaggagatgacggaggaagagaagaagctgcatgacaaggttgagttgatccgagtaaagtttctgcgccttgtctatagattgggggctactcctgaagaaacagttgcagcacaggtgttgtaccgtctgagccttgctgagggtattcgacacggaaggcagacaaaccgagctttcagccttgacaatgcacggaagaaggccatgctgcttgaagcggagggaaaagaggagttgaacttctcatgcaacatacttgttttggggaagataggggtcggaaaaagtgcaactataaattcaatttttggtgaagagaagtccaaaactgatgctttcagttcagccaccaacagtgtacgggagattgttggtaatgtcgatggtgtccagatacggatcattgatactccaggccttcgacccaatgtgatggaccaaggatccaacagaaaaatcctcgcttctgtcaagaaatataccaagagatgccccccagatattgttctgtatgtggaccgcctggatagtctgagccgtgatctcaatgatttgcctcttctaaagaccattacttctgttctgggctcatctatatggttcaatgccattgttgctctcactcatgctgcttccgcccctcctgaaggtctaaatggtgcccctatgacatatgaggtgctaatggctcagaggtctcacattatccagcaatccatcaggcaagctgcaggagatatgcggttgatgaatccagtagctcttgttgagaaccatccttcttgcaggagaaaccgcgagggtcagaaagtacttccaaatggccagagctggaggcatcagatgctgcttttgtgctactcttcaaagatattgtctgaagcaaactcacttctgaaacttcaggatccaaatcctggaaagctttttgggttccgtttccgctctccgcctctgcccttcctgctctcctccctgttgcagtcaagagctcacccgaagctttcaccagatcagggtggcaatgaaggagattctgacatcgatttggatgattactctgatatagagcaggatgaagatgaagaggaatatgaccagcttcctcccttcaagccattgaccaaatctcagcttgcgaggctgacaaaggagcagaagaatgcttattttgatgagtacgactacagggtcaagcttctccagaagaaacagtggaaggatgagatccgcaggttgaaggagatgaagaagagaggtaaaactgatatggatgcttatgggtatgctaacatcgcaggagaaaatgatctggatcctcctccagagaacgtatcagttcccttacctgatatggtgctgcccccttcatttgactgtgacaatcccacataccggtaccgctttctggagccaacttcgactgttcttgcaaggcctgtgttagatgcacacgggtgggatcatgactgtggttatgacggagtaagtgttgaggagacgcttgctctccttaacaagtttccagctaatatggcggttcaggtcaccaaggacaagaaggaatttagcatccatttggactcttccatctcagcaaagcttggggaggatgcatcgtcgcttgctggttttgatatccagactgttgggcggcagcttgcgtacattctccgtggtgaaaccaagttcaagaatatcaagaagaacaagactactggaggattttcagtgactttcttgggcgacattgtggcgactgggctgaaggttgaggaccagctctctcttgggaagaggttggcactggtggcgagcacaggtgcaatgcgagctcaaggcgacaccgcttatggagctaacttggaggcacgcctgaaagacaaagattatccgattggccagtccctgtcaaccctgggtctttctttgatgaagtggcgccgagaccttgctctcggtgcgaatttgcagtcccagttctcgattggaaggggctcgaagatggtggttcgtcttggattgaataacaaactaagtggccagatcactgtcaggacaagcacctcggagcaggtccagatcgcgctgttgggtcttatcccagttgcagcctccatttacaggagcttcaggcccagcgaaccctccttcgcctattag

SEQ ID NO: 3554 - DNA, 2670 bp, Oryza sativa
atggatatgcctacgccatccaaccgtgctggctgcaatggcaacaccggcggtactatgggcccttcagatgatccttatggtgcagcagccatgaaccttgattgttactcggagatttacagcccttcggtggccgaccaactattctcgctgctaaatgatccagctgcacaccggatgtttgctatgtggccatccatgggatcatcgccgtgtgctgctggtacgagtgaagatatgccgctcgatgcatattctggcctaggggaggcagtggaagaaccttctcaaataatgtcagtgaatccaactgaagcagagaaaacgggcaagagttcaggcgagcttggttcggacgatggtgcccatcaagggagtagcatggttccaagggaatcattgggcagcggtgctcttgcccaagtctggatgcctgttgagcaggagggtcatgttgtgctgagtacatgtgagcaaccttttctactcgaccaggttcttgcagggtatcgagaagtatccaggcactttgtgttttcagcgaaggaggagcctggtctacagccagggcttccagggagggtcttcatctctggggtgccagaatggacctcaagtgtcctctactataataggccagagtatttgaggatggagcatgctctccatcacgagatacgtgggtcacttgcaatgccaatttatgaccccagcaaggattcttgctgtgcagtgtttgagcttgttacaagaaaggagaagcctgatttcagtgcagagatggacaacgcagtgaacttgaaggctacaaaaggttctagcaatcagaagttttatacagagaaccagaaatttgccttcactgagattttagatgttctcagagctatttgccatgcacatatgcttccactggcccttacatgggttcctacatcaaatggtattgatggtggttatgttgttggaaaggatggtgccagtttttcacaatcagggaaaacaataatacgcatccatgaatctgcatgttatgttaacgatggaaagatgcaaggttttcttcaagcatgtgccagacgtcatcttgagaaagggcaaggcattgcaggacgagcactcaaatctaatttgccatttttctcgcctgatataagagagtacagtattgaggattaccctcttgcacaccatgcacgtaagtttagtctgcatgctgctgttgccattcgtctaaggagcacatacactggcaatgatgactacatactagaattctttctcccggtcagctgcaaaggcagtggagaacaacagatgttgctgaataacctctccagtacaatgcaaagaatatgcaaaagtctgcgaacagtttatgaagcagaagttgataatgttaatgctggtactgcagctgtgttcaggaaaaacaatgagagttgcttgccaactggacacacagaaagttcttcacatggtgatcaatcaatcacaggagcttcattcgaggatacatctttagctaacaagccaggagtcatggaacctgagttggctgagcaggtacagcctagttccataggacatgcagagaaaaagcgcagtacagctgagaagaatattagcttggatgttcttcgtaagtacttctctgggagcctaaaggatgctgcaaagagccttggtgtttgtccaacaactttgaaacggatatgccggcatcatggaatttcacgatggccatctcgcaagataaacaaggttaatcgttcattaaagaagattcaaactgtcataaactctgttcatggtgtggacagatccttgcaatatgatcctgctactggatctcttgttccagtagtttctctgccagaaaagttgacattcccttcttgcgatggtttgccaactccatcagtcggaaaaactgtggaagagaattctgacctaaaatctgaagaagggtgttctttgcctgatggatcgcaaagacaaagttgccagttgcagatctctgatgtgaagaaaagtaacgaggatgaatttcacattggcagtggtaacagtgatttttatggtgcaaatgccacagcaaaatctaattctgaggtcacacaaggtccattatgtcccactggtgcttttagtgctttgcatctcaagggaacagattgcaccaatccttctagctctctccgcccaagttccgaaagcaccagaaatcaaatagttggaagaaactcaccatctatacaacaagaagatcttgatatgcttgacaatcatgaagccgaggacaaggaccacatgcacccttctacctctggtatgactgactcttctagcggcagcgcatcaagccaccctaccttcaaacagaacacaagaagtgctcttaaagatgcagccagtcctgcactgacagttaaggcaacctacaacggagacactgtgcggttcaagttcttgccatctatgggttggtatcacctattggaagaaatagcaaagagatttaagctgccaaccggagcataccagctcaagtacaaggacgacgaggatgaatgggtcatcttggcaaacgattcagatctccaggagtgcgtcgatgttctcgactccatagggtcgcgaatcgtgaaactccagtgcttgtga

SEQ ID NO: 3555 - DNA, 1356 bp, Oryza sativa
atggctbttcaagccgggccgccgccgccgccgcccttwaccgcgggccggttccccaccacctcacgtcgtccctgcttcagcgccggccgcatcttccgctgctccctycccgccgcggccgcgcggccccgcaacgccgcgttcctcgcgccgctccggacgtcatccgcagtttgtaccaaagcagtttcaaacagtgatggcacccctggaacaagcagttctccacatgtggtgtgctttggagaattgctcattgacttcgtcccaactgtcaatggtgtatcattagcagaagcgtcagccttcaagaaggctccagggggcgcacctgctaatgttgcagttggaattgctcgtcttggtgggtcatcggctttcattggaaagccccaatttgagttaggaagaaacatagaaaaggtagatgagatgggagggagtgaattcattgtctctgtgattttaattggtttttcagcccagcagtttagcttcaaaatcaagaggcttttttttcactacacgctgttcaatattcaacacatgcaggttggcgatgatgaatttggttacatgctagctgacatactgaaggaaaataatgtaaacaatcaaggattgctatttgatgcgcatgctagaacagctttggcatttgtgacactccgaaatgatggtgaacgtgaatttatgttttatcgcaatccaagtgcagatatgctgcttgaagaaaaggaacttgaccttgatcttatcagaaaggcaaaaatcttccaccatggctcgataagtcttataactgaaccatgtaaaactgcacatattgcagctgccaaagctgctaaagatgctggggtgctaatttcgtatgatccgaatttgaggctcccactgtggtcatcagctgatgatgctagagatggtatactgagcatatgggaaactgctgatgttatcaagattagtgaagaggaggtttcctttttgacgaaaggggaggatccatatgatgattctgtaataaaaaaactcatgcacccaaatctgaaactgcttcttgtcactgaaggtccagaaggttgtagatattattctaaggaatttaatgggagagttggtggacttaaggtgaatgctgttgacaccactggtgctggagatgcctttgttgctggaatactatcccagctatctgttgatttttcactgctgcaggatgaaggccgattgaaagaagctctaaagtttgcaaatgtctgtggggctctcactgtgacagagagaggagccatcccggcattgcccactcgacagcaagtggttgatgccctaacaaaggttgttgcttaa

SEQ ID NO: 3556 - DNA, 1884 bp, Oryza sativa
atggtgccgctgtacgtggcgatgatcctggcgtacgggtcggtgaagtggtggcgcatcttcacgcccgaccagtgctccgggatcaaccgcttcgtggcgctcttcgccgtcccgctcctctccttccacttcatctccaccaacaacccctacaccatgaacctccgcttcatcgccgccgacaccctgcagaagctcatcgtcctcgcgctcctcaccctgtggagccacctctcccgccgcggctccctcgagtggaccatcaccctcttctccctctccacgctgcccaacacgctcgtcatggggatcccgctgctgaaggggatgtacggggagttctccggtagcctcatggtgcagatcgtggtgctccagtgcatcatctggtacacgctgatgctcttcatgttcgagtaccgcggcgccaggatcctcatcaccgagcagttcccggacaccgcgggcgccatcgcgtccatcgtcgtggacgccgacgtcgtgtcgctcgacgggcggagggacatgatcgagacggaggccgaggtgaaggaggacggcaagatacacgtcaccgtgcgccgctccaacgcgtcgcgctccgacgtctactcgcggcgctccatggggttctccagcaccacgccgcggccgagcaacctcaccaacgccgagatctactcgctgcagtcgtcgcgcaacccgacgccgcggggctccagcttcaaccacactgacttctactccatggtcgggcgcagctccaacttcgccgccggggacgcgttcggggtgcgcaccggcgccaagccgcggccgtccaactacgaggaggacgcggcggcgcccaacaaggccggcagcaagtacgggcagtacccggcgcccaacccggccatggcggcgccgcccaagcccaagaaggcggccaacggccaggccaagggcgaggacggcaaagacctccacatgttcgtctggagctccagcgcgtcgcccgtgtccgacgtcttcggcaacggcgccgagtacaacgacgccgccgccgtcaaggaggtccgcatggccgtcgcctcgccgcgcaaagcggacggcgtggagagggacgacttcagcttcgggaacagaggcgtcgccgagagggacgcggaggccggcgacgagaagagcgtggcggcggcggtgtcgggtgagcatggcaagcctggcttgacgccggcgccgacggcgatgccgccgacgagcgtgatgacgcggctcatcctgatcatggtgtggcgcaagctcatccgcaaccccaacacctactccagcctcatcggcctcatctggtcgctcgtctgcttccggtggaacttcgagatgccggcgatcatcctgaaatccatctccatcctctccgacgccggcctcggcatggccatgttcagcctcgggctgttcatggcgctgcagccgcggatcatcgcgtgcgggaacaaggtggcgacgttcgccatggcggtgcggttcctgaccggcccggccgtcatggccgccgcctccatcgccgtcggcctccgcggcacgctcctccacgtcgccatcgtgcaggcagcgttgccmcasggcattgtccccttsgtcttcgccaaggagtacagcgtgcaccccgacattctcagcacggcggtcatctttggcatgctcatcgcgctgcccaatcacgctggtgtactacatcctgctggggctgtgactgtgaacaaccaccaccaagaacagcatgtttttgcagggcagagagttccaaaaattgcaggcatgtgcaaaggctttggagggaggggagggggaggggacagggttcaggtttttagtacagggcctgggggtttatag

SEQ ID NO: 3557 - DNA, 378 bp, Oryza sativa
atggcgggaagaggcagtgccatggcggcggttggtgtgctggtgctcctctgcgtgctcctccacggcgagatggccgagtcggcggtgttcaccgtcggcgaccgcggcgggtkggggatgggggcgggatcgtgggcgaacgggaagcggttcaaggccggcgacgtgctggtgttcaagtacgactcgtcggcgcacaacgtggtggcggtgaacgccgccgggtacaagggctgcaccgccgccccgcgcggcgccaaggtgtacaagtccggcaacgaccgcgtcaccctcgcccgcggcaccaactacttcatctgcaacttccccggccactgccaggccggcatgaagatcgccgtcaccgccgcctag

SEQ ID NO: 3558 - DNA, 1005 bp, Oryza sativa
atggagctgttcgagcgcgcgaggacggtgcggctgcgcggccaccatgacaagtacctgtacgcggaggaggacgagtcgcgcgtctcccaggaccggagcgcctcgtccccgaacgcgcggtggtccgtcragccggtcccccacgcccccggcgtcctccgcctccgcagccactacggccgctacctctccgcctccaacgagccttcctcctcggcgtcaccgggccgcaaggtcctccaggccctcccccaccgcctcgactcctccgtcgagtgggtcccgtccgcgacggcgcccaggcccgcctccgcacccgctacggcaactaccttccgcgccaacggcggcctcccgccgtggcgcaactccgtcacccacgacgtccccaaccgccacgccgggtggatcctctggaccgtcgaggtcgtcgaggtcctcccggaatccctcgtccccgcccccatcgcctccgacgacgaccccgccgcgccgcattacaagacaccttctcgcgggccctctcccgtgccgacgccggcgctggcgcctgcttcgccgccgcggcaccgtccggcgagcccaccttcgtacttagcgcggccaccgccgccgccaccgggctacatcgagccaccacagggatacatcgagccacctccaccggagcccaccctggcgagaattgagtccacagaatccttctcgctgccgctgcacaaggtggatgggcgggcgatccactaccacattggggatgacaacggcgacatcggcgatgatcaggaaggacactcattcacgttcaacgggactagcctggaggagcttttggagaggttgcaggaggagacggggctcaacgacgtgattatctgctctcgtagcccgatcaatgggaagctcatgcccctccgcttgcagctgccgcccaacaacgccgccatgcatatcgtgctcgtgcgtgagtcatcaaaaggagatctcattcttgtagagtga

SEQ ID NO: 3559 - DNA, 1050 bp, Oryza sativa
atgtacgcgggcaacccgacctccaagtacaagggcgcgctcgccatgggcatccccggcgagctcgccggcctccacgccgcgtggtcccgctacggcaggctgccgtggaaggacctcttcgcgccggcgatcaagctggcgcgcgacggcttcacggtggtgccgtacctcgagatcgcgctcaagaagacggagcgcgacgtgctcgcggacccgggcctccgcgccgtgctggcgccggaggggaggatcctcgccgccggcgargtgtgccgcaacccggcgctcgccgacacgctcgaggcacatcgccagcggcggcgtcgaggcgttctacggcggcgccgtcggcgagagattttgaacatcttgagcggatacaaatcactcgagttcttgaaaggatttcttggcttgcaccggttcatcgaggcgttcaagcacatgctggccatccggatggatctcggcgaccctgactacgtcaacatcaccggcaacgtctcggagatgctctcgccggcgttcgccgacaaactccggcagaggatcgtcgacaacaccacgttccctcccagctactacttcccaaaatggagccagctggatgaccacgggacgagccacctgtgcgtcgtcgacggcgaccggaacgcggtggcgatgacgaccacggagaaccacctcttcggggcgcacctgctgtcgccgtcgacgggcatcgtggacggacagctcgccggcgtcgtcggcggcagcggcgggccgttcatcatagcgacggtggtccagctggtgccaaatgaggtggtgtacgagaacgtgacggtggtcgacggcgaggtgttcgagctcagcggcgaggcgagggagttcctgcggcggaggggccaccggctgacgagcacggactccggcgccgtctgccagttcatcgtgcaggacttgctgacgccggtcgccgccgccggcgacgagaatgtcttccacgggatgctcaccgccgtcagcgacccgaggaaagacgggagacctgccgggatgtga

SEQ ID NO: 3560 - DNA, 1014 bp, Oryza sativa
atggatgctgtgttggttaccgccgccatcttcgggttgctgctctgcggctgctcggtttcaggagtggaaggtatcggtgtgaactatggcatgatcggcaacaacctcccgtcgccggacaaggtcatcgccctgtacagagccagcaacatcaccgacatccgcctcttccacccggacaccaccgtgctcgccgcgctccgcggctcgggcctcggcgtcgtgctcggcacgctcaacgaggacctggcacgcctcgccaccgacgcctcgttcgcggcgtcgtgggtccagtcgtacgtgcagcccttcgccggcgccgtccgcttccgctacatcaacgccggcaacgaggtcatccctggggacgaggcggcgagcgtcctcccggccatgaggaacctccagtcggcgctgcgcgccgcggggctcggcgtgccggtcacgacggtcgtcgcgacgtcggtgctgggctcctcgtacccgccgtcgcagggcgcgttctccgaggccgcgctgccgacggtggcgccgatcgtctccttcctggcgtcaagcgggacgcccctgctggtgaacgtgtacccgtacttcgcctactycgccgacccgtcgtcggtgcggctcgactacgcgctgctgtcgccgtcgacgtcggcggccgtgacggacggcggtgtcacgtacaccaacatgttcgacgccatcctggacgcggtgtacgcggcgctggagaaggcgggcgggcagggcctggaggtggtggtgtcggagaccgggtggccgtcgggcggcggcggggccggcgccagcgtggagaacgcggcggcgtacagcaacaacctggtgcgccacgtcgggcgcggcacgccgcggcggcccgggaaggccgtggagacgtacatcttcgccatgttcaacgagaaccagaagcccgagggcgtggagcagaacttcggcctgttccacccggacatgagcgcggtctaccacgtcgacttctcggcgtga

SEQ ID NO: 3561 - DNA, 1566 bp, Oryza sativa
atggcggcgaggccatgccaggcggcggcgagacctgggacggcgtctacgcgcattcgagaggctagccgagctaccacgcgagccaaggaggtgcgagggcgagctgtggcgaacggcggcgggcatggcgcggcgtgcgacaaggggaagtggttcggtggggagctcaccaacgagataaacggcgttggcggcgcggatggagtcgcggcgaggtggacgcgacggcggggcggcgcggcaccgagggtgcacggccggggaagaagggagggagaggtggcaatgggcagcctggagctcctcgtcacgcgtccacgcacgcactggctcctccggtgctcggtggcggacggcgagggcgagagcggggcgagcaacaacaatggcgcggcggtgatggaagtgaaacgagagaaggattcgatgggaggggctcgggtttttatagcgaaggcgagatcaggtcatcgatcgatgggcagcagctccggctccgaccggctacgcgacctccaggccttcgacgacacaaaggccggcgtgaagggcctcgtcgatgccggcgtcacaaccatccccgccatcttccaccaccacccgctgctactggacgatgcggaggaggatgcggatgttatcccggtgatcgatctgcaggcggacgttgaccgaggccatctggttggtcaggtgagggcggccgcccagtgtgtggggttcttccaggtggtgaaccacggcatccccggcgagctcctggaggagatgctggcggcggtgcggcggttcaacgagcagccggcggagggcaagaaagcctggtacagcagggacagcgggcggagggtgaagttcaactccaatttcgacctgttccagtcgccggccgccaactggcgtgacacgctgttgctggagctgacgccacggccggggccggcagcggaggagatcccaccggcgtgcaggggcgtggtgggggagtacgtggaggcggtgcagaggctgggcggggcgctgttggagctgctgtcggaggcgctggggctcccgccggagtacctcggcggcctcggtggggggctggctaccatggcagcgcactactacccgccatgcccggagccgcacctgacgctgggcaccacacgccactccgaccccagcttcctgacagtgctgctgcaggagagcaagggcctgcaggtgctcatgaggcagcgccagcggtgggtggacgtccctccggtggccggcgctctggtggtcaacatcggcgacctcctccagctagtgtccaacgacctcttccgaagcgtggagcaccgggtgttggcaaccaccgccgccgcggagcctcgcctctccgtcgcctgcttcttccgtcccgactacgcctgcaccagggtgtacgcccccgtcaccaccacgccgccgccaccgctctacaggagcaccaccatgccggagttcctctcgcattacagagccaaaggcctcgacggccgatccgcgctccaccacttcaggatccctcctccttcatctccaccacattaa

SEQ ID NO: 3562 - DNA, 1730 bp, Oryza sativa
atgaagtacagcaaggaagcaaagcccgagagggcggcgggagggcggtcgagagccgtgccggtggcgctcctgttggtcgtgctctgcgccttctccttctacctcggcgggatctacagcaccggccgcagcttgctcgatgtcaatggcatcgtcgtcaagggggcctcttcttcctcctctgcctctgccgttgccattcaaaaggacaccaacaccaaagccgtcgtcgtcttcccagagtgccccgccgactaccaggactacactccctgcaccgatcccaagcgttggcgcaagtatggcaactaccggctgagcttcatggagcgtcactgcccaccggcggtggagcgcaaggagtgcctggtgccgccgccgcaggggtacaaggcgcccatccggtggcccaagagcaaggaccagtgctggtacaggaacgtcccctacgactggatcaacagccagaagtccaaccagcactggctccgcaaggaaggcgacaagttcatcttccccggcggcggcaccatgttccccaacggcgtcggagcctacgcagacctcatggcggagctcatcccgggcatgacggacggcacggtgcgcacggcgctggacacgggatgcggcgtagccagctggggaggcgacctgctggggcgcgggcggggcatcctgacgctgtcgctggcgcccagggacaaccacgaggcgcaggtgcagttcgcgctggagcggggcatcccggccatcctggggatcatctccacgcagcgcctgcccttcccgtccgcggcattcgacatggcgcactgctccaggtgcctcatcccgtggacagagttcggcggcctctacctgctggaraaggccgacctcgaccgcctcaagaagacgctcgcctccatgtgcttcaagccctacagcwagaagggggacatsgccgtgtggcagaagtccaccgaccctgcctgctacgacaagctcacgccggtctcctcscckcccaagtgcgacgacagcgtcgacccggacgccgcctggtacgtgcccatgcgctcctgcctcacctcgccttcttccacttcctcgcgctacaagaagctggcgctcgacgccacccccaagtggccgcagcgcctggccgtcgccccagagcgcatcgccaccgtccccgggagcagtgccgccgccttcaagcacgacgatggcaagtggaagctccggaccaagcactacaaggctctgctcccggcgctggggagcgacaagatcaggaacgtgatggacatgaacaccgtctacggaggcttcgccgccagcctcatcaaggaccccgtctgggtcatgaacgtcgtctcctcctacggacccaactccctcggcgtcgtcttcgacagaggcctcatcggcaccaaccacgactggtgtgaggcattctctacataccccaggacgtacgatctattgcatcttgatggcttgtttactgcagagtctcataggtgcgagatgaagtttgtacttcttgagatggaccgtatccttcgtcccactggttatgccataatccgcgagaacgcctactttctggattctgtagccatcattgtcaaaggaatgagatggaactgtgacaagcatgataccgaatacaaggcagacaaggagaaggtcctcatctgccagaaaaagctttggtcaggaaagaacacccagcattg

SEQ ID NO: 3563 - DNA, 1218 bp, Oryza sativa
atggcggcccagsgamtcgccgccctycaaggccgccgcgccgtcggccttctcctccacctcctccgcctcgcatggccgccccgcggcgcgatccagcaccaccgctctcctcccggtggccctcccgcgcgcctccgccaccctccgcgccgcaccttctcggctcctcccccaggaggcgaaggcggcggggagcggcaggtcggtgatgtgcatggcgtcggcgtcggcgtcggcggcgtcggcggcggtggcgtcgggcgcggcggagctgaaggccgctcgcgaggacatcagggagctcctcaagacgacgcactgccaccccatcctgcagcttttcccagtgagactatcaagtatcatgttcgtcttggatggcatgattccggtacgtatgacaagaatattaaagagtggccacaacgaggtggagctaatggaagcttgagatttgatgttgagttaaaacatggagccaatgctggtaacattaccttttcacgatttcgtttccttgttgcttggctggtaaatgctctaaagcttgtccaacctatcaaggacaaatacccaaatatctcatatgcggatttattccagctggcaagtgctacagcaattgaggaagctggtggtccaaagattccaatgacatatggacggattgatgtcacaggtcctgagcagtgtccacctgaggggaagcttcccgatgctggcccaagtgcacctgcggatcacttgaggaaggtattttacaggatgggtcttgatgacaaggagattgttgtgctgtctggagcacatacacttggaaggtccagacctgaacggagtggctgggggaaaccagaaacgaaatatactaagaatggccctggtgcacctggtgggcaatcgtggacagctgaatggcttaagtttgataacagttatttcaaggagataaaagagaaaagagatcaggatctcctggtcttgcctacagatgctgcattatttgaggacccaacattcaaggtctatgcagaaaaatacgcagaggaccaagaagcattctttaaagactatgccggagctcatgctaaactgagcaatctgggtgcaaaattcaatcctcctgagctgtaccagccagatgctcccccgaccacgggggcagcagatctgcagactgcagcacacacaccacaggggccagggcacgagtaa

SEQ ID NO: 3564 - DNA, 1539 bp, Oryza sativa
atggagaacgccggcgccggcgatggcgcgcccaagcactacccgggcaagatgaccgtcttcgtcttcatcgcctgcctcgtcgcctcctccggcggcctcatcttcggctacgacatcggcatctccggtggcgtgacgtcgatggacccgttcctgtcgcggttcttcccgtcggtgtacgccaaggagaaggaggtggtggacacgaaccagtactgcaagttcgacagcgagccgctcacgctcttcacctcgtcgctctacctcgccgcgctcatcgcttccctcttcgcctccgtcatcacccgcaagttaggccgcaagatgaccatgctcggcggcggcttcatcttcctcatcggcgccgtcctcaacggagccgccgtcaacgtcgccatgctcatcattggccgcatcttgctcggcatcggcgtcggcttcagcatccaggctgtgccgctgtacctgtcggagatggcgccggcgaagatgaggggcatgctgaacatcatcttccagctcatgatcaccgtcggcatcctcttcgccaacctcatcaactacttcaccgacaagatcgccggcggctggggatggcgcgtcagcctcggcctcgccgccgtcccggccgtcatcatgaccgtcggctccatcctcctccccgacacccccaactcgctcctgtcccgcggcaaggagaacgaggcacgcaccatgctccgccgcatccgtggcaccgaggacatcggcccggagtacgacgacctcgtcgccgccagcgaggccaccaaggccatcgagaacccgtggcgcacgctcctcgagcgccggtacaggccgcagctggtgatgtcggtgctgatcccgacgctgcagcagctcaccggcatcaacgtcgtcatgttctacgcgcccgtgctgttcaagaccatcggattcggcggcacggcctcgctcatgtccgccgtcatcaccggcctcgtcaacatgttcgccaccttcgtctccatcgccaccgtcgaccgattcggccgccgcgtgctcttcatccagggcggcatccaaatgatcatagcgcagtttattcttgggacactgatcgccgtcaagttcgggacggcgggcgtggcgaacatctcgcagggttacgccatcgtggtggtgctgttcatctgcctgttcgtgtcggcgttcgcgtggtcgtgggggcccctggggtggctggttcccagcgagatcttcccgctggagatcaggtcggcggcgcagagcgtggtggtggtgttcaacatggcgttcaccttcttcatcgcgcagatcttcctgatgatgctgtgccgcctcaagttcgggctcttcttcttcttcggcgccatggagctgatcatgacggggttcgtcttggtcttcctgccggagaccaaggggatccccatcgaggagatggacaggatctggggggagcactggtactggagccgcttcgtcggcgccggccgcaaccgggtcatgcagatggcctccaccaacgtgtga

SEQ ID NO: 3565 - DNA, 3132 bp, Oryza sativa
atggccaaggaggccgtcgaggactggcgacgaaagcagcaggacattgaagtgaatagcaggaaggtcgaggtttatgatggcacccaatcatttcatcagacagaatggaagaagcttcaagttggtgatatagtgaaagtgaagaaagatgagttcttccctgctgaccttgttttgctttcttcgagctatgaggatggaatatgttatgttgagacaatgaatcttgatggagagacaaacttgaagcgaaaacaatcattggacgtgactgcgggcttgaatgaggatcattctttccacaccttcaaggctttcattcaatgtgaggatccaaatgagaaattatattcctttttagggacattgcactataatgggcaacaatatcctctatccccacaacagatcctgttaagggattcaaagcttcggaacacaaatcaaatttatggcattgtaattttcacggggcatgacacaaaggtaatgcagaatgcaatggaaccaccatcaaagaggagttctgttgaacgaagaatggataagatcatttatcttctttttgtaattctctttgctattgcatcgtttgggtcggttatgtttggtatcagaacgagggctgaattaagtgcagggaactatgcctggtacctaaggccagataactcaactatgtactttgatccaaacagagcaacattagcagctatttgccattttctgacaagtctcatgctgtatgtgtgcttggtgcccatttccttgtatatatcgatagagatcgttaaagtcttacagagcacattcataaatcaagaccagaacatgtattgcgaagagtctgataaaccagcaagggctcgcacatcaaatttgaatgaggaacttggtcaagtgcacaccatactctctgacaaaacaggaaccttaacatgtaattcgatggagttcctgaaatgttccattgctggtgttgcttatggaaataggcctatagaagtgcagatgccttatggaggaatagaggaagaatgtgttgatattgggcagaagggtgctgttaaatctgtaagaccggtaaagggattcaactttactgatgaccgcttgatgaatggacagtggagcaaagagtgccatcaagatgttatagaaatgtttttccgtgtgttagctgtctgtcatactgcaattcctgttgcagatagaacttctggtgggatgtcttatgaggcggaatcacctgatgaaggagctcttgttgcagctgcaagggaacttggttttgaattttatcataggtcacagacaagcatatcagtgcatgaatatgatcctgtcttcggtagaaaggtggatagaacctataagctactgaacaccctagagtttagcagtgcccgcaagcgtatgtctgtcattgtgagtacagaagagggtcggctatttctgttctgtaaaggggcagacagtgttattcttgagaggctctctaaggataatagcaaagcttgtctgacaaatacaaagtgccacatcgacgagtattctgaggcaggtttgcggactctggcacttgcatatcgtgaacttactgaggacgagtatgttgcgtggaatatggagtactcagctgcaaagaattctgtacataatgatcatgatgtagctgttgagaaggcatcagaaaatatcgagaaagatttggttcttttaggtgctactgctgtggaggacagattgcaaaagggggtcccagagtgtattcacaaactagctcaagctggaattaagatctggattctcacaggtgacaaattggagacagctgtcaacatagggttagtaccatatgttgcttacgttcctgacaattatgcttgcaaccttttgaggaaagggatggaggaagtttatataactctggataacccaggcacgaatgttcctgaggaacacaatggagaaagcagtggaatggctccatacgaacaaattggtagaaagttagaagatgctcgaaggcaaattttgcagaaaggaacttcagccccatttgcccttataattgatggcaatgctctaacacatgctctcatgggtggtcttaaaaccgcatttctggatctagcagttgattgtgcgtctgttttatgctgtcgcatatccccgaaacagaaagcgctgattaccagactggttaaaaataggataaggaaaaccacactagcaattggcgatggagcaaatgatgtcggtatgctacaagaggctgacattggggttggaataagtggtgctgaaggaatgcaggctgtgatggcaagtgactttgcaatagctcaatttcgttttttagaacggttactccttgtacatggtcattggtgttatcgccgaattgcagcgatgatatgctactttttcttcaagaatatcacatttggctttacacttttctggtttgaggctcatgctatgttctcagcccaacctggttacaacgattggttcatatctttctacaatgttgcctttacatctctcccggtcattgctctaggtgtctttgataaagatgtctcttcccgtgtttgcctcgaggtcccttcattacatcaagatggcgtgaataatttattcttcagctggtctcgtatactcagttggatgctgaacggagtttgctgttcaataataatatactttggagccctccatgctgtcctcattcaagctgtccgacaggatggccacgttgctggatttgacatccttggagtgactatgtatacttgcgtagtttggactgtcaactgccaactagcactctacatcagctacttcacctggatacagcatttcgtcatctggggcagcatactgatttggtacacttttctggtcatctacggctcgtttcctccaacaatatcaaccagcgcatatcatgttttctgggaagcttgcgcttctagccctttatactggttatccactctagtcattgttgtgacagccttgatcccatacttcctctacaaaatcacacagtcgctgttttgcccacagcattgtgatcaagttcagagacctaattcaaaagaattggtggctcaataa

SEQ ID NO: 3566 - DNA, 897 bp, Oryza sativa
atggagttcgaagaccgctgccacaaggtccaggagcccaaattcgactgcctgctgtttgacctcgatgacactctgtacccactgagctcggggatcgcgtcccatgtcaagaagaacattggagattacatggttgagaagctgggtattgaggagagcaagattgagaaccttggcaatctgctgtacaagaactacggcacgacgatggccggactcagggcaataggctacagcttcgattacgatgagtaccacagttttgtccatggaagactgccctacgagaacatcaagccggaccctgtcctgaagcacattctcaagaacctgcgcatccgcaaactcgtgagttcctccagaccagaatcgaaaccaatctcacatgtctcatatattcaccaacggcgacaaggaccacgccgtgagagccctcaagaggctgggctggaggactgcttcgaggggatcatctgcttcgagaccctcaacccgccgtgcccgtcgccgccgtgcgacggggaggccagcatcttcgacatcgccggacacttctccatgcccggcgccgccgccgacgagcttcccaggacacccgtcctctgcaagcccaacgtcgacgccatggaggaggccctcaggatcgccaacgtgaaccctcacaaggcgattttcttcgacgacagcgtgaggaacatccaggcggggaagaggatcgggctccacacggtgctggtgggcacgccgcagcgggtgaagggcgcggaccacgcgctggagagcatccacaacatcagggaggcgctgccggagctgtgggaggaggccgagaaggcggaggacgtgctcatctactccgaccgcgtcgccatcgagacatcggtgaccgcgtag

SEQ ID NO: 3567 - DNA, 597 bp, Oryza sativa
atggccgccgccgggcgcggccccgccagctgccgccgcccgccatggccgccgccgccggccaccggatgggaatgttctctcatttgcattgctgagatcatcaaccacgtgtcatggttgattgttgaggagatgggcatcgtcgacgttgtctccgagttctgctccgtgccgaggactcgccgacacctcaagaagaggaaacaattccagacagtggagatgaaggtgcggatagactgcgaaggctgtgaaaggaagatcaagaaggcccttgaggacatgaaagctcggttggaggtgacggcgaagcagaacaaggtgacggtgacggggtacgtggacgccgggaaggtgatgcggcgcgtggcgtacaagaccgggaagcgggtggagccatggccatacgtgccgtacgacacggtggcgcacccctacgcaccgggcgcctacgacaagaaggcccccgcggggtacgtgcgcaacgtggtgtccgacccctccgccgcaccgctcgcccgcgcctcctccaccgaggtccgctacaccgctgccttcagcgacgagaaccccaacgcctgctccgtcatgtag

SEQ ID NO: 3568 - DNA, 2406 bp, Oryza sativa
atggctcccccttcccccgccgcagggctcctccacaggtacgcgcgcgcgcgacccgccccgcgcggggatccgctctacgacgagctgtggcacgcctgcgcggggccgctcgtcaccgtgccgcgggtgggcgacctcgtcttctacttcccgcaggggcacatcgagcaggtggaggcgtccatgaaccaggttgccgacagccagatgcgcctctacgatctgccctccaagctgctttgccgtgtcctcaacgtcgagctcaaggcggagcaagacaccgacgaggtctacgcgcaggtcatgctcatgccggagcccgagcaaaatgagatggcggtggagaagacgactcctacgtccggccctgtgcaggcaaggccgccggtgaggtccttctgcaagacgctcaccgcgtctgacaccagcacgcacggcggcttctctgtactccgccgccacgctgatgagtgcctccctcccctggatatgacccagtcgccacccacacaggagctcgtggccaaggatctgcacagcatggactggcgcttccgtcacatctttcgcgggcaaccgaggaggcatctccttcagagtggttggagtgtgtttgtcagttccaaaaggcttgttgctggggatgctttcattttcctcagaggagagaatggtgaactccgtgttggtgttagacgagctatgaggcagctgtccaatgtgccttcttcagtcatatctagccaaagcatgcacctgggagtccttgctactgcatggcatgctatcaacacgaagagtatgttcaccgtctactacaaacctaggacgagcccttcagagttcattataccatatgatcagtatatggagtccgtcaaaaacaattactctgttgggatgaggttcaggatgaggtttgaaggagaagaggcaccagagcagaggtttactggtactataattggcagtgagaatctcgacccagtgtggcctgaatcaagttggagatccctgaaggtgcggtgggatgaaccatcaactattccgcggccagatagagtctctccttggaaaatagagcctgcttcatcacctcctgttaacccccttcctctttctagggttaaaagacctaggccaaatgctcctccagcatctcctgaatctcctattcttacgaaagaagctgctactaaggttgacactgatctgctcaagcacaacgaagtcaaaacagtacggtcttgcaagttgggaaggcgtgaaactgactttaaggatgtccgttctggctctcaatcttttggtgattccccaggcttctttatgcagaattttgatgaggctcctaaccgtcttacttctttcaagaaccagtttcaggatcaaggttctgctcggcacttctctgacccatactactatgtatctccacagccttccctaactgttgaatcaagcacacagatgcacacagacagtaaggagttacatttctggaatggccagagtactgtgtatggtaattcgagagaccgaccacagaatttcagattcgaacagaactcatcaagttggttaaatcagtcatttgcccgacctgaacagccaagagtgattagaccgcatgcatcaatagctccagttgagttggaaaaaacagaaggcagtgggtttaagatttttgggtttaaagttgatacaaccaatgctcctaacaatcacttgagctccccgatggctgcaacacatgagcctatgcttcaaactccatcatcattgaatcagttgcaacctgtacaaactgattgcattcctgaggtatcagtaagcacagctggaacggcgactgagaatgagaaaagcggtcagcaagctcaacagagttcaaaagatgttcaaagcaagactcaggttgcttcgacgaggagttgtacaaagcacatgaagttttttcttctcgtagttgacatgctgaagttctcgttttgtaaatttcttgcaaaatctcagttttatcccctttgtggtatggtccataagcaaggcgttgcacttggcagatctgtggatctttcaaagttcagtaactatgatgaactcaaagctgagctagacaagatgtttgaattcgatggtgaattggtgtcttcaaacaaaaactggcaaattgtttatactgataatgagggtgatatgatgcttgttggagacgacccatgggaagaattctgcagcattgtgcggaagatttatatttacaccaaggaggaggtccagaagatgaattcgaaatcaaatgccccaaggaaagatgactcttcagaaaatgagaaaggttcagtgaagcgagatgatacaagagatggagggagtactccagaaagctgcctctactag

SEQ ID NO: 3569 - DNA, 828 bp, Oryza sativa
atgggttcgactcgcctcctcgtactgctcgccgccgcttccctcctcctcgccaccgccgtcccggcagccagagcacaggaagaaactgatcacgaggaggagttcacgtacatcagcggggacgagaaggggccggagcactggggcaagctgaagccggagtgggcgcagtgcggcgccggcgagatgcagtcgccgatcgacctctcccacgagcgggtcaagctggtgcgcgacctcggctacctcgacgactcctaccgcgccgccgaggcctccatcgtcaaccgcggccacgacatcatggtcaggttcgacggcgacgccggcagcgtcgtcatcaacggcaccgcctactacctccgccagctccactggcactcccccaccgagcacagcgtcgacggccgcaggtacgacatggagctgcacatggtccacgagagcgccgagaagaaggccgccgtgatcggcctcctctacgaggtcggccgccccgaccgcttcctccaaaagatggagccatatctcaagatgattgcggacaaggaggacagggaggagaaggtgggcatgattgatccgaggggtgcaaggggtagggccagcgtgtactaccgctacatggggtcgctcaccacgccgccttgcacgcagggggtggtctggacgattgtcaagagggttcgcaccgtgtcgaggtatcagctcgaccttctcagggaagctgtgcatgatgaaatggagaacaacgcgaggccccttcaggcggtgaacaacagagacatctccattttccggccttaccctcataaacgctattaa

SEQ ID NO: 3570 - DNA, 1460 bp, Oryza sativa
atggcgttcttcaggggcctgaccgcggtgtcgaggcttcgatcccgcgtggcacaggaggccaccacgcttggtggtgtgcgatggctgcagatgcagagcgcatctgatcttgatctcaagtcccagctgcaggaattgattcctgaacaacaggaccgcttaaagaaacttaaatcggagcatggaaaggtccaacttggaaatataacagtcgatatggtccttggtgggatgagagggatgactggaatgctttgggaaacatcattgcttgacccggatgagggtattcgttttaggggtctctcgattccagagtgccagaaagtgctgccgacagcagttaaagatggggagcctttgcctgagggtctactttggcttcttttgaccggaaaggtgccaaccaaagagcaagttgatgctctatcaaaggaattggctagtcgttcgagtgttccaggtcatgtgtatgaggcaatcgatgctcttcctgtaactgctcatccgatgacccagtttaccacaggagtgatggcacttcaggtggagagtgagttcaaaaagcctatgacaaaggaatgtcaaaatcaaattgttgaatggattttccatgtactgacctggtgctattttaataggttctgggagcctacctatgaagattgcttaaatttgatagctcgccttccagcagtggcttcatatgtttaccggaggatattcaagggagggaaaactatagcagctgataatgcactggattatgcagcaaatttttcacacatgcttgggtttgatgatcccaaaatgcttgagttgatgcgactatatataacaatccacactgatcatgaaggtggaaacgtcagtgctcatactggacatctggaaaatcctggtgtatcagtatggccttttaatgcattaggaaaggttggaagtgctctgtcagacccttatctttcttttgcagctgcactgaatggtttagctggaccgttgcacggcctggctaatcaggaagtgttgttgtggatcaaatctgtaataggtgagactggtagtgacgttacaactgatcaactcaaagagtatgtgtggaagacactaaaaagtggaaagatagtatgccatgacacattcattcgtaggttgttcctggctttggtcatggagttctacgtctccaagttgtatgaagttgtgcctcctatcctcactgagcttggcaaggtcaaaaacccatggcctaatgttgatgctcacagcggagttctactgaaccactttggattatctgaagctcggtattacactgttcttttcggagtttcaaggagcattggaataggatctcagctcatttgggaccgtgctcttggcctgccgctcgaaagaccgaagagtgtcaccatggagtggctggagaaccactgcaagaaggttgctgcttg

SEQ ID NO: 3571 - DNA, 2496 bp, Oryza sativa
atggcgggccccacctsgcgccgcctcctcctcctcgtcgcccgccgcgctggtcacctctgccgccaccaccaccaccaccaccaccgcgacggactcgtcctggcccgctcgctccaggccgctgccgctgccgccgcctcgtcgccaccaccgcttcccgcctcgcccccggccaggagcttttctagtgcattctcaagtgttcatggggagagaccgtcctcagaatatgcaaagatcagaaaggagtcgttagaaagccagtttggaaggatcttgggttcaagctcacgtacactatttgcagatcgtggctttggtccattccttgcaatgtacagggcagcaattatctcttttcatgttatgaagctcactatttggcatttattgctcagtgatgtgcacaaacgggctgagaagttccaggagaccttgatccggttggggcctttttacatcaagcttggacaagcattgagcacacgccctgatatattgccgaatgcatattgtcaagagctctctaagctacaggtgtatgttgacaaatcacaactatctcatcaggaccagataccaccatttcctactcgtatcgcaatcaggactattgagtctcaactgggttctcgaatttctgatctatttgctgatatcagcccagagccagttgctgcagcatcgctggggcaagtatataaagctcatctacactctggagagcttgtcgcagtcaaagttcagaggcctggaatgactcccttgctgactctagatgcacttttgttccatatgatcggaggacagttgaaacggtttgcaaaggctcgcaaagatttactggtagcagtcaatgagattgtcaggcacatgtttgatgagattgattatgttttagagggaaggaatgctgaaagatttgcgagactttattctcatgatttaggtgggaatagctccggagatgggacaagtatcaaagtcccaaaggtctactggaattttacacgtaaatctatattaactctagaatggattgatgggatcaagctcactgatgctgagcgcattggcaaagccaatctgaacaggaaaaggatgatcgatgagggtctctattgttcattgaggcagcttcttgaagaaggctttttccatgcagacccccatccagtgcagtctggtgcatttctgcacagttttgcatcttcaaattttgaattgaaaattcgaaatgactggagattcaaacaccacctcaggctaccttgggtcacgcttgtgcactatgttaaccgtgactccttgggcttggcaaatgacttccattcacttgggtttgtccctgagggaacagacctacatggggttgctgatgcattacgtgtttcctttggtgatggaaggaggcaatcaaatgattttcagggggtgatgagccatctgtatgatgtcatgtatgagtttaatttctctcttcctccggattacgcactggtgataagagcactgggttctttagaagggactgcaaaagcattggatcctgacttcaaagttattgaaagtgcatacccatttgtcattgggaggctacttgaagaccccagccctgatatgaggaaaatattgaggcagctcttgatatgcgatgatggatccatcagatggaatcgactggagcggctgattgcagctatatccgaacagtcagaatcttcaaataagtctgaagatagatctggtgaaaatgctgccaacaaacctgggtggagatcattcgacatgcattctgtggttgcagctacagaagacctttttcatttcattttatcaaggaaaggctggagggttcgtgtttttcttgttcaggacattgtaaaagcttcagatgcattcctacaagaagcaacatttccaggtatattcgatgaagaggggactacaggggagctacatccagagagaagtaaaatgataagaagggtggtacatggtgttcaatcattccgtcaagctatcagtttggccccagatgcctggactgctatgctattccgtaccttgttgaaacctgaatcccagaaatttattcttgatgtctttctagccttggcaatgcattcctgttacaagattccagaaacaagctggatttgtatgtcgagattcctgaattacttggacaggcaggaggccaatatgctcatttttgtgagagctgctaccgatcttctaatgccactgcccactagtttcatttctgttcgagtcaggacagccggggaggttgtcaaccaaaatctccgacttctcgtcctcgtctgccttcagccgcagcttcatgcatcgaaaaccattgattccgcagaagtaatcacagatctgccacacgacaaatctcacaagagcgatatgggcgaacctagaacaaaacttgctagggatcctattatatacttcctccgttacaattcccaaattgtatag

SEQ ID NO: 3572 - DNA, 540 bp, Oryza sativa
atggccgccgcgccgtccgccacctccgtccacgacttcaccgtcaagggcttccaggatgcaagcggaaaagacgtgaacctgagcacctacaaggggaaggttctcctcatcgttaacgtcgcatcccaatgtggcttaactaactccaactacactgagctgagccagctgtatgagaagtacaaggtccaaggctttgagatattggctttcccgtgcaatcagtttggagggcaggaacccggctccaatgaggagattgtccagtttgcttgcactcgcttcaaggctgagtatcccatttttgacaaggttgatgtcaacggtaacaatgctgcacccctgtacaagtatctgaagtctaacaaaggtgggcttttcggtgatagcatcaagtggaacttctccaaattcttggttgacaaggagggtcgcgtggtggatcgctatgcgcccaccacctcccctcttagtattgatggtaatgtcctgcactaccacttgcaatctccttttctaacagggctgaattgttag

SEQ ID NO: 3573 - DNA, 630 bp, Oryza sativa
atggcttccatcgtggcatcgaagaggatcccactgttccgcctcgtggagcagctcctcgccgcgtcgccggcccaaggcgccgcctccgctctcaggccggtggccgtcgccggcgggtcccgtgcatacaacaccggcgcgcagctccgccggcacgagagggacgagtcggacgacgacagcggccgtgggtacgacaccaggcgccccacacgcgacgccaccatgcccgccttcttctcagagcctcgggcggctgctgagcctcatggacgacctggcgacgccggccgggcgcgccgggccgcgacgctgcggcgcgggtggaacgcgaaggagagcgaggaggcgctgcacctgagggtggacatgccgggcctggggaaggagcacgtgaaggtgtgggcggagcagaacagcctcgtgatcaagggcgagggggagaaggaggccggcgaggacgagggcgccgccccggcgaggtacagcggccgcatcgagctcgcgccggaggtgtacaggatggaccagatcaaggcggagatgaagaacggcgtgctcaaggtggtcgtgcccaaggtgaaggaggagcagcgcagggacgtcttccaggtcaacgtcgagtag

SEQ ID NO: 3574 - DNA, 1464 bp, Oryza sativa
atggcgagctcagcagcgacggtggtgctgatcccgttctgcgtctccggccacctcacgcccatgctggaagtcggcaagcggatgctgcgcagccgctgctgcggcgacgacgacgacggccgccccgccatgtcgctcaccgtgctcctcgcgcagctgccggagtcccaccgcgcgcccgagatcgacgagatcatccgccgtgaagcggccggcgcgtcggagcactccggcttcgacgtccggttccactgcctccccgccgaggagctcccggacttccgcggcggcgaggacttcatctcccggttcatgcagcagcacgcgtcgcacgccagggaggccatcgccggcctcgagtcccgcgtcgccgccgtggtcttggactggttctgcaccacgctcctcgacgtcacccgcgacctcggcctccccgggtacgtgttcttcacgtccgccgcctccatgctctcgctcctgctgcggttgccggcgctggacaaggaggttggccgtggatttccgaggagattgggaggcgccgtcgacttaccggggttgccgcctgtgccggcggctctgttgccgacgcctgtgatgaagaagggttgcaactacgagtggctcgtgtaccacgggagccgcttcatggaggctgcggggatcatcgtcaacacggtggccgagctcgagccggccgtcctcgaggccatcgccgacggccggtgcgtgccgggacgccgcgtcccggccatctacacggtcggccccgtgctgtcgttcaagacgccgcccgagaagccgcacgagtgcgtgcggtggctcgacgcgcagccgcgagcgtcggtcgtgttcctctgcttcgggagcatgggcagcttcgcgccgccgcaggtgctcgagatagccgccggcctcgagcgcagcgggcaccgcttcctgtgggtgctgcgcggccgtccacccgccggttcgccgtacccgacggacgccgacgccgacgagctcctcccggaggggttcctggagaggaccaaggggaggggcatggtgtggcccacgtgggcgccgcagaaggacatcctcgcccaagccgccgtgggaggcttcgtgacgcacggcgggtggaactcgacgctggagagcctgtggcacggcgtgccgatggcgccgtggccgctgtacgcggagcagcacctgaacgcgttcgagctcgtgcgcgacatgggcgtcgccgtggagatggaggtggacaggaagcggggcaacttggtggaggcggcggagctggagcgcgcggtgcggtgcctgatggacgagggatcggaggaggggaggatggcgagggagaaggcggcggcggcgaaggcggcgtgccggaacgccgtggacggaggcgggtcgtcgatagcggcgttgcggaagctcacgcaagaaatggcccacatgtcatccatatag

SEQ ID NO: 3575 - DNA, 2064 bp, Oryza sativa
atggatcatgttgctggtgttcaatttgccgagcaaatcgagcaagctttgagaaaggccgacgagctcggcgacgatgacctgagagccgcgttacgtcgtgcgaggaactcaccggctgacacggcgttccaactccctctgctgcaacttcccgtagaagaccccgtccatgccggagcagcagccacccagccggagcagcagaatgcgggacgcaggttgatgtgcccagagctgtatcgcgccgccttctctggatctgtagacaagctccaggaacttcttgtttcacccmgtggaacggcagcagaggaacaaggaagaaggcatgacggccagtgcgtcctggacgagaccaccgcagggctgaacaccgttcttcacttggcggccagtcaagggaagattgggcttgtgaggaagctctgcgatggcgacgacacggccgcggcggcggtggcggcgctgctgccgaaagagaccaccaagtcggagacggcgttgcaccacgccgcgagggcggggaggcgcgacatggtgtcccttctcatcaggctagctcagatgcatggatccggcgctcccgggctactggtgacgaagaacagcgcgggcgacacggcattgcacgtggcggcacggcacgggcgcgtggcggtggtgaaggtcctgatggtggccgctccggccttgtcttgcggtgtgaacaacttcggaatgtcgccgctgtacctcgccgtcgtcgggcggtcgattggcgccgtgaaagccatcgtccagtggaagcacgcgtctgcgtctggccccaagaggcagaacgctttgcacgcagctgttcttcagagcgtagaaatcacacgcgagttattgtcatggaactcgaatctggccaaggaacccgatgaatcggaaagcactccgctgcactacgcggcgtctgatggcgtccgagagatcatcagcatgttgattcagtcgatgccatcggctatgtacatcccagacaaagaaggattgacacctcttcatgtcgcagcgaagatgggtcatcttgatgtcatccaagacatgctgaaagaatgcccagactctgccgagcttgtcgacaacgagggcagaaacattctccatctggccatcgagagaggccatgaacctgtagtgtcatacatccttggcgatccatctcttgctgagcttttcaatgagcaagacaagaaagggaacacacccatgcactacgcggtgaaggccgggaacccgcgtctcgcaattttggagagcagaaacatcaaactgaacattgttaacaacgaagggcaaacaccattcgacctcgcatcaaacacaaccggtttcttgcacatgattggttttttgctcagactgtcagccaatggagctcggttcggggcgcaacgacaagattgcatatcccaatggagcagcaaaaatgttaaggaatggaacgagaaaacgaccaagaaccttggcatcgtcgccgtgctgatcgccaccatcgccctgaccgccatgttcaacgtgccaggagggtacaactccgacggcgtggcgaacctccgcgcgacgacgccttacaacgccttcctggtgctcgacaccgtggccatggcgtcctccgtgatcgccaccatgctcctcacctacggcaggggggcggcacgctcaagcacggcgtggatatgcatgtccctcatcttcctctggatggcgctgatgagcatgatcctggcgttcatggccgccgtcgtctccgggctggacagcacgaccaccaagtacatcctgtggagcatcttcgtgctgccgttcgccttcttggtcgcgctcagcttcgtctgggccgtgccagcgccgaccttcaccacactgcttctgttgcctcgtgccctcgccggagaagacagtgggtggacgcgtcggcgcatcgggcggcgtttccggtcggtgggggtttacctgttagttctgtacttgttctggttcttgaatgctgtggcgtttttccttaccgtctatgtcgtcgtaaacgcgatctga

SEQ ID NO: 3576 - DNA, 2277 bp, Oryza sativa
atgatgcctggttttggtacaagttcttccatgggttctgcatctcaccctgctagaatcgagtataacacaagtagcaatgtgtcatctcaatacatatatgagcagggtctttattatccagcaacaaacggctatgcttactatgcaggctttgagccaccagttgaatggagtgatcacactaattttgtgggggtagatggtcaaaacctacaactttcaaatgaaaaccttccatatgtatattgcacacctggctatggtttttcttattactccccagatcagtacacctatatgcctggcatggtaatgggagttgatggctcttttgtaggaagccaacagtattttgctagtccatatcaacttcctggctcgccatctggtttcttcccgatgtctattcagcccaccacagatttcagctcaactgtttctgcagaacctcctttacttagtactggcactggtacatctgctgttgctagtaggcttgctaacaccagtatgaaaaacaaatatcagatgtctggaaatacagctccagcttctcagactgccccttctggaagtccagctgttggacgtcctcagcaggcctacgaaaacgaaagcacaaataagccatctaatccgcctgatgctaacatgagtaggcgtgacaaatcctcaacctcccttgtcacagttccagtggatgcttcatcgactgacaaggatggaaaatctgatgaaggtaatcagtcaaaagaacatgtgcaatccattcaggttacttcaggtcccatgtctggcgaaagtggacaaggcaaagcaacatcaaacagtacattggaaaaaattatgatacatcctgaccaatacaataaggttcactttcctgttgatcatccagatgccaagttttttgtcatcaaatcttacagcgaggatgatgtacataagagcattaaatataatgtatggtcaagcacacctaatggcaacaagaggttggatgcagcctactcagatgtacaaggaagagctctgggaaagtgtccaatatttctctttttttctgttaatgctagcgggcagttctgtggtgttgctgaaatggttggtcctgttgattttcacaaagacatggatttctggcagcaggataagtggtctgggagcttcccggtgaagtggcacctagtaaaggatgtgcccaactccacctttcggcacattatattagagaataacgagaacaagcctgttaccaacagccgggatacacaagagattccttttaagtctgggacaaacatgctgaagctatttaaggatggcccattgacaacatctattcttgatgacttctcgttttatgaagggagacagaaagcaatgctagaagagaaatgcagatgttcgggtagaaattttgatgtacgcatgtatgttccagcatttatcgctaaaagcagtgttgttgcggtaggtgaaccttcagaagtaggtaaaggccagtttagcagcaaagatctacattcaggggatgttgaacaggataatggtgcatgtgagcaacctgacaagctgaaccaaatgaaagacatactggccactgaagcactcaaaacggatggtggagcatttgttgggcaacttgagcatgcaaaaacaaaccaaggtagtttagatgccagagttgatcatcagagtgaacattgttcctgttctaacccaccagaaaacggtgaaagaaaacctgatagcttgagcgaactagtaaaactaaatgggaagagtcagcgtgattctgaagcacaacctggaataaacttatcagaacccaattattcttctgtcaagaaaggtcttcctgaagagttctgtggtcagaacccctcaaattttatgaaagagggaggagctggtacagtcgaggatagaaagtctacaaaatttgttaccaaatcacagggctttccatctagtcgagtgaacaaggaagcgaaaggcaatggtaatgagatggcaaggatcactacaactggtgttgtgaaggttggctcagtgcacatcaaggtaaatgtggcagaaggaacggatggtgttaactgtttagtggggcgtgtgtctctttgggggttgggagggagggttgggtggtkaggtkaggtkaggttttgccttttgcgggcattacagttcagtgagcttgacattgaggttgctattgggtataggcatttcgctttgttttttgggtacataacctccaacaggtcatag

SEQ ID NO: 3577 - DNA, 1458 bp, Oryza sativa
atgggggagaacggtgtggtggcgagcaagctgtgctacccggcggcggccatggaggtggtcgcgccgagctcggccacacggccggctccaagctggacgatgtggacggcgagcgcgcacatcatcacggcggtgatcggctccggcgtgctgtcgctggggtgggcgatcgcgcagctgggttgggtggccggccccgccgtcatgctgctcttctcgttcgtcacctactacacctccgcgctgctcgccgactgctaccgctccggcgacgagagcaccggcaagcgcaactacacctacatggacgccgtgaacgccaacctgagtggcatcaaggtccaggtctgcgggttcctgcagtacgccaacatcgtcggcgtcgccatcggctacaccattgccgcctccattagcatgctggcgatcaagcgggcgaactgcttccacgtcgaggggcacggcgacccgtgcaacatctcgagcacgccgtacatgatcatcttcggcgtggcggagatcttcttctcgcagatcccggacttcgaccagatctcgtggctgtccatcctcgccgccgtcatgtcgttcacctactccaccatcgggctcggcctcggcgtcgtgcaggtggtggccaacggcggcgtcaaggggagcctcaccgggatcagcatcggcgtggtgacgcccatggacaaggtgtggcggagcctgcaggcgttcggcgacatcgccttcgcctactcctactccctcatcctcatcgagatccaggacaccatccgggcgccgccgccgtcggagtcgagggtgatgcggcgcgccaccgtggtgagcgtcgccgtcaccacgctcttctacatgctctgcggctgcacggggtacgcggcgttcggcgacgccgcgccgggcaacctcctcaccgggttcggcttctacgagcccttctggctcctcgacgttgccaacgccgccatcgtcgtccacctcgtcggcgcctaccaggtctactgccagccgctgttcgccttcgtcgagaagtgggcgcagcagcggtggccgaaatcatggtacatcaccaaggatatcgacgtgccgctctccctctccggcggcggcggcggcggcggaaggtgctacaagctgaacctgttcaggctgacatggaggtcggcgttcgtggtggcgacgacggtggtgtcgatgctgctgccgttcttcaacgacgtggtggggttcctcggcgcggtggggttctggccgctcaccgtctacttcccggtggagatgtacatcgtgcagaagaggataccgaggtggagcacgcggtgggtgtgcctgcagctgctcagcctcgcctgcctcgccatcaccgtcgcctccgccgccggctccatcgccggaatcctctccgacctcaaggtctacaagccgttcgccaccacctactaa

SEQ ID NO: 3578 - DNA, 783 bp, Oryza sativa
atgtcatcgattcttcgatccattcagctgaggaacagtatatggagtagcttccctgtcagatttcttaagcaacaagccggattatcaactgtagaattgcttgatcctagaagctgtgggaaacgacatttcacaacacaagtacaggaacatgggaaggaagttgcggcggcagcaactattctagtttttgatcttgagactactggctatttccataaggatcatagaatagttgagtttgcactctgtgatctttctggaggaaagaatagcacttttgaaactcttgttaatcctgaaaggactgttcctgactacgttgaacatctcattaaaattggcactgatctcgtgtgcaggcctggtatcccaaggtttagtgatgtaatcccactactattggcattcgttcgaagtcgccaagctcctggcaagccagttctgtgggttgctcataacgcaaaacaatttgatgctcgtttccttgctcaggagtttgatcgttgttcagcaccacttcctgcagattggctgttttttgacacccttctcttggcaaaaaagatggtgaaagcagaggggaaaaaacgtcgtacaagcttggaggcactgagagaacactatggcatcgtctcgcatgacgatgcgcatagagcaatgcgagatgttatgatattgtctcaggttttccagaaaatgacttttgatctaaaactgacaaatgaagaactaataaacgaggccatgaaggcaagtgaattcagcaagatttcttaa

SEQ ID NO: 3579 - DNA, 942 bp, Oryza sativa
atggcgcgctgcgggagcgccatcgccgccgtcgcggcgctgctcgtcctgctcggcgggcacgcggccgcgcgcatccgggtggagcactccgggatggtgatccggcggccgtcgtcgtcaatcccgagcttccgggaggccccggcgttccgmaacggcaaggattscggcgccgggggaaggktgaacktgsccatgacsctggacgccaaytacctcsggggcaccatggccggcgtgctgtccatcctgcagcacacggcgtgcccggagagcgtgtcgttccacttcctcgcggccgggatggacgccgacctcgcggcggcgccgctcaactacgcgcgcatctacctcgccgaaacgctcccgcccgacgtgcgccgcgtcatctacctcgactccgacgtggtggtcgtcgacgacatccgcgcgctggcgtccgtcgacctcggcggccacgtcgtcggcgcgcccgagtactgccacgccaacttcaccaactacttcaccgacgcgttctggtcggacccggcgctcaacggcacgttcgccggccgccgcccgtgctacttcaacaccggcgtcatggtcatggacgtcggcaagtggcgcgccggcggctacacccgccgcgtcgagcggtggatggaggtgcagaagcagacgcggatctaccacctcggctcgctgccgccgttcctcctcgttctcgccggtgacatccaggccgtcgaccaccgctggaaccagcacggcctcggcggcgacaacgtcaaggggcggtgccgtggcctccacccggggcccatcagcctcctccattggagcggcaaggggaagccatggatccggctcgacgcgcggcgcccgtgcgccgtcgactacctctgggcgccgtacgacctcttccggccatcgtcgccggtgctcgaggagtga

SEQ ID NO: 3580 - DNA, 1800 bp, Oryza sativa
atgaggaatggtgtagaggccacacagagagtcttcctctatccacagtctccaaaggtctcctctattgtcagcaagggatacagaactggatatcacttccagcctccaaagaactggatcaatgggccaatgtactacaatggcatctaccatgagttctaccagtataacccgaacggatcagtctggggtaacatagtttggggccactcggtctcgacagatctcatcaactggatccgtcttgaacctgcaatagaaggaaatactccgagcgacataaacggttgttggactggttcagcaacaatcctcactggtgatcaaccggttatcatatataccggtgccgacacggagaagcgtcaggttcaaaacattgtgctaccaaagaaccggtctgatccttacctgagggaatggaccaagccaaaaaacaaccctttgatcgaaccggtcggtccgggtttgaactcaaaccaattcagagatccgacaaccggttggataggaccggatgggctatggagaatagcagttggggctgagctgaatggctacagtgcagcacttttgtacaagagcaaagactttatgcagtggactagagtagatcacccattgtattcttctaatgcatccaacatgtgggagtgcccggatttctttgcagtattgcctggcaagaacaatggactggacctctctgcagctatcccaaatggcgccaagcatgtcctcaaaatgagcttggattcctgtgacaagtacatgattggggtttatgatctgaaacatgacatgtttgtgccggatactgtcttggatgacagacgattgtggttgaggattgattatggcaattactatgcttcgaagtcattcttcgattcgaaaaagggaagaaggataatatggggctggactaatgagacagatagtacgtcagatgatgttgcaaaaggttgggctggcatccatgcagatgtggagatagattttgagctgacatccatagatgctgctgatccttttgacccttcctggcttttggacaccgagaagcattgccgagaagcagatgcatcagttcatggcggcttggggccatttggacttgttgttcttgcctctgataacatggacgagcacactactgtgcacttcagggtttacaaatcagagcagaagtacatggttctcctgtgctctgatctgagaagatcatcgttgagaccaggactgtacacaccagcatatggaggcttctttgaatatgaccttgaaaaggagaagaagatctccttgagaactctgatcgaccggtcggcggtggagagcttcggcggcggcggcagggcgtgcatcatggccagagtgtacccggcggcggtcgtcgacggcgccacccacatgtacgccttcaacaatggcagtagcacggtgaaggtgtcgcagctcaaggcatggagcatgacgagagcacagaaaggagatggaaatcaaatcattgttaagaaatggttcgcaattgattcgctgtcccttctcccagacctattgatgacatctactagccttgtagcaacatgtgtacttgtcagagttaagaccgttctctcccccgagtcggttctccccaggggcggctcgggaggcgacccggccgcccctcttccccctaccccamcccccgaagccgcgcggccgcaaggacggcggcggcggggcgctcctcgtctcctcgcgctcggacggcctggggagccacccggggatgggctggcgacggggtag

SEQ ID NO: 3581 - DNA, 1086 bp, Oryza sativa
atggccctggtgcagtcggcgcggcgtgccgcggggccggcggcgagccggcttattctcgacggcgtcggtggcggcggccgggcgctcccccgtgggctggcctgccgaargcgctgccgcggccggccatatcgtcgctgtggatggtcggcgccgcggttcgccccgccgctttgccggcacggcggcggtgggcggtgtcgacgtgaccgcgccgacggcgacgcaaccgccggcgaagaaagaggaatcggagaaggaggcggcgagctactggggcgtggcgccgacgaggctcgtcaaggaagacggcacggtgtggaagtggtcctgcttccggttaacaaagctccgttaatcaccgtcgttaaagctcgctggttaactcactctactgttgaacagccgtgggacacgtacgaagctgacgtggcgatcgatctgacgaaacaccacaacccggcgacgctcggtgacaaggttgccaggtggacggtcaaatcgttgcgctggccggttgacctcttcttccagaggaggtacgggtgccgggcgatgatgctggagacggtggcggcggtgccggggatggtggccggcgcggtgctgcatctgcgttcgctgcggcggttcgagcacagcggcgggtggatccgggcgctgctggaggaggccgagaacgagcggatgcacctgatgacgttcatggaggtgtcgcagccgcggtggtacgagcgggcgctggtggtcgccgtccagggcgccttcttcaacgcctacctcgcctcctacctcctctcccctcgcttcgcccaccgcatcgtcggctacctcgaggaggaggccgtccactcctacaccgagttcctccgcgacctcgacgccggcaagatcgacgacgtccccgcccccgccatcgccatcgactactggcgcctccccgccgacgccaccctcagggacgtcgtcatggtcgtccgcgccgacgaggcccaccaccgcgacgtcaaccactacgcctccgacatacattaccagggtcacgcgctgagggaggtggccgcgccgctcggctaccactga

SEQ ID NO: 3582 - DNA, 1245 bp, Oryza sativa
atggcgccgcccagctgcttgctccgcgttggctggctaccagcggctctgtgcgcgctcgcgctcgcgctggcgcccgcctcggacgccacgtcggcgtcgctggtgggcatcaactacggccgcgtggggagcaacctcccgccgccgcaggccgtgctgccgctgctcgagggcctcggcattggccgcgtgcggctctacgacgccgaccctgctgtgctgcacgccttcgccaagaccggggtcgagctcttcgtcggcgtgcccgaccagtccctggccgggctcgctgacccgggtggcgcggattcgtggctcaggtccaacgtcatgcccttcctgccggacacaaagatcgccgcgctcaccgtcggcaacgaggtgctcacgggcaacaactccgctgtcacgcgcgctcttctcccggcgatgcagtccctgcacggcgcgctcgccaagctcggcctcgacaagcagatcgccgtcaccacggcgcacaacctcggcgtgctcggcacgtcctatccgccctcgtcgggtgccttccgcagggacctcctcccgtacatctgccccatcctcgactaccacgcgaggaccggctcgccgttcctggtgaacgcctacccttacttcgcctactccggcgaccccaagggcatccatctggagtacgcgctgctcgaggcgggctacgccggcgtcccggacccaaactccgggctgcgctacccaaacctcctcgtcgcgcaggtggacgccgtctaccacgccatcgcggcggcgaacaccgcggcggctcaggtggtcgaggtgcggatctccgagaccgggtggccctcctccggggacccgggcgagacggccgcgacgccgcagaacgccgcgaggtacaacagcaacgcgatgcggctggtggcggaggggaagggcacgccgctgaagcccacggtggcgatgcgcgcgtacgtgttcgcgctgttcaacgagaacttgaagcccgggctggcgtccgagcgcaactacggcctcttcaagcccgacggcacgccggtgtacgagctctcctacaagctcccgcgcgacaactccacgttcggtggcgccggcaactccggttggagattccccggaggtggtggcggcaatgtcagcggcggttacgacaacaacggagttaacagcggctactacgacatctcggcggcatcgccggattccgcggcattgacttgccggtag

SEQ ID NO: 3583 - DNA, 969 bp, Oryza sativa
atggcggcagcattgtcgttcccgatcatcgacatgagtctgctcgacggggcagagaggcccgcggcgatggggctgctccgcgacgcatgcgagagctggggcttctttgagatcctgaaccacggcatctcgacggagctgatggacgaggtggagaagatgaccaaggaccactacaagcgtgtgcgcgagcagaggttcctcgagttcgcgagcaagacgctcaaggaaggctgcgacgacgtgaataaggcggagaagctggactgggagagcaccttcttcgtccgccacctcccggagtccaacatcgccgacatacccgacctcgacgacgactacaggcgcctcatgaagcgcttcgcggcggagctggagacgctggcggagcggctactggacctgctctgcgagaacctcggcctcgagaagggctacctcaccaaggccttccgtggccccgcgggcgcacccaccttcggcaccaaggtcagcagctacccgccgtgcccgcgccccgacctcgtcaagggcctccgcgcccacaccgacgccggcggcatcatcctgctcttccaggacgaccgcgtcggtggcctccagctgctcaaggacggcgagtgggtggacgtgccgcccatgcgccactccatcgtcgtcaacctcggcgaccagctggaggtgatcaccaacggcaggtacaagagcgtgatgcaccgggtggtggcgcagatcgacggcaacaggatgtccatcgcgtccttctacaaccctggcagcgacgccgtcatctccccggcgccggcgctggtgaaggaggaggaggccggcgagacgtatcccaagttcgtgttcgaggactacatgaagctgtacgtgcgccacaagttcgaggccaaggagccccggttcgaggcgttcaaggccatggagaacgagacccccaaccgcattgccatcgcttga

SEQ ID NO: 3584 - DNA, 1023 bp, Oryza sativa
atgtcgacgccgagagcggcggcgagcctcgccaagaaggcggcgctggtggcgctggccgtcctggccgcggcgctcgcgacggcggcgcgcgccgagcaktgcggcgcgcaggccggcggcgccaggtgcccgaactgcctctgctgcagccgctggggctggtgcggcaccacctccgacttctgcggcgacggctgccagagccagtgcagcggctgcggcccgacgccgacgccgacgccgccgagcccctccgacggcgtgggctccatcgtgcccagggacctgttcgagcggctcctcctccaccgcaacgacggggcgtgccccgcgcgcgggttctacacctacgaggccttcctcgccgccgccgccgcgttcccggcgttcggcggcaccggcaacaccgagacgcggaagcgggaggtcgccgcgttcctgggccagacctcccacgagaccaccggcgggtggccgaccgcgcccgacggccccttctcctggggctactgcttcaagcaggagcagaacccgccgtccgactactgccagccctcgccggagtggccgtgcgcccccggccgcaagtactacggccgcggccccatccaactctccttcaacttcaactacgggccggcggggarggcgatcggggtggacctgctgagcaacccggacctggtggcgacggacgcgacggtgtcgttcaagacggcgctgtggttctggatgacgccgcaggggaacaagccgtcgagccacgacgtgatcacggggcggtgggcgccctcgccggccgacgccgcggcggggcgggcgccggggtacggcgtgatcaccaacatcgtcaacggcgggctggagtgcgggcacggccccgacgaccgcgtggcgaaccggatcggcttctaccagcgctactgtggcgcgttcggcatcggcaccggcggcaacctcgactgctacaaccagaggccgttcaacagcggctcgtcggttgggttggcggagcagtga

SEQ ID NO: 3585 - DNA, 860 bp, Oryza sativa
atgccattggatgagcttccaccacttcgtctgcgagatatgatgttctcagcaaccaccacacatggtacaatggctacctgcttagaacgtctattggactcggcacggtgttcttcaggtgtcattctcaataccttcgatgaccttgagaattctgacctccgaaagatcgccaatggcctaagtgttccggtttacgcgatcggtccacttcacaagatctccataggccaagagagcagcttgctaactcaagatcaaagctgtttggaatggttagacaagcaggaggcagagtctgttctttatgtgagctttgggagcttggcatctatggactctcaagagcttttggagacagcgtggggattggtcgatagcgaaattccgtttctttgggtgatcaggcctaactcggtccagggatcagagcaaacatgccttccagatggctttgaggaggcgacacgtggcaggggtatggtggtttcctgggccccacaacaagatgtgctgaagcaccgagcggttggtggtttctggacgcacaatgggtggaactcaaccctagaaagtatatgtgatggtgttccgatgatctgtaggcctcagtttgcggaccaaatgattaatgctaggtatgtccaagaggtatggaagatagggttcgagctagagggaaaactggagaggagaatgattgagagggctgtaagaaggttactgtgcagtgaagaaggcaaggagatgaggcacagggcaaaggatctgaagaacaaagcgacgacctgtattgagaaaggaggctcttcaaatactgcaattgatatgttggtgaatctcataatgtcattttg

SEQ ID NO: 3586 - DNA, 1440 bp, Oryza sativa
atgggcacggaagcagtgcacgccgctgtcgccgccggcgccggccaccgtcgtcgccgcgtcctgctcctcccgctgccgctccagggccacatcaaccccatgttccacctcgccagcgtcctccacgcgcggggcttcgcggtcaccgtcttccacctccaaccggccggcgtcaacgcgcccgacgcgtccctccacccggcgttcgacttcgtccccgtccccgccgacggcgacggcgacggcgccggcggcgactacctggaggccaccctggcgggcatcctcgacgtgaaccgccggttccaggcsccgttcagggagcgactcgcggcgctgctcgaggaggctgctcctgccggcggcggcaacgtcgcgtgcctcgtcgccgacgcgcacctcctgacgctgatggacgtcgcgcggcggctcgtcgtgccgacgcttgcgctgcgcaccggcagcgcgscttcttycgcgtyttygccgcgcatcgtatgctccgcgacatgggctacctcccsgctcgagagtcggagctggacgcgccggttgacggtgctgccgccggcgccgtaccgcgtccgggacgtgatgctgaccgccggcttcggtggccacgcgcaggaccagatctacgagctggtatccsgggccgtcgaggcgktgaggacgtcgtcggggctaatcctcaacacyttcgacgcgctcgagcacgacgagctcgccgcgctgcggcgagacctcgacgtcccggtgttcgacgtcggcccgctccacaagctytcgccgacggcgccgccgagcagcctgctgcgccaggaccgcggctgcctcgagtggctagactyccaggcgccggcgtctgtgctctacgtyagcttcggcagcatcgccagcgtgagcgccggcgagctcgtcgaggcggcgtggggsatcgccaacagcggacacccgttcctctgggtgctccgcccgggcctcgtccgcggcgccgccgccgccgccgccctccccgacggcttcgacgccgcgacgcgcggccgcggcgcggtggtcagctgggcgccgcaggagaggtcctggcgcaccccggcgaccgccgcgttctggacgcactgcggctggaactcgacgctggagagcgtctgcgccggcgtgccgatgctgctccggccatgcttcggcgaccagccgggcaacgcgaggtacgcggagcgcgtgtggcgagccggcctcgcgctcgacggcggcggcggcgagatggagaggggcaaggtggaagccgccatcaggaggctcatggaagaggacgacgccgccggaatgcggcggagagccggcgagctgaagagcagagcggcggagtgcatcaccaaggctggctcttcttgcctcatcattgacaagctggttaatcacattttatccatctaa

SEQ ID NO: 3587 - DNA, 1236 bp, Oryza sativa
atgggcctcctcgtccagctgctcgccgccagggtgggcgtcgccacggggaggcaccttgccgagctctgccgcgacgagtacccctcctgggcgcgccgcgcgctgtggctcatggccgaggtcgccatggtcggggccgacatccaggaggtgatcggcagcgccatcgccatcaagatcctcagccgcggcttcctccctctctgggccggcgtcgtcatcaccgccttggattgtttcattttttggtctcttgaaaactacggggtgaggaaattagaagctgtatttgcgattctaattgcgactatggctgtctcctttgcatggatgtttactgataccaagccaaacatgaagaacctgttcataggtattttggtcccaaaattgagctccaggacaataagacaagcagttggggttgttggatgtgttatcatgccacacaatgtgtttctccattcagcgcttgttcagtcgagaaaaatagacccaaacaaggaacaccaagtccgtgaagcgttgagatactattcaatagagtcaaccatcgccttggctgtgtccttcatgataaatctctttgtaacaactgtttttgcgaaaggattttatggcacaaaagaagctggtaatattggccttgaaaatgctggacagtatctacaggagaagtttggtggagggtttttccctatcctctacatttggggaattggactattagctgcggggcagagtagtaccataacgggaacatatgctggacagtttataatgggtggatttttgaacttgaagttgaaaaaatggatcaggtcactcatcacccgaagctttgcgattgtgccaacgataattgtcgcactcttcttcgataaatcggattcgctggatgttctaaacgagtggctaaatgtgcttcaatcaattcagatcccttttgccctgattccgctgataactttggtttccaaggagaaagttatgggggtatttaaaataggtcgaaatactcaagctgtgacctggacagtggcgacactattgatcacgatcaatggctatctcttgctggatttcttctcttcagaaataagaggcctattatctggctcaattctctgcgtggcagtacttgcttatgcttcttttgtattgtatctcatcctgcggggtaccgagctgccaaatcagatcatcacaactatacgcaagagtttttcatga

SEQ ID NO: 3588 - DNA, 1323 bp, Oryza sativa
  misc_feature (1)...(1323): n = A,T,C or G
atggcgtcsggagaaggktggagacgatcgtggcgggkcaacytacgtcgagatggagncgtgaaggcgccgctcacgccggcgaaggcgtcggcggagccgcggcggcgtcgggcaggcggcgcggcaagctcgccgtctccagcctcttctggcacggcggctccgtctacgacgcctggtggcgcaggtgctgctgacgctgccctactccttctcgcagctgggcatggcgtccggggtggcgttccaggtgttctacgggctgatggggtcgtggacggcctacctcatcagcgtgctctacgtcgagtaggtgaccggacgcggcgggagcgcgacaaggtggamcttccgcaaccatkgtcatccagtkggttcgagctcatcgcctgcgccagcaacatctactacatcaacgaccgcctcgacaagcggacatggacctacatcttcggggcttgctgcgccaccacggtgttcgtcccgtccttccacaactaccgcgtctggtccttcctcggcctcctcatgacgtcctacaccgcgtggtacctcaccgtcgccgccgtcgtgcacggcaaggtggatggggcggcgccgcgcgccgggccgagcaagacgatggtgctctacttcaccggcgccaccaacatcctctacacgttcggcggccacgccgtgacggtggagatcatgcacgccatgtggaggccgcggcggttcaagatgatctacctcgccgcgacggcgtacgtgctgacgctgacgctgccgtcggcggcggcgatgtactgggcgttcggggacgcgctgctggaccactccaacgccttcgcgctgctgccgcggacgccgtggcgcgacgccgcgttcatcaccttcggcttcgcctgcacgccgctctacttcgtgtgggaaaaggccatcggcgtccacggcggcgccggcgtgcttcgccgcgcggcggcgaggctccccgtcgtgctccccatctggttcctcgccgtcatcttccccttcttcggccccatcaactccaccgtcggatccttcctcgtcagcttcaccgtctacatcatcccggcgatggcgcacatggcgacgttcgcgccggcggccgccagggagaacgccgtcgagccgccgccgcgcgcgctcggcggctggccggggacgttcgccgccaactgcttcgtcgtcgcgtgggtgctcgtcgtcggcttcggcttcggcggatgggcgagcacggtcaacttcgttcgccaagttgacacctttggcctcttcaccaagtgctaccagtgccctccaagacactag

SEQ ID NO: 3589 - DNA, 1143 bp, Oryza sativa
atgaccggaggggaggagcaggggaggaggctgtttggcgtgtcgctgacagacaggcccaggtggcagcagttcttgatctgctcatcggggttcttcttcggctaccttgtcaatggcatctgcgaggaatacgtctacaaccggcttcagttcagcttcggctggtacttcacatttgtgcaggggttcgtgtacttgggtctgattcgcctgcagggattcacggtgaagcagatggtgaacccgtggcggacgtacgtgcggctctcggctgtgctcatgggatcccatggcctcaccaagggttccctcgcattcctcaactaccccgcccaaattatgttcaaatccaccaaggttttgccagtgatgataatgggagcatttatacctggattaagaagaaaatatccgttccatgagtacatatcagcagtgatgcttgttatcggcctcatactattcacgctcgcggacgcacaatcatcacctaatttcagcatgattggtgtggccatggtttctggagcgcttgtcatggatgcatttctaggtaatctgcaagaagccatatttaagatgaaccctgacaccacacagatggagatgttgttctgctcaactgttgttggcctacctttcttggtggtgccaatggtgttaacaggggagctgatgcgggcgtggactgcatgttcccagcatatgtacgtgtacgccgtgctggtgttcgaggcgatggccacgttcgtcggccaggtctcggtgctctccctcatcgcgctcttcggcgccgcaacaacagctatggtcagaacactcgtcctgctcctcaaagtaacagaatttgcaccggataaaactggcagaaaaaccaatttttctgttgtgttgattgttcaggtgacgacggcgaggaaggcggtgaccctgctcctgtcgtacctgatattcaccaagccattgacggagcagcacgtcaccgggctgctgctgatctccatgggcatcgtgctgaagctcctgctggagaacaaggagaacgtcccgcgcaggcaggtgaggaagacggtgcagcattgggacgacaagcagcgggagatcagagaagtagaagaggagaaagctcccttggtatga

SEQ ID NO: 3590 - DNA, 1803 bp, Oryza sativa
atggagccctcgtcgtccatcaccatcgcgtcgtcgtcctcgtacctctcgaacgggtctagcccgtgctcggtctctcttgcgccgccgggggcaggggcsgtggcggcgcaggcggcgccggttgccgccggggarggcggcggcggcggaggaggaggaggaggaggagggagtagtagcgtggaggtggtgagcctgaatcggcttagcgctaacctcgagcggctcctcctcgattccgacctcgactgcagcgacgccgacgtcgacgtggccgacggtggcccgcccgtgccagtccaccgctgcatcctcgccgcccgcagcaccttcttctacaacctcttcgcggcgcgcggccgcggcggcgatggggctgccggcggcggcggcggcggcggtggtgggggaggggagaggactggggggaggccgcggtacaagatggaggagctcgtgccgggaggccgcgtggggcgcgatgccttcctgtcgctgctgggttacctgtacacgggcaagctccggccggcgccggatgacgtggtgtcctgcgccgaccccatgtgcccgcacgactcgtgcccgccggcgatcaggttcaacgtcgagcaaatgtacgcggcgtgggcgttcaagatcaccgagctcatctcgctgttccagcgacggcttcttaacttcgtcgataagactctagtagaagatgttcttccaattctgcaagttgcttttcattcagagctgactccagtgcttgaaaaatgtattcggagaattgcaagatcaaatcttgataatgtatcgttggataaggaacttcctccagaagttgctgttcagataaaagagattcgccaaaaatctcagccaaatgagggtgacaccgtcatttcagaccctgtacatgagaaaaggatcaccttggatgatgccaatgcattgcactatgctgctgcttactgtgattcgaaagttgtttcggagttgttagacttgagacttgccaacttgaatttgaagaattcgcgtggatacacggcactccatctggctgctatgaggagagagccagctattatcatgtgtctcctaaacaaaggagcagctgtatcacaattgactgctgatggccagagtgcaatgagtatctgccggaggttaacaaggatgaaagactacaatacaaagatggagcaaggccaagagtcaaacaaagacagattatgtattgatatattagatagggagatgataaggaaacctatggcagtggaagattctgtcacctcgcctttgttggctgacgatcttcacatgaagcttctctaccttgaaaacagagttgcatttgcaagattattttttcctgcagaagcaaaggttgcaatgcaaattgcacaagcagacaccacaccagaatttggcattgttcctgcagctagcacttctggaaaattgaaggaagtcgatctgaacgagacaccagtaacacaaaacaaaaggctccgttcaagggtggatgcactcatgaaaacagttgagctgggacgtcgctacttccctaactgctcgcaggtgctcgacaaatttctggaggatgatttgcccgatagtcctgatgcactcgacctccaaaatggcacttctgatgagcaaaatgttaaaaggatgcggttctgtgagttaaaggaggatgtgcgcaaggcattcagcaaagacagagctgataatagcatgttttctatcttgtcatcttcatcgtcatcttcgccacctcccaaggttgcaaagaaatga

SEQ ID NO: 3591 - DNA, 864 bp, Oryza sativa
atggaagctgccgcgatccatgcgcccaccaccaccacctcctccgactccggctcgtgcgtcaccaatggcacgcgagagaagcgcgagatctctaagcacaagcagctcaagcggaagaggagcacctctcctgctcctcctcccggctgcggcggcggccaaggacaggaagcggcggtggagactgacgctgacgctggcgccgccggcgaggaggagagcagcagctgcggtggcgctggcgccggcgagggcgagcgcaagaggggtgacgccggcaggcacccgtcgtaccgcggcgtgaggcggcggagctggggcaagtgggtgtcggagatccgcgagccgcgcaagaagtcgcgcatctggctcggcaccttcccgacggcggagatggccgcgcgcgcgcacgacgtggccgcgctcgccatcaagggccgcgccgcgcacctaaacttcccgagcctcgcccacacgctcccgcgcccggcctccacctcaccctccgacatccaggccgccgcsgccctygccgcagctgcagccgccaccgaccaatgcgagtcctcctcctctgccgtcgccgccgccaccgccaccgacgccgaggcggcggagtccacctcgtcggccgcggccagcccgtgcgccgccaccagcagcgtcgaggagaacgcgctgttcgacctgcccgaccttctcctcgacctgagcgacgggctctggtgctcacccgtctggacgacagcgccggccgatcagtacgacgccggcgacgacggcgacgacgccgcggcgccgctcctgtgggccgagcagtgctggatggacgccccagcggcgcccgtgcagcctgactaa

SEQ ID NO: 3592 - DNA, 816 bp, Oryza sativa
atggggaggagagcttgctgcgcaaaggaagggatgaagagaggggcatggacgagcaaggaggacgacgtgcttgcctcctacatcaagtcccatggcgaaggcaagtggcgcgaggtcccccaacgagctggtttgaggcggtgcggcaagagctgcaggctccggtggctcaactatctccggcctaacatcaagcgcggcaacatcgacgacgacgaggagctcatcgtcaggctccacaccctcctcggcaacaggtggtctctcattgcaggcaggctgccgggccgaacagacaatgaaatcaagaactactggaacagcacgctcagccgcaagatcggcaccgccgccaccgccgccgccggcagccgcggtggcagmacgccggaaaccgccagagcgacggacgcggcgttgtccagttccgtcgtgccgccgggccagcagcagcagccagccttccgcgccgacaccgacacagcaacggcagcggcggcggcggcggcgacgacgaccaccgtttgggcgcccaaggccctkcggtgcacgcgcgggttcttcttccacgaccgtgaaacggcgccgcttgccgcggcggcgccggcgccggcaggggaattaggagacggcgatgacgtcgactgcgactactactgcagcggcagcagctcggcggcgacgacgacgtcgtcgagctcattaccggcggtcgtcgagccgtgcttctccgccggcgacgactggatggacgacgtgagagccttggcgtcgtttcttgacaccgacgacgcctggaacttgtgtgcgtga

SEQ ID NO: 3593 - DNA, 1287 bp, Oryza sativa
atggggaactgcatggacaccgcggcggcgscggcggcggcgccggataccaacaacgccgatccatcaaaagctgctagcaagacaacctattcatcttacccttcaactacaaaaagcggttcatcttggactgtaccttcctataaggatcgtagcgaccttcctactcctaggacagaaggagaaattttatcatcgtcaaatttaaaggcattcacactgagtgaactcaaaaatgcaacaaagaactttaagcccgacagtctccttggggaaggaggatttggctatgtctataaaggttggatcgatgagcaaactcttgctcctgcaaggccagggagtggtatggttgtggccgtcaaaaagttaaaaccagaaggttttcagggtcacaaggagtggctgacagaggttgactaccttggccaacttcaccatgagaatcttgttaaactcattggttattgttcagatggtgataaccgacttctggtgtatgagtacatgcctaaaggaagcttggagaatcatctatttaggcgtggtgcagatcctttatcctggggaataaggctcaaagttgctattggggctgctaggggtttatcatttttgcacgatgctgaaaatcaagttatatatcgtgatttcaaggcatcaaacattctccttgactcggagttcaacgcaaagctttcagactttggtctggcaaaagcaggcccaactggggatagaacccatgtttccacacaagtcatgggtacccgaggttatgcagctccagaatatgttgcaacaggtcgcctctctgtaaaggcagatgtctatagctttggtgttgtgctgctcgagttattgactgggagacgggccttagacaaatcgaaaccagcatcagaacagaacctggttgactggacaagaccctacttgggtgacaagcgcaggctgtaccgcatcatggacatgaagctgggcggacagtaccctaagaaaggcgcccacgctatcgcgaccattgccctgcagtgcatccgcagcgaagccaagatgcgaccccagatgtccgaggtcctggagaagctgcagcagctgcaagaccccaagtacaacgtgacctcaccgcaggttgacacccggaggagatcatcgtcgggttcagttcctaggtcgccgatgcggatgcagccttcgccacggcgcctttccgcctcggcttccccattgccggctgcaggctccccgctgccggcttgtaggactgcgcaagtgcactag

SEQ ID NO: 3594 - DNA, 1197 bp, Oryza sativa
atggcctcctccccctgcggcggcttcctcgagaaggccaagccctacttcgccatgatctgcctgcagttcggctacgccggcatgaacgtgatcaccaaggtctccctcaaccacggcatgagccactacgtgctcgtcgtctaccgccacgccttcgccaccatctccatcgcacccttcgccctcctcctcgagaggaaggtgaggcccaagatgacgtggtcggtgttcctccagatcttcgtcctggcactgctcgggcctgtgatcgatcagaacttctactacgccggcctcaagttcaccgggccaaccttcgcatgcgccatgagcaacatcctccccgccatgaccttcgtgatggccgtaatcttcaggatggagaaggttgacctgaagaaggtgaggtgccaggcgaaggtggccgggacgctggtgacggtggccggcgcgatgatgatgacgctgtacaagggcccgctgatgcagatggcgtggacgagccacgtgcaggcgccgcacggccacggcgcggaggcgcccgccgccgccgccgccgtcgacccgtcgggcagggagtggttcctcggctcgctgttcgtcatcatcgccaccctcgcctgggcctcgctcttcatcctgcaggcgcacaccctcaagaagtactcggcgccgctttccctcaccacgctcatctgcttcgtcggcaccctccaggccatcgtcgtcaccttcgccatggagcaccgcccctccgtctgggccatcggcttcgacatgaacctcctcgccgccgcttacgccggcatcgtgacgtcgagcatcgcgtactacgtgcaggggctggtgatccagaagacagggccggtgttcgcatcggcgttcagtccgctgatgatgatcatcgtggccggcatgggctccttcatcctcgccgagaagatatacctcggcggcgtcctcggcgccgtcctgatcgtggtcgggctctactccgtgctctggggcaagcacaaggagacccaggagcaggacgcggccatgatggagcttccagtggcctctaagggaaacgacgccgagttcaccgccgccaccgttgttggagacgacgacgacgcggcggactgcaagaaagcaaatggagtgaaaaagtcgtcatcctccaacgagcaaggagctagtgcagtttga

SEQ ID NO: 3595 - DNA, 1490 bp, Oryza sativa
atggtgatgctagtcgacacgctcgaacgcctcggcatagacagccacttccgtcgcgagatcgcggcgatgttacgccgcgtacaccgccaggaacaggactgcccttccgccgccgccgacgacggcctccacattacttccctccgattccgtctacttcgccagcacggctttggggtaactgcagatgtattcgacaagttcagagacaatagaggcagtttcagagcgagcctaagcagtgacacgaggggcctgctaagcctgtacaacgcggctcacatggccatgcctggcgaggaggcgctggatgacgcgatcgcgttcgcgaggcaccacctaattcagtccgtggaaggcaagctgaagtcgtcgatggccgagcaggtctcccgcgccttcgacatccctctgccacgggcgcccaagcagctagagacgatacgctacatcgccgagtacgagcacgaaccagctttcgacggcgtggcgctggagctagccaaactggactttgagctcgtcaggtctctccacctcagggagctcaaggccctcaccatctggtggaaagacctgtacaatagcgtgaagctaagttatgctagagaccgtatcgtggagaactacttctggacgtgcggcatataccacgaggaggagtactctcgcgcacgtatcatgttcaccaaagtttttggactcatgtctttgatggacgatacttacgacgcccacgccaccttagaggagtgccacaagctcaacaaagctatacagagatgggataagagcgcggtctctattctacccgaatatcttcatgccttctacataaagttactgaacaactttgaagagttagaggattgcttggagccaaccgagaagtaccgcatgtcttacgccaaaactgggtacaagcagttgtcggaatactacctccgtgaggcccaatggtcgagcgacaaatacatgcccagcttcgccgagcatctggacgtgtctgtcatgtcctccggcttcccggagctggccccggtggtgctgttgggcgtgcgcgacggcgacggcgcggcgaccgcggaggcgttcgggtgggcggctgccgtccccgccctggcccgcgccagcggggagctagcccgcttcctcaacgacgtcgcctcctacaggaccgggaggagcggcagggacatggcgagcacggtggagtgctacatggcggagcgcggcgtgggcggggaggaggccgtggcggcggttgccgcgatggcggagcgcgcgtggaggacgatcaaccgggagtgcgtggagatgggtggtcgggctgatcatctgctcccggcggcgcggctggtggtgaacctgacgaggatgctggaggtgatctatctcggtggcagggacgggtacaccttcggcgccgacatcaaagacctcgtcaccaacttcttcctcgcaaacccctcccagctgtttgatta

SEQ ID NO: 3596 - DNA, 1647 bp, Oryza sativa
atgcgcctcccggtgctactcccgctgctgctgctgctgctcgccgcggcagcggcggtggcggcggcggaagcggcgacgctttcggcgaggatggtgcaccggctgtccgacgaggctcggctcgcggcgggcgcgcktggggggcggcgctggccccgtcgcgggagcggggattacttccgcgcgctggtgcggagcgacctccagcggcagaagcggcgggtcggcggcaagtaccagctcctctccctctcccagggcggcagtatcttcccctccggcaacgacttgggctggttatactacacttgggtggacgttgggacgccaaatacttccttcctggtcgcattggatactggaagtgacttgttttgggtgccttgtgattgtatccaatgtgcgccattgtccagctaccatggaagtttgaatggtttattttggcagcaagctgaacatgcctggaatatacaccacaggtgctccgtcatatgtggagcatctattatgcaggatagagatcttgggatttacaagccatctgaatcaactacaagtcggcatctgccctgtagccatgagctttgctcaccggcttcaggttgcacaaacccgaagcagccttgtccatacaatattgactacttttcagaaaatacaaccagctccggtttgctaattgaggatatgttacacttggattctagggagggccatgcacctgtgaatgcttctgtcattataggctgtggtaaaaagcagagtggtagctatttggaaggtattgcaccagatggacttcttggtcttggaatggcagatatctcagtacctagtttccttgcaagagctggattagtacgaaattccttttcaatgtgtttcaagaaagatgattctgggagaattttctttggtgatcaaggagtacctacccaacagtctacaccatttgtcccgatgaatggcaagcttcagacttatgctgttaatgttgacaaatattgtattggacataagtgtacggagggagctggcttccaggcattagtagacactggaacatccttcaccagtcttcccctcgatgcctacaagagtatcactatggagttcgacaaacaaatcaatgcatcaagagcatcttctgatgattattctttcgaatattgctacagcaccggtcctcttgagatgcctgatgttccaactataactctgacttttgctgagaacaagagtttccaggctgttaatcctatacttccatttaatgacagacagggagaatttgctgtcttttgcttagcagtactaccatcacctgaacctgttgggattattgggcagaatttcatggttggctatcacgtagtttttgacagagaaaatatgaagctgggctggtaccgctctgaatgccatgatcttgacaacagcacgacggtgtccttaggtccatcacagcataacagtccagaggaccccctacsgtcaaasgrgcagcagacctctccggctgtcacgccggctgtcgcaggcagggctccgtcctctggcggatcgacgactctgcagaacctacttgctaactctaacatgctgctcttactgactatgtccgtgttcttcatctcatga

SEQ ID NO: 3597 - DNA, 1290 bp, Oryza sativa
atggaggacggttccggmaamgggcggccgccggcaaccgcggcggcktggaayttcgagccgaacggcgcgttgctcgggytgacggcgctgtcggtgcgcggcktgctgggcagggtcaaggccgggatggcggcgggcggcggcggagatggtggtggtggtggtgggcgggcggtgatcccgatgggacacggcgacccgtcggtgttcccgtgcttccggacgacggcggacgccgtggacgccgtggcggcggcgctccggtccggggagcacaactcctactcctcctgcgtcggcctcgagcctgcacggaggtctatcgcgcggtacttatcgcgagacttgccatatgagctatcagctgatgatgtgtacctgacaagtggctgtgctcaagcgattgagatcatctgctctgtcctagctcgccctggtgccaacatcctgtgcccaaggccagggtacctgttccacgaggcacgcgcagtgttcaatggcatggaggtcaggtactttgatcttctcccagagagtggctgggaggttgatcttgatggagtgcaggaacttgctgacaagaacacggttgcaatggtcattatcaatccaggaaatccctgtggcaatgtctacacttctgagcatttggccaaggcaaatgaagtgtatgcacatttgacgtttgggcagaataaatttgtgccgatgggggtgtttggctcagtagctccagttcttacgttaggatcgatatcgaagagatgggttgtgcctggatggcgacttggatggattgtgacgagcgatcctaatggcgtatttcaaaggaccaaggtagtggaaagcatccagagttaccttgatatctcggctgatcctgcaacatttatccagggagcaattccacaactcatagagaacacaaaggaagaattcttcgaaaagaccgtcgatgtcctaaggcagaccgcagatatttgttgggagaagctgaagggcatcagttgcatcacttgcccaagcaaacctgagggttccatgtttgtcatggtgaaactggatctgtcctgcctgcaaggcatcaaagatgacatggacttctgctgccagctagcaaaggaagaattggtgattcttttgccaggatgtgctgttggatacaagaattggctccgaatcaccttcgccatcgaaccgtcttctcttgaagatggtattgataggctcaagtccttctgctcgcgacatagcaagccgaaagttcaccggtctcttgaaacatga

SEQ ID NO: 3598 - DNA, 920 bp, Oryza sativa
atggccacccacttcacgctcaacaccggagcacgcatcccctcggtgggcctcggcacctacaaggccggcaccggcgtcgtcgccgacgtggtctccgccgccgtcaaggcagggtaccggcacatagactgcgcgccgctgtacaagaacgagcaggaggtaattggtggtgctctgaagaagctcttcgatgatggggttgtcaagcgggaagacctcttcatcacctccaagatatggtgcagcgacctcgcacctgaagatgtcccactcgcaatggatagtacactgaaagatctgcagctggattacgttgatctgtatctgattcattggccgtttcagatcaagaaaggcacggagctcagtccagagaacttcgtcaagcctgacatacccagcacctggcgagcgatggagcagctgtacgattcaggcaaagctcgcgcgatcggcgtgagcaatttctcctccaagaagcttggcgatctgctctgcgtcgcccgcgtccctccggccgttgatcaggtcgagtgccacccgggctggcagcaggcgaagctcagagcgttctgccacaccagtggcgttcatctctctgcgtatgctccattgggcaggatgaagggcatcgccgttgattcggtgttgccatcggtagccgagatgctaggaagaactccggctcaggttgctctgcgctggggtcttcagcagggtcagagtgtgcttcccaagagcgtcagtgaggcgaggttgaaggagaacatggatctgtttggttggtctattcctgaggaactgtgtgccaagctctctgaaatcgaacaggcaagtgcatccaacctttcagctgtctcaagtgcagaaaacagtttcacttctgtcttcatatcttatgcaattccggatgaata

SEQ ID NO: 3599 - DNA, 882 bp, Oryza sativa
atggcgaagcacttcgtgctcaacaccggcgccaagatcccctccgtgggcctcggcacctggcagtccgaccccggcgtcgtcggcaacgccgtctacgccgccgtcaaggcggggtatcggcacatcgattgcgccagtgcgtacaacaacgaaaaggaggtagggttggctctgaagaagctatttgaagagggtgtggtcaaacgcgaagatctgtttatcacgtctaagctatggtgtgatcatcatgccccagaggatgtgcctgaggcactagatgctaccttgaatgacttacagcttgagtacctggatctttacctcattcattggccattcagaaccaagaagggatccagcattggcaaacctgaaagctacttaccacctgacatcccatctacctgggcagcaatggagaagttatatgattctggcaaaagtcgtgccattggtgtgagtaacttctcatcgaaaaaattgggtgacctgcttgctgcagcccgtgtacctccagctgttgaccaggtggagtgccatcctggcatactcgccgctaggttcacctggttcaacatttatgaacgggcaatgtccttaarggaacccatcattatctcgattgcagagaagcttggcaaaactcctgcacaagtggcgctgcgctggaacattcagatgggtcacagtgtactcccaaaaagtgtgagtgaagaaaggataaagcagaacttagatgtttatgactggtctattccagaggacttgcttgctaagttctcggagattaagcaggttaggctgctcaggggcaacttcattgtcaatccacagagcgtttacaagacccatgaggagctctgggacagggaaatttag

SEQ ID NO: 3600 - DNA, 936 bp, Oryza sativa
atggcgaagcatttcgtgctcaacaccggcgccaagatcccctcggtggggctcggcacctggcagtccgacccgggcgtcgtcggcgacgccgtctacgccgctgtcaaggcggggtaccggcacatcgattgcgccagaatgtacaaaaatgaaaatgaggtggggatagctctgaagaagctatttgaagaaggtgttgtcaagcgtgaagatttatttatcacatctaagctatggtgtgattgtcatgccccagaggatgtgcctgagtcactagacaaaactctgagtgacttacagcttgagtacctggatctttaccttattcattggccattcagagtcaagaagggctcaggcattagtaacactgaagactacataccacctgacatcccatctacctggggagcaatggagaagctatatgattctggtaaatctcgtgccattggtgtaagtaacttctcatcaaaaaaactgggtgacctgcttgctgtagcctgtgtacctccagctgttgatcaggtagaatgccatcctggttggcagcaaacgaagctacataacttctgccagtcaactggcgttcatctttctgcatactcgcctctaggttcacctggttcaacatggatgaacagtaacgtccttaaggaatccgtcatcatctcaattgcagagaagctcggcaaaactcctgcacaagtggcactgcactggaacattcagatgggtcacagtgtactcccaaaaagtgtgaccgaagaaaggataaagcagaacatagatgtttatgactggtctattccagaggacttgcttgttaagttctctgagattaagcaggttaggcttctcaggggcgacgtcattgttaatccccacagcgtttataagacccatgaggagctctgggacggcgaaatttag

SEQ ID NO: 3601 - DNA, 1812 bp, Oryza sativa
atggatgcatttcgggagagcaagtcggatgataggagattctacatattttcccccacaaagacacttcatttgaagacagattcaaaagaagaccgtgttgcctggatcgaggccttgatcttggcgaggagtttttattcgctaagatcactcagcggaaggataacttttgtgcaaagcgatgtttcggtctcgactgccaggcttcggaatcggatgcagcaagagggactgaatgaaagtcttatacaagagtgtgagcagattgtgcttacggagttctccagctttcgcaaacaactgaagctgtgctacgaggaccagctaagcttgtttggatcctgtaggcaccattttgaggaaggcaaagatgcaagtataatacagggggcgttgacaagaaatgacttttccagttctcgacatggaaattttagcgaatacagcactacagaatctgatgaatttgagaagcaagatggtggtgacttgacttgtgaagatgagtctactttctttgatgctgcagactacttcattgaaccaaacgacagatcttcagcaatgttaagctcaaccagttgtggtgagggacttttggatatccaaatggaagattctagtcacttattaccacaaatcaaacggcggagtaaactaccagagcctacagagaaagagagaggcatcagcctttggtcaattattaaagatagtgtcggcaaggatttgacacgagtatgccttccagtttactttaatgaaccactctcatccctccaaaagggctttgaagatttagaatattcacaccttttggatcaagcttatcaatacggaaagatgggaaacagtctcatgagaattctcaaagtagctgcatttgcagtctctggctatgcttcatctgtcgcaagaccttgcaaaccattcaacccgctgctaggagagacttatgaagccgatttccctgaaagaggggtccgtttctttgcagaaaaggttagtcatcaccccatgctgattgcctgccactgtgaaggcaagggctggaaattctggggcgacagcaatctcaaatccaagttttgggggcagtcaattcaagtcgatccgattggtgttctgacagtggaattcgatgacggtgaaatcttccaatggagtaaggtgacaacaactattcataatctcatccttgggaagctgtactgcagccatcatggaaccatgcacataaaagggaatcgccagtattcatgtaaactcaagttcaaagagccatcgcttcttgatcgcaatcctcacctggtacaaggctttgtagaggatgatgatgggaacaaaccttcgtttttgataggaaaatgggatgaaaatatgtattatagtaatttagatacttccaaggtcaagagcgttgatcaattgaaaggtgccgtacttctgtgggaaaagaacaaaccttctcctaatccaacgcgatacaatctatcgtcgttcgctatcacattgaacgaactgtctcctgatcttcaggacaaactccctcctactgattcacggctaaggccagaccagcggcatctagagaacggtgaatatgagaaggcaaacgcggagaagctgaggttggaacgacgacaaagaatgtcgagtaagcttcaagacaatggctggaagccgagatggttccagaaggatggcgaagacgggacatatcgcttcaaaggcggttactgggaagcaagggagcatggacaatgggatgactgccttgacatatttggggagttttcagagacatga

SEQ ID NO: 3602 - DNA, 2445 bp, Oryza sativa
atggaggacgcgtggaggaaggcgaagagggcgctggggctcggcctgtgcgtgcacgtgcccgaggcsgaggagggggagagggaggactgctcgagcgagcggcggaggcggctgccggcggcggcgagcggcgcgcggtgccggggcgaggccgcggtgacggtggggccggagtcggtgccggcgccgtcggacgttccggtgccgctgccgctccccggcgtggtgcggaggtccaagtcggggagcagccgatcctcctctaagaggaaatgtgcaatatgctttgactccatgcggcatgggaatggtcaagccctattcacagctgaatgttctcatatgttccattttcactgcatctcatctaatgtgaaacatgggaattatttctgcccaatttgtcgggcaaagtggaaagagatacccttcaatcgatcgctatcttctaacattccgcatggaagaattggagttagccgagctcgattgacccaacaagatgccaatatggctcttctccaccaagttccaaaccatcatcagcgagttcgtcgcccacatacttctgagccagcagacttcaatgatgatgaacctttgcagcagccagaagtttttgacaatcttaatgttcgatctactaagactgcagagataaacacatatccagaattctcaaccataccgcagtcctcatctaaagatgattttgctattctgatccatctgaaggctcctagtgctaacccagaccagggcacaggtaaattggcgaatgaaagctcagctggatcttcaagaaaccgtgctccggttgatctcgttactgtgcttgatgttagtggcagcatggcaggcaccaaactagcgctcctaaagcgagcaatgggttttgttgttcagcaccttggaccaagcgatcgtctttctgttattgctttctcatctagtgccagaagactgttccaccttcagcgaatatcacatcatggcaggcagcaggcattgcaggcaattaactcacttggtgctagcggcggtacaaacattgctgatgcactgaagaaagctatgaaggtgattgaagaccgcagttacaagaattcagtgtgcagcatcattcttctgtcggacggccaagatacatacaacatttcctcaagtgttcagggggcttcaccagattacaagtcacttgtcccatcttccattataaatgatgctcgccatacggtgcctcttcatgccttcggatttggagcagaccatgactcggattccttgcactcaattgctcaagcttctggtggcaccttttcctttatcgaggatgaaggtgtaatgcaagatgcatttgctcaatgcattggtgggcttcttagcattgtcatccaagagatgcgagttagcatggaatgtgttcatcctggtgttcaactttcttccatcaaatctggtagctacccaagtaaggtggcaagagatggacgaaacggttccgtcgacattggtcacctgtatgctgatgaggagagagacatcttactgtccgtgaacatcccacaatctcgtcatcagacctcagcactgaaggtttcttgtgcctacagagatccggtgacaggtgagacaatcaagattcaaggtgacgaggtgaagatcaaccggccgacaacatccaacatatctgagcatgtgtccattgaggttgaccgcgagaggaaccgcatacaagctgctgaatccatagagtgtgcaagggctgctgccgagaagggtgctctctctgaggccgtggccattcttgaggattgccggaggacactgtcacagtcattcgcaagccggagcggtgaccgtctgtcgctgtccctcgacgcggagctgcgagagatgcaggagaggatggcaaatcgccagctctacgagtcttcagggagggcttacatgctgtccgggctgagctcacactcgtggcagagggcaacagcacgaggtgactcgacggacagcagcaccgtcatctactcctaccagacgccatccatgctaaaaacaaaaactttccagctaagtcaacatcggtcaaataagaagacaatcgagatggaagcgcaaaaacaaaagaagctcgcgacgttcatcgtgccggcggagatatacccggcgaggctgcatgcgacgagccacgggatatcggcggcgtcggggaaggtgggcgcgatcatcgggtcgttcgggttcctgtacctggcgcagagccctgacccggccaaggcggcggcgcacggctacccgccaagcatcggcgtccgcaactcgctgttcacactcgccggctgcagcttgctcggcttcctcctcaccttcctggtgcctgagcccaagggcaagtcgctcgaggagatgtcacgcgagaacgaggtcggccagccatga

SEQ ID NO: 3603 - DNA, 1940 bp, Oryza sativa
atggcgggcaacaagggagagggccctgcgatcggcatcgacctcggcacgacctactcgtgcgtcggcgtgtggcagcatgacagggtggagatcatcgccaacgaccagggcaaccgcaccacgccgtcgtacgtggccttcaccgacaccgagaggctcatcggcgacgccgccaagaaccaggtcgccatgaaccccaccaacaccgtctttgatgcaaagcggctgatcgggcggcgcttctcggacccgtcggtgcaggcggacatgaagatgtggccgttcaaggtggtgcctgggccagccgacaagccgatgatcgtggtgacgtacaagggcgaggagaagaagttctcggcggaggagatctcgtccatggtgctcaccaagatgaaggagatcgccgaggccttcctcagcaccaccatcaagaacgccgtcatcaccgtcccggcctacttcaacgactcccaacgccaggccaccaaggacgccggcgtcatctccggactcaacgtcatgcgcatcatcaacgagcccaccgccgccgccatcgcctacggcctcgacaagaaggccgccagcaccggcgagaagaatgtcctcatcttcgacctcggcggcggcaccttcgacgtctccatcctcaccatcgaggagggcatcttcgaggtcaaggccaccgccggcgacacccacctgggaggcgaggacttcgacaaccggatggtgaaccacttcgtgcaggagttcaagaggaagcacaagaaggacatcaccggcaacccgagggcgctccggcggctgaggacggcgtgcgagagggcgaagaggacgctgtcctccaccgcccagaccaccatcgagatcgactcgctctacgagggcatcgactttctacgccaccatcacccgcgcccgcttcgaggagctcaacatggacctcttccgccgtgcctccgcgacgccaagatggacaaggcccagatccacgatgtcgtcctcgtcggaggctccacccgtatccccaaggtgcagcagctcctgcaggacttcttcaacgggaaggagctctgcaagagcatcaaccccgacgaggccgtggcgtacggcgccgccgtccaggccgccatcctcagcggcgagggcaaccagagggtgcaggacctgctcctcctcgacgtcacgccgctctcgctcgggttggagacggccgggggtgtcatgaccgtgctgatcccgaggaacaccaccatcccaaccaagaaggagcaggtcttctccacctactccgacaaccagcccggcgtgctcatccaggtgtacgagggcgagaggacgaggaccaaggacaacaacctgctcggcaagttcgagctcaccggcatcccgccggcgccgaggggcgtgccccagatcaacgtgacgttcgacatcgacgcgaacggcatcctgaacgtgtcggcggaggacaagacgacggggaagaagaacaagatcaccatcaccaacgacaaggggcggctgagcaaggaggagatcgagcggatggtgcaggaggccgagaagtacaaggccgaggacgagcaggtgcggcacaaggtggaggcccgcaacgcgctggagaactacgcgtacaacatgcgcaacacggtgcgcgacgagaagatcgcctccaagctccccgccgacgacaagaagaagatcgaggacgccatcgaggatgccatcaagtggctcgacggcaaccagctcgccgaggccgacgagttcgaggacaagatgaaggagctcgagagcctctgcaatccgatcatctcaaagatgtaccagggcggcgccggtggtccggcgggcatggacgaagacgcccccaacggcagtgccggcaccggcggtggcagcggcgctggccccaagatcgaggaagtggacta

SEQ ID NO: 3604 - DNA, 1545 bp, Oryza sativa
  misc_feature (1)...(1545): n = A,T,C or G
atggacgagccaaccgtggaggagccactgctcgccatccgacgcggcggagatggcgaggacgaagccatggcgtcgacggcggcggcggccgcggcggaggtgaagaggttgctgcgtctcgccgggcctctgatggccagcttcgtgctgcggaactcggtccagatggtgtccgtcatgttcgtcggccacctcggcgagctccagctcgccggctcctccctcgccgcgtcgctcgccaacgtcaccggcttcagctttctcttcggcatgtcgagcgcgctggacacgctgtgcgggcaggcgtacggcgcggggcagcaccggctgctcggcgtctacgcgcagcgcgccatgctggtgctcgcggcggccgccgtccccatcgcgctcgtctgggccagcgccggcgagatcctcctcctcttcgggcaggacccggccatcgccgccgaggccggcgcgtacgcgcggtggatgatcccgtcgctcgcggcctacgtgccgctcgcctgcgccctccggttcctgcaggcgcagggcatcgtcgtgccggtgatggcgagctccggcktggcggcggtcggccacgtcgccgtgtgctgggccctggtgcacaaggccggcatggggagcaagggcnccgcgctgagcggcgccttcacgtactggaccaacctcgccgtcctcgctctctacgtgcggctgtccggcgcctgcgagacgacgtggaccgggttctccatagacgccttccgcgagctccgccggttcaccgagctcgccgtgccgtccgccatgatggtctgcttggagtggtggtcgtttgagatacttgtgctgctctcgggcattctgccgaatcctcagcttgaaacttctgttctgtcaatctgcttgagcacttcttctctcctgttcatggtgccacgtggcattggctcatctttaagcacgcgcgtctcgaacgaactaggtggcgggcatcctcgagcagcaaggatggcagcgcgagtcgccatagccatgaccgtgcttgtatgcctcgtgctagtgatagccatgatttttctgcgcaatgtctggggaaatgcctatagcagcgaggaggaagtggtggcatatattgcaagtatgctccccgtccttgcggtctccttcttcatagatggcatcaatggtgctctttcaggagttttgacaggatgtggtaagcagaacattggcgctcatgtgaatcttgctgcgttttacttggttggtattccgacggctgtgctgcttgcatttgtcctccatctcaatggagagggtctttggcttggccttgtgtgtggcagtatcagtaaagtagggatgctcctcttcatcacactgcgtacagattggggaaaagaagtgcgaaaaccttcaccctacaaacacttcggctatcatggcaaaagaaagggtcttcagttcaagtcttccaactcgatgaagaattcgagaaatgtkggtgtagtattctccaatgaagatgtattcaacgtggttctttaa

SEQ ID NO: 3605 - DNA, 590 bp, Oryza sativa
atggcggcggcggagaagacgaagcccgttctttacagcgagtggatgagctcgtgctcctacagggtccggatcgccctcaacctcaaaggtattgattatgagtacagggcagtgacacggggtgatccagattatgggaagatcaatccaattaagtatgtgccagcattagtagatggggatttcactatttctgattctctagcaatcatattgtatcttgaagacaaatatccccagcatcctcttttacctcaagatctaaaaaagaaagctcttaacatgcagggtttagctgatggcaaaatgagcgccaacgagagccttcagatagttcagcattacactgacaagggatttagagcaattgaaaaacttctggaaggatgtcgcagtaaatatgctactggagatgaagtccaattggcggatgtgtttctagcgccccagattcacgcaggaataacacgtttccaaattgatatgtcaaaatatccaattctggcgagattttacaaggcctatatggaacttccagcatttcaagctgctgtccctgaaaaccaaccagatgcaccttcatcctg

SEQ ID NO: 3606 - DNA, 639 bp, Oryza sativa
atggcgtcgtcaaagccaatcctgtacggtgcctggatcagctcctgctctcaccgaatccggatcgttctcaatctcaaaggtgtggattatgagtacaagtcagtcaatcctcgaacagatccagactatgagaaaatcaatccaattaagtacataccagcattagtagatggagacctagttgtttctgactctctcgccattgcattgtatcttgaagataaataccctcaacatgctctcctacctaaggatctcaaaaagaaagctcttaatcttcagattgcaaacatagtttgttcaagcatccaacctctccaaggttatgctgtaattggtttgcatgagggtaagctaagccccgatgagagtcttcagatagttcagcattatattgataagggcttcaaagcaatcgaaaagcttttagaaggatccaactttaaatatgctactggggacgaagttcaattgggggatgtgtttctagcaccacagatccatgctggcataaatcgcttccaaattgatatcacaaagtacccaaatttggcaagactccatgacacatacatggaaattcctgcatttcaggcagcacttccaaagaatcagccagatgcaccttcatgctaa

SEQ ID NO: 3607 - DNA, 2280 bp, Oryza sativa
atgggggtttctccatggattatcatcttcttgttgattgttcttgtgcaagcttttgtcgcttcggccgatacgaacgcacaggacacttctggacttaacgggcttgcaggtagctggggcagcgcaccatcgaattgggctggcaacgatccatgtggagacaaatggattgggataatttgcaccgggaaccgggtcacatccatgttgaagactgtcaagtttcggactgtccgggacgctttccggggacattcagtccttatcagaattgcagtacctggacttatcctacaacaagaacttgaatggcccccttccttcaaccattggaaccttgagcaagctccaaaacttaattcttgtcggctgcggctttacagatcattgaactccaacaagttcactggtagcataccgccatcgcttggcggcctctcaaagctatattggtttgatctggctgacaatcagctcactggaggacttccaatatccaatgcgacaagtcctggtctggacaatctcacaagtactaagcacttccattttgggataaaccagctctctggcagcatacctagccagattttcaactcaaatatgaagctgatacatctgcttcttgacaacaacaaattctccggtagcatcccttctaccttaggccttcttaatacactggaagttctgcgtttcgataacaatgcgcagttgaccggaccggttcctaccaacctcaagaacctaaccaagcttgcagaattccatctagcaaacagcaatcttactggtccattgccagacctaactggaatgagctcactcagctttgtgtacctagaaaatctgcgcatcagtggggaggaggcttcggggcaaccgtctgaatggcaccctaaatatagcagacttcagcagtcagctccaactagtcgatttgcgggacaactttatcacagcactaactgtaggaacacaatacaagaagactctcatgctctcaggaaatccatattgcaaccaagtgaacgacgacgtgcactgcaaagccaccggacaatcgaacccggcattgccaccatacaagactacctccaactgccctgccctgcctcccacatgcctctcaacccagcagctgagccaacctgcatttgctctgtgccatacagaggcacactcttcttcagatcaccaggtttttcagacctgggcaacagctcatacttcattcagctggaggggacaatgaaagccaagttcttgaacctcagtctcccggtcgattcaattgcgatccacgacccgtttgtcgacaccaacaacaacttggagatgagcttggaggtgtaccccagtggcaaggatcagtttagtgagcaagacatttctggcattggtttcatcctgagtaaccagacatataagcctccttctaactttggcccatactatttccttggacagcacctactcctttgcctaatgggggcgttgcaaacttcaaaatcgaacacaaaccacatcccgcttatcgtcggtgcttcggttggaggtgcagctgtaattgcagcattgcttgcactcacaatctgcattgctagaaggaagagaagtccaaagcagactgaagataggagccagtcttatgtttcctgggacatcaagagcaccagcactagcactgccccgcaggtgcgaggtgcgaggatgttctccttcgacgagctgaagaaggtcaccaacaacttctcggaggccaatgacatcggcaccggaggctacgggaaggtttacaggggaacacttcctactggtcagctggttgccgtgaagagatcccagcaaggctccctgcagggcaacctcgagttcaggactgagatcgagctcctgtccagggttcatcacaagaatgtcgtcagcctagtcggattctgcttcgaccagggcgagcagatgcttgtctacgagtatgtccccaatggcaccctcaaggagagcctcacagggaaatctggtgtgaggctggactggaagcggcggctccgggttgtcctcggtgcggcgaagggtatcgcctacctgcatgagctcgctgaccctccgatcatccaccgtgacatcaagtcgagcaatgttctcctcgatgagcggctcaacgccaaggtctccgacttcggcctgtccaagcttctcggcgaagacggtcgtggccagatcaccacccaagtcaagggcacaatgttttacacatatcacaaaagtttttga

SEQ ID NO: 3608 - DNA, 2442 bp, Oryza sativa
atggcggcgagcggaggcagctgcccggcggcgatgaaggcgacgtcgcagggggcgttccagaaggagaacccgctggacttygcgctgccgctcatcatcctccagatctgcctcgtcgtcgtcgtcacccgcgtcctcgcctacctcctccgccccctccgccagccccgcgtcatcgccgagatcatcaaattgcttaagcaagaaaaagagtacagatttagtgctaaatttatcacaaaactacaatttaagggtggtatccttcttgggccgtcagcgctgggccggagcagcaagttcttgcacaacgtgttcccgccaaagagcatgaccgtcctggacacgctggccaacctcggcctcctcttcttcctcttcctcgtcggcctcgagctcgacatctccgccatccgccgcaccggcaagaaggccctcgccatcgccctcgccggcatctccgcccccttcgcgcttcggcatcggmacctccttsgcgcgccgttcctggtgttcatgggcgtcgcgctctccatcaccgcgttcccggtgctcgcccgcatcctcgccgagctcaagctcctgaccaccgacctcggccgcatggccatgtcagccgcggcggtcaacgacgtcgccgcgtggatcctgctggcgctcgccgtcgcgctctccggctccggctcgccgatcatctcgctctgggtgctcctcaccgccgccggcttcgtcgccgccatcttcctgttcctccgccccgcgctggcgtggatggcgcggcggtcaccggagggggagcccgtcaaggagctgtacatttgtgccaccctcgccatcgtcctcgccgccggcttcgtcaccgacaccatcggcatccatgcgctgtttggtgcgttcctcgtcggcatcgccgtccccaaggacgggccgttcgccggcgtgctcatcgagaaggtggaggacctcatctccggcctcttcctgccactctacttcgtctccagtggcctcaagaccaatgtggccaccatacgtggagccaagtcatgggggttgcttgtgctcgtcatcgtcaatgcctgccttggcaagatcggcggcacggtgatcacgtcgttgctcgtcaagatccctgtccgggaggccgtcacgctggggttcctgatgaacaccaaggggctcgtcgagctcatcgtcctcaacatcggcaaggatcgcaaggtgctcaacgacgaggcgttcgccatcatggtgctcatggcgctgttcaccacgttcatcacgacgccgatcgtcatggccatctacaagccggcgcggccgacggcgccgtacaagcgccgcaccgtggacggcggcgaggccgacggcgagctgcgcgtgctggcctgcttccacaccaaccgcaacatcccgacgctgctcaacctcgtcgagtcgtcgcggggcaccgggcgcggccgcctcgtgatgtacgccatgcacctcgtggagctctcggagcggtcgtcggcgatcaccctggtgcagcgcgcccgccgcaacggcatgccgttcttcaactccggcgacaaggccgagcagatggtggtggcgttcgaggcgttccagcagctgagctcggtgcgggtgcgccccatgacggccatctccgacctggacaccatccaccgcgacgtcatcgacagcgccaccgccaagcgcgccgccatcgtcgtcatgccgtaccacaagatgctccagcacgacggcacgttccagtccctcggctccgcgtaccacgccatcaacaagcgcgtcctccgcgaggcgccctgctccgtcgccgtcctcgtcgaccgcggcctcggcggccacgcccaggtgtccgccaagaacgtggccttctccgtggcggcgctcttcttcggcgggcccgacgaccgcgaggccctggcgtacgcgacgcggatggcggagcaccctggtgtcgccgtgacgctggagcggttcaggccgagtcgcgcgcagcccgacgaggaggacgccgccgacgaggcggcggtggaggcgttcaagtcgaaggtgggcatggtgaaggacgggtcggtgcggttcgacgagcggccggcgcagagcaaggcggaggtgatggaggcgatcaactcgctgtccatgttcagcgtgttcgtggtggggaggatgccgccgacggcgccgctggtggagaagcccgacgagctgggccccgtggggagctacctggcgtcgccggagttcaggacgtcggcgtcggtgctggtcgtcaagaggtacgacccggcggcgaacccggcgagcaagaggtacgaccccaaggcgaggccacccgccgcgacggaggaggacgccctcgacgagctcaccggcgccgccgttgtcccggtggcgcattcaccgatgaaccacgacattgtatga

SEQ ID NO: 3609 - DNA, 2094 bp, Oryza sativa
atgtcacgctccctcgccgccgccggcgatgtcggcgccgcccgcgccgccccatccccagccggaggagctggaggtggcggaggaaccccccgccgcggcgggaggagtggggaacgacaaggtgctcgcggcggcgcagcacatcgtgaagtcgctggccacgtcgaagaacgccgcggacgacatgatccgcatcctctccggcttcgaccaccgcttctcctccatcaccgccgacctcttcccctcgcccttgccgtcgtcgggcgccgggcccacccgcctccgcctccgccgccgcggggggcgttcgaggccgcggaraggctcatccggcaktgggacgcgacctcggagctgctggtgttcgagggccccgagggggacttcgccgactacctcgaggcggtcgacgtcgccgtcgaccagctgctctccggggttggggccgccgccgccgacgccgaggccgaggcggcgggcgtcgtggtgcagctcgcgatggcgcggatggaggaggagctccgccacctcatggtccgccacgcggtgccgctggacgcgagcgggctcttctgctcgctgcgccgcctctccctcgagtccatggacgacctcgacacctcctccgagttcgatcccatcaccccgcacagcctggagggcggcccggacaccgctcgcagcgccagcctcgtggggaaccccttcgacgaccaggtgttcgacctggtgcgccctgaggccattgacgatctgcgctccatcgctcaaaggatggaccgcgcggggtatgccagtgagctcgagcaggtctactgtggcgtccgacgtgacctgctcgacgagtgcctcgcggtgctcggggtcgaacgcctcagcatcgatgaagtgcagcgcatggagtggaagcttctgaatgacaagatgaagaaatgggtgcatggggtcaagacggtcgtgcgttccctgctgaccggtgagcgccggatctgtgatcaggtgctcgccgtgtctgatgagctgcgtgatgagtgttttgttgaatctaccaagggttgcataatgcagattcttaactttggtgatgctgtggcggtgtgctctcgctcgccggagaagctctcccggattcttgacatgtatgaggcacttgctgaggtgatccctgaactgaaggagctgttctttgggaattctgggaatgatgtaatctgtgatttggagggggttcttgaaaggcttggggacgcagtgaagggcacacttctcgagtttgggaaagttcttcagcaggagtcatcacggcggcctatgatggctggtgagatccacccaatgacacgttacgtgatgaactatcttcggttgttggttgtttacagtgatacgcttgacaaactcttgggtgacgattctgctggagatgttgatcatagtgatacgcatagaggtggtgatgatgaggaggagtatttggagagcttgtccccacttggacgacatttagtgaagctgatatcttatctggaggcaaatttggaggaaaaatcaaaactgtacgaggatggtgcactgcaatgcatattttccatgaataatatactctatattgtccaaaaggtgaaggactctgaacttgggaggattttaggtgatcactggatacggaggcgccgtgggaagattcggcaaaattcaaagaactaccttaggatatcatggactaaggttttgtcttttctcaaggatgatgcacacggcggcagaagcggaagtggaagtggtagtgggaatagctctaggatcaaggagaaattcaagaacttcaacttggcctttgatgagatatacaggagtcaaacgctctggaaggtaccagatcctcagcttcgtgaagagctcaagatatctatctctgaaaatgtgataccagcataccgtgcttttctgggaagatatggtagtctagtggatagcggaaggaattcaggtagatacatcaaatacaccccagaggacttggagaatcagctgtctgatctatttgaaggttcactagggcctgccaaccattctaggagaagatag

SEQ ID NO: 3610 - DNA, 1563 bp, Oryza sativa
atggcgagggcggaggcggcggcggcgctggagttcacgccgacgtggatcgtcgcggcgatctgctccctcatcgtgctcatctccctcgccgccgagaggtgcctccattacctcggcaagacgctcaagagaaagaaccagaaggcgctattcgaggctctcctcaaggtgaaagaagagctgatgcttctggggttcatctccctgctgctgacggtgtcccaagggattcttcagaagacatgcgttcctcccaagtggaccaactacttgcttccatgtcgaaagatggaggaccagtccaaacaacgcggcccgtcagaagctcatttcgttgctgccggagttcttggccacctcggtcggcggctgcttgccgatggtggaacaggggccgaccattgccagaacaagggaaaggttcctttgctgtcacttgaagcactccatcagttgcatattttcatttttgttctggccatcacacatgtgattttcagtgctctgactatgcttcttggaggagcgaaggcatatgattcatattcatcatggttatatttttttcaaaattttattgagcagattcatcaatggaaacactgggaaaatgacatccagaaagatgttgctcaaaatgcgcccaagaaggtgacccatgtgcatcaatttgaatttatcagggaacgctttaagggtattggcaaagattccataatactaagctggctgcattcttttgttaagcagttttctgggtcagttactaaatcagactacataacaatgcgacttggatttatccagacacattgccgtgcgaacccaaagttcgatttccacagatacatggtacgagctttggaagcagattttaagaaagtggttggtataagctggtacttgtggatattcgttatgatattcctgctgctgaatgttaatggttggcacacatacttttggatctccttcgttccccttctacttttgctggccgttggcaccaagctagaacatgtcataacccaactagcccatgaggttgccgagaagcactctgcaattgagggcgacttggttgtgaatccatcagacgagcacttttggtttggacggccgaaggtgatcctatacctgatccattttatcctcttccaaaacgcgttcgagatcgcgttcttcttctggattctgaccacctacggtttcaactcctgcatcatggaccacgtcccttttatcctgacaaggcttatcatcggggccatcgttcaaatcctctgcagctacagtaccttgcctatatatgcaattgtcacacagatgggctcctttttcaagaaggagatcttcgacgagcatgtgcagcagggccttgttggttgggcgcagaaggccaagaagaggaaagggttgaaggagagcaacggcgccatggctggagctggatcaacaaatgggtcatcacagccatcttccattctacaaatggtgaggcgagccgccgctagcgaggaaggcagcagcaatggcggtgacatgcgcactaatcagtag

SEQ ID NO: 3611 - DNA, 1524 bp, Oryza sativa
atggcggcggcgggcggtgctgtgctgctgctggtgctggcgaccgcgacttcggtgacagggcagcatgactacagcgacgcgctccacaagagcatcctgttcttcgagggccagcgctccggccgcctgccacccgaccagcgcctccgctggcgccgtgactccgccctcaacgacggcgccaccgccggcgtggacctgacgggagggtactacgacgccggcgacaacgtgaagttcgggttcccgatggcgttcacggcgacgctcatgtcgtgggggctcgatcgacttcgggcggagcttcggggcgcacgcggcggaggcgagggaggcggtgcggcgacggcgacgcccaacacggtgtacgtccaggtcggcgacgccttccgcgaccactcctgctgggagcgccccgaggacatggacaccccgcgcaccgtctacaaggtcgacccctcccaccccggctccgacgtcgccgccgagaccgccgccgccctcgccgccgcctccatcgtcttccgcgacgccgaccccgactactccaaccgcctcctcgaccgcgccatccaggtgttcgagttcgcggacaagtacaggggcccatacagcagcagcctgcacgcggccgtgtgcccctgctactgcgactactccggctacaaggacgagttgctgtggggcgcggcgtggctgcacaaggcgtcgcggcgccgggagtaccgcgactacatcaagcggaacgaggtggtgctcggcgccagcgaggccatcaacgagttcggctgggacaacaagcacgccggcatcaacgtcctcatctccaagttcacgccaaaattgaaagtttggttgaaattgaaacgatgtgatggaaaaattgaggtcctgatggggaaggacgagtatttccagtcgttccgcgtgaacgccgacaacttcatctgcaccctcctccccggcatctctaatcatccccagatccagtactccccaggtgggctgctgttcaaggtgggcaacagcaacatgcagcacgtgacgtcgctgtcgttcctcctcctcgcatactccaactatctcagccacgccaacgtccgcgtcccctgcggcacctcctccgcctcccccgtccagctccgacgcgtcgccaagcgccaggtggactacatcctgggcgacaacccgctgcggatgtcgtacatggtgggttacgggtcgaggtacccgctgcggatccaccaccgggggagctcgctgccgtcggtggcggcgcacccggcgcagatcgggtgcaaggccggggcgacctactacgccagcgcggcgcccaacccgaacctcctggtgggcgccgtggtgggcgggcccagcaacaccagcgacgcgttccccgacgcgcgggccgtgttccagcagtccgagcccaccacgtacatcaacgccccgctcctcggcctcctcgcctacttctcggcccaccccaacctggcccagtccgatctcctctacgactga

SEQ ID NO: 3612 - DNA, 942 bp, Oryza sativa
atggcgctctcggcgttcggcagcgtcgccgcggggctcgtggcagtgccggtcactgtgttcggcactggcatcgacgaagccgtgctcgccaaatcattcaagaccgatgtgcccacaatccagaagctcaaggtgaacctgaatgtgcgagcgctgctgggggacgaggcggtgtacgaggccgccgcggcggaggccttcccggagcacaacaaggcgcacctcgtggccctcgagctccctgaccgcagcggtgatataattatcacaacttatggggagcttgacaagaacaattatctggatcctaggactgctcaagttgctacagtggaccatattaaacagaaatgtacaaaattgaggccagctgctgatgaggagcttccttcagcatacattgaagatttcaggagtgccctggatgttgaattatccaaatatgttggtgaagcttatccaaaaggggtgtgtgctgtttattgtaccagcggaaaagatatagagggaccaggagttgattttcgttttgcagcagttatttctgctgctaaacgcagcccacaaaacttttgcaacggcaattggcgctcaatttggactctggaattcatagatggattacagcttgtcgaaattaaagggaaaatacaggtaggtgctcattattttgaagagggaaatgtgcagctggatactaacatcgattgcaaggattccaccatattgcaggtttacgtgctaagttcaattctactgttcaatatattttggagaaaattttctcctgctttggaatcatacatgaatttgtctgatgcaaccttcaaggatcttcgaaggaaacttcccgttactcgtactcttttcccatggcacaacacattagccctcagccttacaagagacctcaccaaagaactggctataggaaaatga

SEQ ID NO: 3613 - DNA, 675 bp, Oryza sativa
atgggtggcatccttggacgccatgacaccatgaagaggagctctcacggctcgaagctcgagacgaagatggtggagtccatgcagcagagagcgtcgcacgggacttcactcaagtcgttcgatagcatcatcatgaagtttccgaaaatcgatgagagcttgaggaaatgcaagatcatcttcgagcaattcgatgaagattccaatggcgaaatagataaacaagaattgaagcattgtttccaaaagttggaaatttcattcacagaggaggagataaatgacctctttgaagcttgtgatataaatgaagacatgggcatgaagttcaatgagttcatcgtctttctgtgcctcatttatctgctcaacgaaccagctgtgtcagaagcaaagattaagatgggattaggaaatcttgaggcaacttttgagaccttggttgatgcatttgtttttttggataagaacaaagatggatatgtcagtaaggaagagatggttcaatcaatgaatgagactgcaacaggggaacgctcttctgggcgtatagccatgaaaagatttgaggaaatggactgggacaagaatggaatggtgaccttcaaagaatttctgtttgcattcactcgctgggttgggattgacgaaaatgaggacgacaatgaatga

SEQ ID NO: 3614 - DNA, 573 bp, Oryza sativa
atggcagcatcagccagagctctcctcgtcgtggccgtggcggcggcggcggcggtgctcgcgacgacggcgatgggcgccaccacctacacggtgggagcaccggccgggtcgtgggacacgcgcaccaactacgcgcagtgggcgtccgccgccaccttccgcgccggtgaccggctcgtgttcaggtactcgccggcggcgcacgacgtcgtggaggtgaccaaggccggctacgacgcctgctcggcggcgagccccatcgccaccttcaactccggcgatgacaccgtcccgctcgccgccgttggcacgcggtacttcatctgcggcttccctggacattgcgccgccgggatgaagctcgccgtcaaggtcgaggccgccgccgccgcccctggcggtagtagcaccacgccgtcgccgtcgccgtcgccggcggcgttgccgccggtgaacggtggccggccggtgacgccatcgagctcggcgagcaagtcgggtggtgttgttgagtctcttgttggtctgggcgttggcgccatggccgctggtctcatggtcttttattag

SEQ ID NO: 3615 - DNA, 777 bp, Oryza sativa
atggagccctccatctcgcgtcgacgacgtatcgacatcgctctcgtgtcgctgctgctgctcgccgccgccgccgccgccgtcgacgcggcgaccatcaccatggtgaaccgctgctcgtacacggtgtggccgggcgcgctcccgggcggcggcgcccggctcgacccggggcagtcgtggtcgatcagcgtygccgccggcamaccggccgccaggatctggccgcgcamcggctgctccttcgacggcgccggccgcggccgctgcgccacgggcgactgcgccggcgcgctgtcctgcgccgtctccggcgagccgcccaccacgctggccgagtacacgctcggccgccccggcgccggcggcgacgacttcctcgacctgtcgctcatcgacgggttcaacgtgccggtgagcttccagccggcgaacggcggtggcgcccggtgcagcaaggggcgcgggccgagctgcgccgtggacatcacggcgaggtgcctccccgagctccgtgtccccggcggctgcgccagcgcgtgcggcaagttcggcggcgacacctactgctgccggggacggttcgagcacgtgtgcccgccgacgagctactccatgttcttcaaggggctctgccccgacgcctacagctacgccaaggacgaccagaccagcaccttcacctgccccgctggcaccaactaccgcgtcgacttctgcccgccgacgagcggcgtgacggccggtgacgaggacgacgagatcgcctctgcttaa

SEQ ID NO: 3616 - DNA, 1239 bp, Oryza sativa
atggcaccgcgcaacaggtcttcagctagaaggcctctctggattgtcatcttgattgcttttgtctgtgcagtaggcattggagcctatctttatacaccccagcattacacaccttgttacttggtgtcatcaaattcctgtagttctcggcctcctccagaacctgctagggtttacactgatgatgagattgctgctcgtattgtcataagagatatcattttggcacagccagttcagtcaaagaatccaaaaattgctttcatgttcttgacacccagttcattgccattcgagaagctttgggaaaagttcttcatggggcatgaagacagatataccatatatgtacatgcatcaagagaaaggcctgttcacgctagtccgatatttaatggcagagatattcgaagtgaaaaggtagtctggggcacaatttcaatgattgatgcagagaggaggcttttggctaatgcactgcaagatcctgataaccagcattttgtcttgctctctgagagctgtgtaccacttcataactttgattatgtatatagctatcttatggaaacaaatatcagctttgttgactgttttgacgatcctggtccacatggagcaggcagatattctgatcatatgctacctgaaattgttaagagagattggagaaaaggtgcacagtggttcacagtgaaacgtcagcatgcagttcttattctttccgatttcctttactatgcaaagttcaagcggtactgtaagctctttactgatcttgtgattgcacttttgcagccgggaaacgaatggcataactgctattctgatgaacactatttgccaaccctctttaatttgtgtttacttcccagtgatttcaggccgttattgtacctgcagatggttgatccaactggaattgcaaattggtcagtgacacatgttgattggtctgaaggaaaatggcatcctaaagcttacagggctgttgacacaagctttgaactgcttaagaatatttcgtccattgatgagagtattcatgttacaagcaatgcaaagtgtttcattgctgaggaagatgaaaaatccagagagatttgccaattttttcttgaaagctctcttggaacatcaaatggttttctattgcgaactgtaatgatgatgtttgagcacaatgattttgatcaacaacttccctatatgaagaatattcagtttgaagagtaa

SEQ ID NO: 3617 - DNA, 1854 bp, Oryza sativa
atgtcgtcggcgttcggcgacttcggcccgctcaccgagcggcgccgcgccgagaaggcgcggcagcagcgcaggcgcatcatgatcgccctcggcacggtgtccatcatcattatcctcatcgtcatgggcgccgccgccatcacgtacagcgggaagaaatccgaggaggacgaaggcggctccaagggctcgtcgaaggggaaatcgaaaggcggcggaggtggagacgacgaagacggcggcggcggcggcggcaaagcggacctgcgcgccgtgtcgaagagcatcaagatgatgtgcgcgcagacggacttcgcggactcgtgcgccacgagcatcggcaaggcggcgaacgccagcgtgtcgtcgcccaaggacatcatccgcaccgccgtggacgtgatcggcggcgcgttcgaccaggcgttcgaccgcgccgacctgatcatgagcaacgacccgcgcgtraaggccgccgtcgccgactgcaaggagctcttcgacgacgccaaggacgacctcaactgcacgctcaagggcatcgacggcaaggacggcctcaaacagggcttccagctccgcgtctggctgagcgcggtgatcgccaacatggagacctgcatcgacggcttccccgacggcgagttcagggacaaggtcaaggagtcgttcaacaacggcagggagttcaccagcaacgccctggcgctcatcgagaaggcctcctcgttcctctccgccctcaagggctcccaacgccggctgctcgccggggaagaagacaacggaggaggagcagcggacccccacctggccctcgccgaggacggcatcccggagtgggtgcccgacggcgaccggagggtgctcaagggcggcgggttcaagaacaacctcacgccgaacgtcatcgtcgccaaggacggcagcggcaagttcaagaccatcaacgaagctctcgccgccatgcccaagacctacagtggaaggtacgtgatctacgtgaaggagggcgtgtacgccgagtacgtgaccatcaccaagaagatggcgagtgtcaccatgtacggcgacggctccaggaagtccatcgtcaccggcagcaagaacttcgccgacggcctcaccaccttcaagacagcaaccttcgcggcgcaaggggacgggttcatggcgatcgggatggggttccagaacacggcgggggcggcgaagcaccaggcggtggcgctgctggtgcagtcggacaagtcggtgttcctcaactgctggatggacgggttccaggacacgctgtacgcgcactccaaggcgcagttctaccgcaactgcgtcatcacgggcaccatcgacttcgtcttcggcgacgccgccgccgtgttccagaactgcgtcctcacgctccgccgccccatggacaaccagcagaacatcgccacggcgcagggccgcgccgacggccgcgaggccacggggttcgtgctccagaagtgcgagttcaacgccgagccggcgctcaccgacgccaagcttccccccatccgcaactacctcggccggccgtggcgcgagttctcccgcaccgtcatcatggagtccgacatcccggcgatcatcgacaaggccgggtacatgccgtggaacggcgagttcgcgctcaagacgctctactacgccgagtacgccaacaaggggcccggcgccgacacggcggggcgcgtcgcgtggccggggtacaagaaggtgatcagcaaggcggacgcgaccaagttcaccgtcgacaacttcctgcacgcaaagccatggatcgatcccaccggcacgccggtcaagtacgacttcttcacttga

SEQ ID NO: 3618 - DNA, 1653 bp, Oryza sativa
atggtcggttacaacaacaagaaatgttggcctagagacgcaagaatgaggctcatgaagcatgacgtaaatcttggaagaagtgttttttgggacatgaagaaccgcctcccaaggagcatcacaacgttagagtgggagaacagctttgtctctgtttacascaaggacmrcccycgcaggcggcggcggcgaggatggcggcgagaggctggagctccggaactcctcggcggcggcggcgaggaggtggaggtcgggtacgaggcgctgcggctggtgctcgactacctctacagcggccgcgtcggcgacctgcccaaggcggcgtgcctctgcgtcgacgaggactgcgcccacgtcgggtgccaccccgccgtcgcgttcatggcgcaggtcctcttcgccgcctccaccttccaggtcgccgagctcaccaacctcttccagcggcgtctccttgatgtccttgataaggttgaggtagataaccttctattgatcttatctgttgccaacttatgcaacaaatcttgcatgaaactgcttgaaagatgccttgatatggtagtccggtcaaaccttgacatgattactcttgagaagtcattgcctccagatgttatcaagcagattattgatgcacgcctaagcctcggattaatttcaccagaaaacaagggatttcctaacaaacatgtgaggaggatacacagagcccttgactctgacgatgtagagctagtcaggatgctgctcactgaaggacagacaaatcttgatgatgcgtttgcactgcactacgccgtcgaacattgtgactccaaaattacaaccgagcttttggatctcgcacttgcagatgttaatcatagaaacccaagaggttatactgttcttcacattgctgcgaggcgaagagagcctaaaatcattgtctcccttttaaccaagggggctcggccagcagatgttacattcgatgggagaaaagcggttcaaatctcaaaaagactaacaaaacaaggggattactttgggttaccgaagaaggaaaaccttctccaaaagataggttatgtattgaaatactggagcaagctgaaagaaggaccccacaactcggagaagcatcagtttctcttgcaatggcaggtgagagtctacgaggaaggttgctgtatcttgaaaaccgagtttttgtacgatgtagttgctttggcgaggattatgtttccgatggaggcaagagtagcaatggatattgctcaagtggatggaactttggaatttaacctgggttctggtgcaaatccacctcctgaaagacaacggacaactgttgatctaaatgaaagtcctttcataatgaaagaagaacacttagctcggatgacggcactctccaaaacagtggagctcgggaaacgctttttcccgcgatgttcgaacgtgctcgacaagatcatggatgatgaaactgatccggtttccctcggaagagacacgtccgcggagaagaggaagaggtttcatgacctgcaggatgttcttcagaaggcattccacgaggacaaggaggagaatgacaggtcggggctctcgtcgtcgtcgtcatcgacatcgatcggggccattcgaccaaggagatga

SEQ ID NO: 3619 - DNA, 740 bp, Oryza sativa
atggcgacgacgacggcgaggttgctcctcctgctcacggtggcgggcttctgcctctgccacaccacctgccaggaggcggcgccgccgccgccgccgtactgcggcagcctgaggacggccgtggaggcgcggaacatcatcgggtggaagacggtgccgccgccgtgcgccaagtacgtcgccgactacatcaccggcgagcggtacggccgcgacgccgacgtggtgatcaacgaggccatcgcctacgccgagagcctcaagctctccggcaccggcaaggagatctgggtgttcgacgtcgacgacaccgccctctccaccgtgccctaccaagccaaccatggctacggagttcaaccgttcgacaaccagagcttcctcaagtacgtggtgcagggaagcgcgccagcactgcagagtacactgcggctttaccgacggttactccagcttggtataaagccggtgttcctgacagaccgcaccgaggaccagaggacggtcacaaccaacaaccttattaagcagggctactgcaattgggagaagcttgtgctgcagccggttaggcttcagacctcgacgttggcgttcaagacctgcgaacgacagaagctggtgaatgatggctacatcatcgtcggcaacattggcgaccagtggaacgacatccgccgctcgccggatggttgccgcacctttaagttccccaaccccatgtactatgtcgacta

SEQ ID NO: 3620 - DNA, 1250 bp, Oryza sativa
atggataggatcgtcggggctaagtacaagctgggccgcaagatcgggagcggctccttcggggagatctacctcgccacgcacgtcgacacgtacgagatagtcgccgtcaagattgaaagcagcaaaacaaatcatccccagttgctttatgaggccaagctgtataatgctcttcagggagggactggaattgcaaacataaaatggtgtggcatcgatggtgaggacaatgtgcttgttattgatttgctggggccaagccttgaggatctatttgtttattgtggtcgaagattctcgctaaagacggtcttgatgttagcggatcagatgataacaagagtagaattcatgcattccaagggatatttgcacagagatatcaagcctgataacttcctcatgggccttggtcgtaaagctaaccaggtctacattattgactttgggcttgcaaagaggtaccgtgacgcaactactaatcgccacataccttatagggaaaataaaaacttgaccggcacagctcgatatgcaagttgcaacactcatcttggcattgagcaaagccgaagagatgatttggaatccattggttatgttcttctgtattttctcaggggaagtcttccttggcagggtttaaaagctgccacaaagaagcagaaatacgataaaataagtgagaaaaagctcgcaacacccatcgaggttttatgtaaatcccatcctgttgaatttgcttcttattttcattattgccattcattgacattcgatcaacggccggattatggatttttgagaaggctctttagagatttggctgaccgtgaaggttatcagtatgatcatgtttttgattggacactgttgaagtgcaaacaatcccaaaaagcaaaggctcaacaacaagatccaggtgtaagtagccgggcggttccaacgaatattgagaagcaccaagttagtgtgtcacgcccaacagaagcttctggtcagcttgaatcagagcaacgcccagcgattagaatgcaattcaaatctactgctgaaaacagtcgttcaagtaatcggcatactgacaaattgagagttggtactagcactgaaaatgtcttgctgcaatccacatcatttggccatgctgatgctccaaggaggaatatagcaatctcaaaaactcagggcctcgttgattccaakgctcatggaacgaacaatccagggccttctaatcaccttta

SEQ ID NO: 3621 - DNA, 2313 bp, Oryza sativa
atggcgagtcctatggaagctgtagcccgttccagcctcgtgctcgcamctcgccggcggcgagccctcggcctcctcccggcggcggcggcggccgccccattcgtgctagattgtcgccggcggcataacggaggaatgcgtcgtcctcatgtcagcttcgcctgctcggccgagctcgacaccggtcgccggcagcttccttccacggggactcgagcggtgatgtcgtcctgtcccggatatgttgaggggaggatggtaggagaaaatacaagtcagataaacatgggatgggaggctagaatacttaggcacttggagaacccggagttcttaccatcttcatatgacatagcatgggtggctatggtgccattgccgggcactgatcatcttcaagctccatgcttccctgaatgtgtggaatggatactacaaaaccaacacagtaatgggtcgtggggtgtcaatgaatttgactcatcagccagcaaggatattctcctatccactttggcatgtattattgcacttgagaaatggaatgtcggttcggagcaaataaggagaggattacattttatcgcaaagaatttctccattgttattgatgaccagattgctgcacctataggcttcaacctcacattccctgctatggttaaccttgccattaagatgggtttggaatttcctgccagtgaaattagtattgatcagattcttcacctccgtgatatggaattgaaaagactggctggtgacgaatctttggggaaagaggcatatttcgcctatattgctgaaggtctagaagaaagcatggtggattggagtgaagttatgaagttccaggggaagaatggatcattgttcaactccccggctgcaactgctgctgcattagtccacagatacgatgataaagccctgggatacctatattctgttgtcaataaatttggaggtgaagtaccaaccgtgtatccgctaaatatattttctcagctttcaatggtggatactctcgtcaatattggaatatctcggcacttttctagtgatataaagcgcattttggataagacatacattttatggtcacagagagatgaggaagtaatgctggatttaccaacatgcgcaatggcatttcgccttttgcgtatgaacggatatggtgtttcctcagatgacttgtcccatgttgctgaagcctcaactttccataactcagttgaaggatacttagatgatacaaaatccttattagaattgtacaaagcttcaaaagtcagtttatcagaaaatgagccaatcctagagaaaatgggttgctggtcaggtagcttattgaaagaaaaattgtgctccgatgacatccgaggaacaccaatccttcgagaggtagaatatgctctcaaatttccattttatgccacgctggaacctctagaccacaagtggaacattgaaaattttgatgccagggcttatcagaagataaagaccaaaaacatgccgtgccatgtcaatgaagatctcttggctttggctgctgaagatttcagcttttgtcagtcaacttaccaaaatgaaatccagcaccttgaaaggtgggatcagtatcacaaagttgagttctactctgagaatgtaaaagcagtatttttcgctctatattctacggttaaccagcttggagcaatggcttccgcagtacagaaccgcgacgttacaaaatacaatgttgaatcgtggttggattatttgaggtctttagcgacagatgcagaatggcaacggagcaaatatgtgccaacaatggaggaatacatgaaaaattcaattgtgacattcgcattgggaccaactatactcatagcactgtatttcatgggacaaaatctctgggaggacatcgtgaaaaatgcagagtatgatgagttgtttagactaatgaacacatgtggtcgtctccagaatgatattcaaagctttgagagggaatgcaaggatggcaaactgaacagtgtgtcactgcttgttcttgacagcaaagatgtcatgtcagtagaagaggctaaagaggcgataaacgagtctatatcatcatgtagaagagagttgctacggttggttgttagagaagacggtgtcattcctaaatcatgcaaggagatgttctggaatctttacaagacaagccatgtgttctactctcaggccgatggattttcctcgccgaaggaaatgatgggtgctatgaatggagtaatctttgagccactgaaaactagaggcaactag

SEQ ID NO: 3622 - DNA, 650 bp, Oryza sativa
atgggttgctcctcctccgtgccagctcgaagcactggagggttgaacaatattagcaacgataactccgctactgattcaaaggacttgcgtgctaagttggtattgcttggtgactctggtgtagggaaaagttgcattgttcttcgctttgttcgtggtcagtttgatcccacttccaaggtaactgtcggtgcatcatttttatcacaaacattggctttggaggactcaacaatagtgaaatttgaaatatgggataccgctggacaagagagaggagctgctgctgcagttgttgtctacgacataactagtccagaatcatttagcaaagcacaatactgggtgaaggaacttcaaaaacatggtagtcctgatattatcatggttttggttggtaataaagctgatctacatgaaaatcgacatgtatcttctcaggaagcacaagagtatgcagagaagaataatatggttttcatcgagacatcagcaaagacagctgataatataaaccaagtatttgaggtcaccgtttttgcattattaattaaaaacagaaagattcctgagttagttagaagaggaaattgcgaagaggttgcccaggccaacggcgtcttgataattagcttcggtgtttgttg

SEQ ID NO: 3623 - DNA, 1323 bp, Oryza sativa
atggggagcatgagcacaccgccaccggcggcggtcacggtggcgaacgtccaacgtcggcgacgataccatggcggcgggcgggtgctcctgttgccgttcccggcggcgcagggccacaccaacccgatgctccagttcgggcgccgcctcgcgtaccacggcctccgccccaccctcgtcaccacgcggtacgtgctctccaccacgccgccaccgggggaccccttccgcgtggccgccatctccgacggcttcgacgacgacgccggctgcatggccgcgcccccggactacggggagtaccaccgcagccttgaggctcacggtgcacggacgctggcggagctgctcgtctccgaggcccgtgcggggcggccggcgcgcgtgctggtgtacgacccgcacctgccgtgggcgcgccgcgtggcgcgcgacgacggcttgggcgccgccgcgttcatgccgcagccctgcgccgtcgacctcatctacggggaggtgtgcgccgggcgcctcgcgctgccggtgacgccggcggacgtgagcggcctgtacacgcggggcgcgctcggcgtcgagctcgggcacgacgacctgccaccgttcgtcgcgacgccagagctgacaccggcgttctgtgagcagtcggtggcgcagttcgccgggctggaggacgccgacgacgtgctcgtcaactccttctccgacctcgagccaaaggaggcagcatacatggaggcgacatggcgcgcgaagacggtcggcccgttgttgccgtcgttctatatcggcgacggcccgctgccgtcgaacacggcgtacgggttcaacctcttcacgagcaccgtgccgtgcatggaatggctggacaagcagcctcctcgctctgtcgtgtttgtgtcgtatgggactttctccagctacgacgcagccaagctcgaggaggtcggcaatggcctttgcaattcaggcaagccattcctttgggttgtgaggtccaatgaggagcacaagttatctcgagaacttcgagagaagtgtgggaagagaggactaattgttcccttttgtccccagctggaggtgcttgctcacaaggccacaggttgttttttatcgcactgtggatggaactcgacgttggaggcaattgttaatggtgtaccgctagtggcaatgccatattgggctgaccaaccaaccatatcaaagtatatggagagcttgtggggcatgggtgtcagagtgtggcagaaaagagtggcggcatacaaagggaagaagttgagaggtgcatcgggaggtgatggatggggatag

SEQ ID NO: 3624 - DNA, 2313 bp, Oryza sativa
atgaggcgtgggttcgccgatggtactagcagagaccaggtcgaggatggtaatggcacgaacagatccattgcggcgagctccgggacggcaactaggcgcaacgcaggttcgccggtggcactaagtagcagcgataaggtcagatatagatacatgatggccatacacgcgctgcaactggacgtcaagctggaggcccccaacagcccggcctcctcgccggcgtcacggagcccctcggcgtcctggctcgccggccgcgagcgcgagcggctcttctccagcttcgtgcgcaacgcgctcggctcctgcgtcgattacgcgccggtcgccgcgctgccgctcggcgtctcggctgctgtcggtgtcggtgccggcgagctcgcgttcgagctcgacgagcacctctccgaggcggagccgtcgtgcgagccgtacgctcgcgacctcctcgccggcgcccaggctcgccaccgcatcttccacgacgagctcgtcgtcaaggccttcttcgaggctgagagggcgcaccgaggccagacgcgggcgagtggtgatccgtacttgcagcattgtgtggagaccgccgtgcttctagccaagataggcgcaaacgcgaccgtcgtctctgccggactcctgcatgacaccattgatgatagcttcatggattatgatcagattttccggatgtttggtgccggcgtggctgatctagttgaaggggtctccaagttaagccacttgagcaaacttgctcgggacaacaatactgcaagcagaaccgttgaagcagaccgcctgcatacaatgtttcttgcaatggctgatgcaagagcagttctgataaagctagcagatcgtctacacaacatgaagacaatagaagctttgcctttggtcaaacaacaaagattcgctaaggagactatggagatatttgtgccgttggctaatcggttaggaatcgctagctggaaagaccagctggaaaatatttgctttaagcatttgaacccagaggagcacaaggagctttcctccaaacttgtcatatcttttgacgaagcacttcttacatctactctggataaacttgataaaggtctaagagatgaaggtatttcgtatcacagtctttctgggaggcacaagagcctgtacagcatatactccaagatgataaagaagaacttaacgatggatgatgttcatgacattcatggtctacgtcttgtggttgatacagagcaggattgttaccaagctcttgacattgtccataagctctggccccgagttgctggacgatttaaggactatatcctgcatccaaaattgaatgggtatcggtcattgcacactgtcatcatgtgtgagggcatacacccatttgaagttcagatccgaacaaaagaaatgcatctacaagcagagtatggatttgctgcacactggagatacaaggaaggtggttgcaagcactcttttgtactccaaatggtggaatgggcaagatgggtgctcacatggcaatgcgaagcaatgagcaaagagcggtcctcaggtttaggccgctctgatgccattaggccaccatgtccatttccctcgcattcggaggactgcccttattcttacactcgccagtgcaaccacgatggacccatctttgtgattatgcttgaacatgataagatgtctgtccaagagcttcctgcgaactcaactgtagtcgatctgatggagagagtgggggccaatagtccaagatgcagcccttacagcttcccactgaaagaggaattgcgcccgagggttaaccacaagcccataagtgaccctaaccggaaactgtgcatgggagatgtggtggagctgacgcctgcgctcccacacaagtcgctaactgagtatcgggaagagatccagcgcatgtatgaacgaggcgggtttgccctcgccaccacccgggacgtttttgttggacagaaattgtgtgcacagctggttgatgagcctaggattgttggctctggaggtgacagctctccaggcaaagcttgtggacaggaggcagtactgaatgaggagaaggctgaggaaaattctcaactatcctgcagaaatcatgaaagcaatcagacatgctatcaaaatggagatcgagaccttgagggcacatctcaatcaggatggatcgccgggctggagccttggagggatgcaacacggaggagcgagatcgaaggcatggctggccggtggagctcgatttttcgcgtcgtcttcggttcaggcgtggattaa

SEQ ID NO: 3625 - DNA, 1460 bp, Oryza sativa
atggcgttgcctcatccgccgctggtggtgtgcttgctcgtgctgatcagctgccttctcagcggcggcgttctcgccggttcgcggcggcgctacctgacggccagcctcgacgagctgcgtggatacaatggtcatcaagttcattcccctcccctgacgtccccagccgcaacatctggccgcaagctctcgatccgaaactcggccgccgagaagccggcggcgcgcgacatccacgtccgagacagggcacggctgcgcaccatcctccagaggtcgtcgtccgcgtcggccgccgcctccctcgctccgtacgcgtcgccgccgacggccatgccacccattccggccgtgtcggtggcgccggcgccggcaccggccgtgacaatcccggaccgctcggggacctacctcgacacgctggagttcgtcgtcgccgtcggcctcggcacgccggcgcagccgtccgcgctcatcttcgacaccggcagcgacctgtcgtgggtgcagtgccagccttgcggctcctccggccactgccacccgcagcaggacccgctgttcgacccgtccaagtcgtccacctacgccgccgtgcactgcggcgagccccagtgcgcggccgccggcgacctgtgcagcgaggacaacaccacctgcctctacctcgtccgctacggcgacggctcgtccaccaccggcgtcctctcgcgcgacacgctcgcgctcacctcctcccgggcgctcaccggcttcccgttcgggtgcggcacgcgcaacctcggcgacttcggccgcgtcgacggcctcctcggcctcggccgcggcgagctctcgctgccgtcgcaggccgccgcgtcgttcggcgccgtcttctcctactgcctgccgtccagcaacagcacgacggggtacctcaccatcggcgcgacgccggccaccgacaccggcgcggcgcagtacacggcgatgctgcggaagccgcagttcccgtccttctacttcgtcgagctcgtctccatcgacatcggcgggtacgtcctgccggtgccgccggccgtgttcactcgcggcggcaccctcctcgactccggcaccgtcctcacctacctcccggcgcaggcgtacgcgctgctccgggacaggttcaggctcaccatggagcggtacacgccggcgccgccgaacgacgtgctcgacgcgtgctacgacttcgccggcgagagcgaggtcgtcgtcccggcggtgtcgttcaggttcggcgacggcgccgtgttcgagctcgacttcttcggggtcatgatcttcctggacgagaacgtcgggtgcctcgcgttcgcggcgatggacaccggcggcttgcctctgtccatcatcgggaacacgcagcagcgatcggcggaggtgatctacgacgtcgccgcggagaagatcggttttgtcccggctagttgctg

SEQ ID NO: 3626 - DNA, 609 bp, Oryza sativa
atgtcggccgcggcgggcgggtacagggcggaggacgactacgactacctgttcaaggtggtgctcatcggcgactccggcgtcggcaagtccaacctcctctcccgcttcaccaagaacgagttcagcctcgagtccaagtccaccatcggcgtcgagttcgccacccgcagcctccaggtcgacggcaaggtcatcaaggcccagatttgggacaccgccggccaggagaggtatcgtgctatcactagtgcctattaccggggagctgtgggagcattgctcgtctacgatgtcacccgtcgtgctacattcgacaacgtgggacgctggctaagggagcttagagaccacactgatcctagcattgtctgcatgctgattggcaacaaatccgatctccgccacttggtggctgtctcaaccgaggacggcaaagagtttgctgaagccgaatcaatgtacttcatggaaacttctgcgctcgacgctaccaacgtcgacaatgcgttcgcggaggtcctgactcagatataccagattgtgaacaagaagccggtggaggcacctgaggatggtcggctggcccaggaaaaggagagaagataa

SEQ ID NO: 3627 - DNA, 915 bp, Oryza sativa
atgcggtggcaccggggaagggggaagraaggggggaaggcgtcggcsgtkgggagcccgtgctcggtgaccagcgactgcagcagcgtggccagcgcggacttcgagggggttggcctgggattcttcggggcggcggcggatggcggcgccgctatggtgttcgaggattcggcggcgtcggcggccacggtcgaggcagaggcacgcgtcgcggccggggcraggagcgtcttcgccgtcgagtgcgtgcccctgtgggggcacaagtcgatttgtggccgccggccagaaatggaggacgccgtcgtcgccgtgtccagattcttcgacatcccgctatggatgctcaccggcaactccgtcgtcgacggcctcgaccccatgtcgttccgcctcccagcacacttcttcggtgtctacgacggccacggtggcgcgcaggttgcaaattactgtcgggagcggctccacgctgcgttggtggaggagctgagcaggatagaggggtctgtgtccggtgctaacttgggatctgtggagttcaagaagaagtgggaacaggcgtttgtggactgcttctcgagggtggacgaggaggtgggaggcaatgcgagcaggggagaagctgtagcacccgagaccgtgggatctacggctgtagtcgctgtgatctgctcctcgcacatcatcgttgctaattgtggagactcacgggcagtgctctgtcgtggcaagcagcctgtgccgctatcagtggatcataaacctaacagggaggatgaatatgcaaggatcgaggcagaaggtggcaaggttatacagtggaatggctatcgagtttttggtgttcttgccatgtcgcgatcaatagaggttttctggtctgtcaaagtgaaggaaatgaaggaatga

SEQ ID NO: 3628 - DNA, 2499 bp, Oryza sativa
atgtcgaggtcgtacacgaacctgctggacctcgcggcggggaacttcgaggcgctggggccggcggggggagggaggaggaggtcgttcggggcgaagcggatgacgcgggtgatgacggtgcccgggacgctgtcggagctggacgacgaggacgacgagccggcggcgacgagcagcgtcgcctccgacgtgccctcgtcggcggcgtgcgagcgcctcatcgtcgtggcgaaccagctccccgtggtggcgcggcggaggccgggcgccgcggcgggggggttggcgttctcgtgggacgacgactcgctcctcctccgcctccgcgacggcktccccgacgagatggagcacttctgcaagggttacctatggccgctgttccactacatgctccccttcgcctccgccttgccggcggccgcatccggcgatggccggtttgaccgcggcgcgtgggaggcctacgtgctcgccaacaaatacttcttcgagaaggtggtcgaggtcatcaacccggaggacgactacgtttgggtccacgattaccacctcatggcgctgcccaccttcctccgccgccgcttcaatcgcctccgcatcgggttcttcctccacagcccctttccctcatcggagatctaccgctcgctgcccgtccgagaggagatcctaagaacgctgcttaattgcgatctcattggattccacacattcgattatgcgaggcacttcctatcttgctgtagtaggatgctggggatagagtaccagtcaaagcgtggatacattggattggattactttggccgcactgttggaatcaagatcatgccagtgggaatccatatgggtcaattgcaatcagtgttgcgattgtccgagaaagaaaagaaggttgctgagctgcggcagcaattcgagggcaagtccgtgttacttggtgtggatgatatggatatcttcaagggaatcaacttaaaacttcttgcgtttgagaatatgctgaggacgcatcccaagtggaagggaagagctgtgttggtgcagattgcaaacccagcacgagggaagggaaaggatctggaggctgtccaggctgagattcgggagagttgtgatagaattaacaaggagtttggccagtcaggttacagtccagtgattttcattgaccagagcgtgccaagtgcggtgaggcttgcatattatacggttgctgagtgtgttgtggtgacggctgtgagggatgggatgaatttgaccccatatgaatacattgtctgccgggagggatacctggctctgagtgtgcaccagagtggagccattcgtgttaacccgtggaatatcgaggcaactgcagaggcactgaatgaggccatctcaatgtcagagcgtgaaaagcagctgaggcacgaaaaacattaccgttatgtcagcacccatgatgttgcatattggtctaagagctttgtacaggacctggagagggcttgcaaggatcactttaggaaaccatgctggggcattggattgggatttggcttcagggtggtagccctagacccacatttcacaaagcttaatttcgattcaattataatgtcctatgagagatcaaagagtagggctatatttctcgactatgatggcacattggtgccacaggcttcgctcaacaagaatccaagtgaagaattactgaggatcattaataccctatgcgcagatagaaataacaccgtgttcattgtcagcgggagaagcaaggatgacttgagcaaaaagcttatctcatgtccaaagctaggcattgccgcagagcatggctacttcttaaggtggactagagatgaagaatggcaaaccactgcacagacctcagattttggatggatgcaaatggcgaagccagtgatggatctttatactgaatcaactgacggatccaccattgagactaaagaaactgcactggtgtggcaccatcaggatgctgaccaaggttttggctcttcccaggcaaaggaaatgcttgatcacttggaaagtgtattagcaaatgaaccagtctcagtcaagagtggccaattcattgttgaagtcaaacctcagggtgttaccaaagggctcatagctgagaaagtactcacatcaatgaaggagaaggggcaactggcagattttgtattatgcattggtgatgacaggtcagatgaggatatgtttgaaaatattgccgatgtcatgaaaaggagcattgttgcaccaaaaactccactgtttgcatgtactgtgggccagaagccaagcaaagctaggttttacctggatgatacatttgaagtcgtcaccatgttgagttcactggcggatgcttcagaaccagaccttatggcagacttggaagatgacttggccacatcagtctcatcaatagaaataagtgacagagtggtatcttttagtaatttaaggacagaaggatcttag

SEQ ID NO: 3629 - DNA, 1836 bp, Oryza sativa
atgggaggcggcggcggcggcggcgggaggaaggaccgcggcgaggggctcggccgcgcgctgacccggcagcggaacaaggccgcggcggcggccaaggagaggggccacgcgctcgccctcgcccgccgcgcgcgccagccgctcgagtccgtcatcgaggtcagcgacatcgacgccgtgctccagcgcgccgcagaggaatacctcctcctcggtggtggtggcggcgacgtgttcgacgaaatgtctctgaagcgggttgctcattcgggcgcgggcgcgggcgctcctttgcgatgcagggatgggacggtggagacggaggaggagaggcggtggctgcgggaggagcaggaggcccttcacgcgggcagcctcaaggtgccccgccgaccgccatggactccccagatgacggtggaggagctcgacgccaacgagaagcgggccttcctggagtggcggaggaacctcgcaagattggaagagaacgaaaaacttgtccttaccccttttgagaagaacattgatatctggagacagctctggagagtacttgaacgcagtgatctgctggtcatggtagttgatgctcgagatcccttgttctaccgctgccctgatcttgaggtatacgcacaggaaattgatgagcacaagagaacactgcttcttgtaaacaaggctgatcttttaccactgaatgtcagacagagatgggcagaatactttaagcaacacgatatcctttatctgttctggtctgccaaagctgctactgctgatttagagggaaagaagttgagcagctattccatggaaaactggaatacagcagatcttgacaccaagatatatggccgggatgaactcttggtgagattgcagggtgaagctgagtatattgtgaaccaaaagggagcattaagagctgaagagggtcatgaatctagtcgttcagattctgtctcaacacgacccaagcatgtggttgttggatttgtaggctatccaaatgttgggaagagttcaaccatcaatgctttggtaggccagaagagaactggtgtaacctctacacctggcaagaccaagcattttcagacattggtaatctcagaagaactcattctctgtgattgtccaggtctggtcttcccttccttttcaagctcaaggcatgagatggtagcctgtggtgtcttgccaattgataggatgacaaagcataggggcgctattcaagtggtggcaaatcgtgtgccaagaaatgttctagaacagatttataaaatcaccctgccaaagcccaaggcatatgaacaactgtcccgaccaccaactgccgctgagttgctgcgggcgtactgcacatctcgagggcatgtcagtcatgctgggctgcctgatgagactagggctgctagacagattctgaaggattacttagatggaaagatcccacactttgagcttccccctggtgatacagattctgaaactgacccagaggaaaccactgaccttgaaggctcagatactgcagtaggtgccacagcagatcattgtgcttctgatgaacaagatgaggaaatcagtcaagctgatccaaacattagtcatgtactaagtgaccttgaatctttcgacctggccagtgaagtgtccaagaactctacaaagaagaagaaagaggcatcctataagcatcacaagaaaccccagaggaagaaggatcgttcatggagggttggaaatgatggcgctgatggatctgctgttgttcgggtgttccagaaacctgccgtcaattttgctaccgttacaggttaa

SEQ ID NO: 3630 - DNA, 672 bp, Oryza sativa
atggggagggcgccgtgctgcgagaagatggggctgaagagggggccgtggacggcggaggaggacaggatcctggtggcgcacatcgagcggcacgggcacagcaactggcgcgcgctgccgaggcaggccggccttctccgctgcggcaagagctgccgcctccggtggatcaactacctccgccccgacatcaagcgcggcaacttcacccgcgaggaggaggacgccatcatccacctccacgaccttctcggcaaccgatggtccgcgattgcagcgaggctgccggggaggacggacaacgagatcaagaatgtgtggcacactcacctcaagaagcggctggagccgaagccgtcgtccggccgggaagccgccgcgcccaagcgaaaggcgaccaagaaggctgcggcggtggcggtggcgatcgacgttccgaccaccgtgccgtttcacctcggaggaggattccagatcgacgacagcttctggtcggagacgctggcaatgacggtggacagcaccgaytccgggatggagatgagcggcggcgatcctctcggcgcgggcggtgcctcgccgtcgtcgagcaacgacgacgacatggacgacttctggctcaagctgttcatccaggccggtggcatgcagaatttgccccagatttaa

SEQ ID NO: 3631 - DNA, 1335 bp, Oryza sativa
atggcggtggagaagacggtgccgggcggggtgaggacggtgctggtgacgggcggggcggggtacatcggcagccacgccgtgctgcagctcctcctcgccggattccgcgccgtcgtcgtcgacaacctcaacaactcctccgagctcgccgtccgccgcgtcgccgccctcgccggcgaccactcccggaacctcgccttccacaagaggaatttcttggaggagcaagttatgtaccttcgcattcagagaaatgctaatggtctctttggcagcataactcctatgcctttgttcctagtcatgtgtcaggaagttgacctccgtgacaagggagcactggaaaaggtttttgcttcaacaagattcgatgctgtagttcactttgctgggctaaaagctgtgggcgaaagtgtgcagaagccattgctttattacgacaacaatgttaatggaacagtaaatcttctggaagttatgtctgcccatggatgtaagaagttggtgttctcatcatcagctgcagtttatggatcaccgaagaactcaccctgcacagaagagtttcctctcactccaaacaatccatatggcaaaacaaagcttgttgttgaagatatttgccgtgatatctaccgtacagatcctgaatggaagattattctacttaggtacttcaatccagttggggctcatcctagcggataccttggggaagatccatgtggcattcccaacaatcttatgccttatgttcagcaagttgctgttggcaggaggccagctctgacaatactaggaaatgattatgcaaccagagatggtaccggggtccgagattacatccatgtggttgaccttgctgatggacatattgcggcattgcagaaactctttgagagctccagcatagggtgtgaagcatacaaccttggaactggtaaaggtacctctgtgctggagatagtcaaggcatttgagaaggcttctgggaagaaaattcctctgattattggcccaagacgccctggtgatgcggagattctattttcattacctgctaaagcagagaaggaactcaactggaaagcgaaatttggcatcgatgaaatgtgtagggatcaatggaactgggctagcaagaacccttatggatacgggtcacttgactccaccaagcagaacggacaccactcgtacggatcaattggctctcccaagcagaatggccactgcacaaatggattttctgaatccactaggcataatggtcacaacggatatggactggtcgactctgccaagcataacggcaacggccacttccactga

SEQ ID NO: 3632 - DNA, 1107 bp, Oryza sativa
atggggcgggcgccgtgctgcgagaagagcgggctgaagaaggggccgtggacgcccgaggaggacgagaagctcatcgcctacatcaaggagcacggccagggcaactggcgcacgctccccaagaatgccgggctctcgaggtkcgggaagagctgccggctgcggtggacgaactaccttaggccggacatcaagcgtggtcgcttctccttcgaggaggaggaggccatcatccagctccacagcatcctcggcaacaagtggtcagcgatcgcggcgcggctgccgggccggacggacaacgagatcaagaactactggaacacgcacatccgcaagcgcctcctccgcatgggcatagaccccgtgacccacgcgccgcgtctcgacctcctcgatctcacctccctcctcaagcccgccgccgccgccgcgtactaccccacgcaggccgacctcgacacgctccgcgcgctcgagccgctcgccggctacccggacctgctccgcctcgcctccgccatcctccccgccgccacgacgaccggcgcagccgccgccgccgccgccgagcaggcgcagcttctcctgccgtggctgcttcaggcgcagatggcgcagcagcaacagcaggtgacgccgccgccgccgccgccgccgcaggccgcggcgaccgaacagttcttgcaggccaccagcaccgcctgccaccaaatgccaggcctggttcacgccagcccgacgcagcagctggcgcagcaaccgcaggatcacatggcggcggcgacctgccaccgccgcggcgccgtgcagcacccgagctacgacaaccagctcgactacgtgccggcgctgatgcagatggcgtccgacgcgtccaacctgcagcagtggagcagcacggtctcgagtagcaacaaccacaacgtcaactccggcgtgtccacgccgtcgtcgagcccagcagccgccggacagatcaactcatcctctacgacgacgacgacgacgtatggcttgaacgcgagcggtgacgtcgacgacgctgggctgctcatcaacatgcacctatccgagctcctcgacgtgagcgactacatgtaa

SEQ ID NO: 3633 - DNA, 1242 bp, Oryza sativa
atggggatggagtacttcgatgctaggcggaagcctcataatgttgggaaagttattgcagctctggtcctcacaacactatgtatatttattttgaagcaatctcctggttttggtggcagtagtgtgttttctcgccatgaacctggtgttactcatgtcttagtaacaggaggagctggctatattgggtcacatgcttcattacgcctgttaaaggacaattatcgagttaccattgtggacaatctttctagaggaaacatgggagcagtaaaggttctccaagagttgttcccccagccaggaagacttcagtttatctatgctgatcttggagatcaaaaaactgtatcctcattttgtacttctaaattacctcctctttttcacttaactggctcccaggtcaacaagatctttgccgaaaatgcgtttgatgctgttatgcactttgctgctgttgcctatgtgggtgagagtacattggaaccccttaggtactatcacaatattacatcgaacaccttattgattttggaggctatggcgtctcatggagtcaagacccttatttactctagtacatgtgccacctatggagaaccagagaagatgcctattgtagaaaccacacgtcagttaccaattaatccctatggaaaagctaagaaaatggcggaggacatcatactagatttcacgaaggggagaaaggacatggctgtgatgattttaagatatttcaatgttattggatcagacccagagggaagactaggtgaagctcctagacctgaactacgagagcatggaaggatatccggggcatgctttgatgctgcgttaggaatcattccagggctgaaggttaaaggaacagattatcctacaactgatggaacctgcataagagactacattgatgtcacagatcttgttgatgctcatgtgaaagcactcaacaaggcagagccaagtaaagttggcatttacaatgttggcactggaagaggtcgttcagtcaaggagtttgtggatgcctgcaaaaaggcaactggagtcaacattaaaattgagtacctcagcaggaggccaggggactatgctgaagtatacagtgacccaacaaagatcaacacggagctcaactggactgctcaatataccgacctcaaggagagcctgtcagtcgcttggagatggcaaaagtcacatccacgcggatatgggtcaaactaa

SEQ ID NO: 3634 - DNA, 549 bp, Oryza sativa
atgagcagggacgacgtcgacgacgtcacggcgggcgccgccgggtcaggggaggaagcggcggccgatcaggaggaggcggccgccgctgtcgccggcgactcgcacgagaacgacctggtgatgccggggttccggttccacccgacggaggaggagctgatcgagttctacctccggcggaaggtggagggccggcggttcaacgtcgagctcatcaccttcctcgacctctaccgcttcgacccatgggagctccccgcaatggcggtgataggggagaaggagtggttcttctacgtgccgcgggaccgcaagtaccggaacggcgaccggccgaaccgggtgacggcgtcggggtactggaaggcgacgggggccgaccggatgatccgcggcgagaacagccgccccatcggcctcaagaagacgctcgtcttctactccggcaaggcccccaagggcgtccgcagcagctggatcatgaacgagtaccgcttcccccggcccgccgcagacgccgatctcttctacaagtttgcaaattga

SEQ ID NO: 3635 - DNA, 2823 bp, Oryza sativa
atggccgccgccgccgccacctccacccttctcctcctcctcctcctcctcctcctcgccaccgccacccatggcgccgcggccgacacagtctcgtcccccgcctcccctgaagcggccgcactcctcaacctctccgccgcgctcggtgatccctcgggctacctctccacgcactggacgcacgacaccgcgttctgctcgtggccgcgcctctcctgcgacgccgacggctcccgcgtcctctcgctcgacctctccggcctcaacctctccggcccgatccccgccgcggcgctctcctccctctcgcacctccagtcactcaacctctccaacaacatcctcaactccaccttcccggagggcctcatcgccagcctcaagaaccttcgcgttctcgatttctacaacaacaacctcaccggcgctctcccggccgcgctccccaacctcaccaaccttcatccccaggtcgtacgggcatggagccggatcaagtacctggctctctccggcaatgagctcaccggggagataccgccggagctcggcaacctgacgacgctcagggaactgtacctcggctacttcaacagcttcaccggcgggataccgccggagctcgggaggctgaaggagctcgtgcggctcgacatggcgaactgcgggatctccggtgtggtcccgccggaggtggcgaacctgacgtcgctcgacactctgtttcttcagatcaacgctctctccgggcggctgccgccggagattggcgcaatgggggcgctgaaatcgctcgacctgtcgaacaacctgttcgtcggggagatccccgcgagcttcgcgtcgctcaagaacctgacgctgctgaacctcttccggaatcgcctcgccggcgagattcccgagtttgtcggcgacctgccgaacctcgaggtgctgcagctgtgggagaacaacttcaccggtggagtgccggctcagctcggcgtggcagccaccaggctgaggatcgtcgatgtgagcacgaacaggctaaccggcgttctaccaacagagctctgcgccggcaagcggctggagacgttcattgcgctggggaactcactgttcggcagcattcccgacgggctcgccgggtgcccgtcgttgacgaggcttcgtcttggagagaattatctgaacgggacgataccggcgaagatgtttacattgcagaacctgacgcagatcgagctgcacgataatttgctctccggcgagctccggctggacgccggcgtggtgtcaccatcaataggagagctgagcttgtataacaatcggttgtccggtccggtgccggtggggatcggtggtctcgtcgggctgcagaagttgctggtcgccgggaaccggttgtccggcgaactccctcgtgagattgggaagctgcaacagctttcaaaggcggacttatctgggaacctgatctccggggagatacctccggcgatcgccggatgccggctgctcaccttcctcgacctctctggcaacaggctctccggcagaatcccgccggcgctcgccgggctacgaatcctcaactatctcaatctgtcccacaacgcgctcgacggggagattccacctgctatcgccggaatgcagagcctaacagccgtcgacttctccgacaacaatctctccggcgaggtcccggcgaccggccagttcgcctacttcaacgccacgtcgttcgccggtaacccaggcctctgcggcgccttcctctccccgtgccgctcccacggcgtcgccacgacgtygaccttcggctccctctcgtcggcktcraagctgctcctcgtgctcggcctcytcgcgctgtccatcgtgttcgccggcgcggcgcgcctcgacttcgccgtgracgacgtgctggactgcctcaaggaggagaacgtgatcggcaagggcggktcagggatcgtgtacaagggcgcgatgcccggcggcgcggtggtggccgtgaagcggctcccggccatggggcgctccggcgcggcgcacgacgactacggcttctcggcggagatacagacgctggggcgcatccggcaccgacacatcgtgcgcctgctcgggttcgccgccaaccgggagacgaacctgctggtgtacgagtacatgccgaacggcagcctcggcgagtgctccacggcaagaagggcggccacctgcagtggcgacgcgtccaacaacatcctcctcgacgccgagttcgaggcagcacgtcgccttgccatttctcsggcaatcgccaagttcctccgcggcaatgccggtggctccgagtgcatgtccgcgatcgccggctcctacggctacattgctcccgagtacgcctacacgctcaaggtggacgagaagagcgacgtgtacagcttcggggtagtgctactggagctcatcgctgggcggaagccggtgggagagttcggcgacggcgtggacatcgtgcactgggtgcggatggtgaccgggtcgagcaaggagggcgtcacgaagatcgccgacccacggctctcgacggtgcccctccacgagctgacgcacgtcttctacgtcgccatgctgtgcgtcgccgagcagagcgtcgagcggccgacgatgcgggaggtcgtgcagatcttgaccgacctgcccggtacggcggcggcgacggccatggacgcgccgtcgcacgggtcggggaaagagcaagaccggagcgcggagatgcagcagcaggacgggtcacgcgagtccccgccacagcaggatctccttagcatctag

SEQ ID NO: 3636 - DNA, 873 bp, Oryza sativa
atggcagcgtcgcgctacgaggtggaggtgacggtggcctcggcgcgcgacctcaagaacgtcaactggcgcaacggcgacctcaagccctacgccgtcgtgtggatcgacgacggcgccaagtgctccacccgcgtcgacctcgacaacgccgacaaccccacctgggatgacaagctcaccgtccctctcccgccctccacccgcctcgacgacgccgtcctctacctcgacgtcgtccacgccaacgccaccgacggcgtcaagcccctcgtcggctccgcgcgcctcccgctccgcgacgtcctcgccgacaccggcataggcgcccgagcctcccgctccctccgcctcaagcgcccctccggccgcccccatggacgcctcgaagtccgcgtcgccgtccgcgagcccaagcgctactacgacccctcgccggcgtaccctgctccctaccaccagcagtcgtcccgtgacccctacgcctacggtaacactacaactggtggctatggctatgcctatggcggggcccctccggctccgtactccgcggcccctcctgctggatacccgtcggcctatggaggagcggctcctactcaacctgcctatggctccgccgcgccacctcaacctgccgctgtcagctatggagcgcctcctgtggatgcaaagaagaagagcaagatgggcatggggggtgggctggcggttggcgcggcggccggcgttcttggcggtctggcgctggcgggcggcgccagctacctggagaacaagtttgaggatcgcgtggcggagcgggtggaggaggaccgctacggcggcggcggtggtggctacgacgactacggcgatgacgactattaa

SEQ ID NO: 3637 - DNA, 1539 bp, Oryza sativa
atggtggactcgctgctatacgggctcctagacctgcgcatggcggcgccattgcttgcagctgccgtggcgttgtacgtccttgtcgagcagctgtcctaccaccgcaagaaagggtccctgccagggccgccgctcgtcgtgccgttcatcggcagcgccacgcacatgatccgcgacccgaccgggttctgggaaatgcaggctgctcgcgctagaaagtccggcgttgggttcaccgccgacttcctggccggcaagttcacgatcttcatccgcgactcggagttgtccaaccgcgtcttcgcgaacgtccgccccgacgccttcttcgtcatcggccacccgttcggcaagaagctcttcggcgaccacaacctcatctacctgttcggcgacgaccacaaggacctgcgccgccgtatggcgaccaacttcacgccgcgcgcgctctccacctacgccgccatccagcagcgcggcatcgtctcccacctccggcggtggctcgaccggagcgccgccaacggcggcaaggccgagccgatacgggtgccctgccgcgacatgaacctcgagacctcgcagacggtgttcgcggggccgtacctcaccgaggaggcgagggagaggttcaagagcgactacaatctcttcaatgtaggcctcttggccttccccgttgacctgccggggctcgcgttccggcgtgcgaggcaagccgtggcgaggctggtgcgcatgctccgcgattgcgcgagggagagcaaggcgcggatgcgcgccggcggtgagccagagtgcctcgtggactactggatgcaggagacggtgcgggagatcgacgaggccaaggcggcggggctgccgccgccggcgcacatctccgacgacgaggagatcgggggcttcctcttcgacttcctcttcgcggcgcaggacgcgtccacctcctccctctgctgggccgtgtccgcgctggactcccacccggacgtgctcgcccgcgtgcgcgccgaggtggcctccctctggtcccccgactccggcgagcccatcaccgccgataagatcgccgaaatgaagtacacaaaggctgttgctcgcgaggtggtccggcaccgcccaccggcgacgctgatgccacacatcgccttgcagaacttccagctgacggaatcgtacacgatccctaagggcaccctggtgctcccgtcgatgtacgagtcgtcgtttcaggggttccatgaccccgacgcgttcgacccggagcgcttcttctcggaggcgcggagggaggacgtggtgtacaagcgcaacttcctcgcgttcggcgccggcccgcaccagtgcgtcggtcagcggtacgcgctcaaccacctcgtcatcttcatggcgctcttcgtctccctcgtcgacttccggcgtgagaggacggagggctgcgacgttgccgggtgtacatgccgaccatggtgccgagggacggctgcgtcgtctacctcaagcagcgctgagtcaagtttgccgtcgttctga

SEQ ID NO: 3638 - DNA, 1539 bp, Oryza sativa
atggtggagtcatttcacggcctggtcgtggtagacctccgcacggcggcgccattgctggctacagctgtggcgttgtacatcctcatagagcagttgtcataccaccgcaagaaggggtccatgccagggccgccgctcgtcgtcgtgccattcctcggcagcgtcacgcacttgttccgcgacccggtcggattctgggacttgcaagcgacgcgtgctagcaagtccggcgctgggctcaccgcggactttctcttcggccggcttatggtcttcatccgtgactcggagctgtcccgccgcgtgttcgccaacgtccgcgccgacgccttccaccttgtcggacacccgttcggcaagaaactcttcggcgaccacaacctcatctacatggtcggaaaggagcacaaggacctgcgccgccggatcgcgcccaacttcacgccgcgcgcgctatccacctatgctgtcatccagcagcgtgtcatcctctcccacctccggcggtggatcgaccggagcgttgctaacggcggtaaggccgagcccatacgggtgccctgccgcgacatgaacctcgagacatcgcagacggtgttcgtcgggccgtacctcaccgtggagacgagggagaggttcgatagggattacaacctcttcaaccacggtttcataaccttgcccatcgacctgccagggtccgcgttccggcgcgcgaggcttgccgtaccgcggctgaagcatattctcgaggactgtgcacgtcagagcaagcagcgcatgcgcggcggcggcgagccggagtgccttgtggactacttgatgcaggagacggttcgtgagatcgacgaggccgcggcggcggggctgccgccgacaccgcacaccagtgacatggagaccgggaacctcttgtttgacttcctcttcgcggctcaggacgcgtccacctcctccctatgctgggccgtgtccgcgctggactcccacccggacgtgctcgcccgcgtccgagctgaggtggccgctctctggtcgccggagtcaggcgagcccatcactgccgagatgatgacggagatgaagtacacccaggcggtggcgcgcgaagttgtccggtactggcctccaggcccggtggtgccgcacatcgccggcgaggcgttccagctgacggagcagtacactatacccaagggcaccatagtgttcccgtcggtgtacgagtcgtcgttccaagggttccccgacgctggcacgttcgacccggagcgcttcttctcggaggcgcggagggaggacgtggtgtacaagcgcaacttcctcgcgttcggcgccggcccgcaccaatgcgtcgggcagcgctacgcgctcaaccacctcgtcattttcatggctctcttggcgtctctcatcgacttccggcgtgagaggacggagggctgcgacgtgccggtgtacatgccgaccatcgtgccgagagacggctgcgtcgtgcacctcaagcagcggtgcgccaagttaccatcgttctga

SEQ ID NO: 3639 - DNA, 1536 bp, Oryza sativa
atgagaaccagcactgacccgtccggctcaatcgagtcgtttcacggcctcgtacacctccgcacggcggcgccattgctggctgcagctgtggcgttatacatgctcatagagcagctgtcataccaccgcaagaaggggtccatgccaggggcgccgctcgtcgtgccgttcctcggtagcgccgcgcatttgatccgcgacccggtcggattctgggacgtgcaagcggcgctcgctcgcaagtccggcgctgggctcgccgcggactttctcttcggccggttcacggtcttcatccgtgactcggagctgtcccaccgcgtgttcgccaacgtccgcgccgacgccttccacgtcgtcagccacccgttcggcaagaagctcttcggcgaacacaacctcgtctacctggtcggcgaggagcacaaggacctgcgccgccggatcgcgcccaacttcacgccgcgcgcgctctccacttatgccgtcatccagcagcgtgtcatcatctcccacctccggcggtggctcgaccggagtgcttccaacggcggcaaggccgagccgatacgggtgccctgccgcgacatgaacctggagacctcgcagacggtgttcgtggggccgtacctcaccgagaaggcgagggagaggttcgacagggattacaacctcttcaacgtcggtttcataaccttgcccgtggaccttccggggttcgcgttccgccgggcgaggctagccggggcacggctgatgcacactctcggggactgcgcacgtcagagcaggcaacgcatgcttggcggcggcgagccagagtgcctcctggactacttgatgcaggaaacggtgcgtgagatcgacgaggccacggcagcggggctgccgccaccaccgcacaccagcgacgtggaggtcggcgccctcctgttcggcttcctcttcgcggcgcaggacgcgtccacctcctctctctgctgggcggtgtccgcgctcgactcccatccgaacgtgctcgcccgcgtccgtgctgaggtggccgctctctggtcgccagagtccggcgaacccatcaccgccgagatgatgtcggcgatgaaatacacccaggcggtggcgcgcgaggttgtccggtaccatccaccggcgacgctggtgccgcacatcgccgtcgaggcgttccagctgacggcgcagtacactatacccaagggcaccatggtgttcccatcggtgtacgagtcgtcgttccaagggttccaagacgctgacgcgttcgacccggaccgcttcttctcggaggcgcggagggaggacgtggtgtacaagcgcaacttcctcgcgttcggcgccggcccgcaccagtgcgtcggtcagcggtacgcgctcaaccacctcgtcatcttcatggcgctcttcgtctccctcgtcgacttccggcgtgagaggacggagggctgcgacgtgccggtgtacatgccgaccatggtgccgagggacggctgcgtcgtctacctcaagcagcgctga

SEQ ID NO: 3640 - DNA, 1707 bp, Oryza sativa
atggaaactattagcaatatctttcacaatgacccactcccacctctaggagcaagagcaaaccaatctatcaagctgagaaaattcattatttctccatatgattcccgttacaggacctgggagacgttcttgctcgtgcttgttgtttattcagcttggatctgcccatttgaactagcatatctgagaaatctctcctggaaggtttctcttgttgacaatattattgacagcttctttgcaatcgatattattctcacattttttctagcgtatctggatcaaaagtcatatcttctagtggatgatccaaaaaggatcgtggctaggttacttagcatgcttcgattatggcgtctccggcgcctcagtgaattatttgccaggctcgaaaaggatatccgattgaattactactggataaggtgcaccaaactaatttctgttacactttttgcggtacattgttcaggatgcttcaattatttaatagctgatagataccccaatccagcaagaacatggataggagcagcaataccaaactacagatcacaaaatctgtgggttcgatatgttacggcaatttattggtccataacaacactcacaacaactggttatggggatttgcatgcagagaatcaaagagaaatgttatttagcatatgctacatgctatttaacctgggattgacagcatacctcataggtaacatgacaaatctggttgttcagggaagttgccggaccaggaattttagggacacaatccatgctgcctctcagtttgctgcaagaaatcagttgcctggacatattaaggacgaaatgctatctcatatctgcctaagatataaaacagaggggctgaaacagaaagaaacattggatagtctccccaagggaatccgttcaagcatagcgtgcaacttattcttacctgttatagaaaaagtctatcttttccatggtgtctcatttacttgcatgatccaactggtaactgaaatggaagcagagtactacccaccaagagaagttgtcatactccaaaatgaagcaccccgagatgtttacatattagtttcgggagcagtggaagagcgggtagagatcgatggaacagaaaaggtccaggaagtactgtgcaatggtgaaatatttggagaaataggagttatctgcagcatcccccagccatgtgctttccatacaatcaaagtttcacaactattaaggctgaacacagcagtgctaaagaacattatcaaggaaaacagcgatgacagacgagttattctgaacaatctttcccagaagatgaaccaagatcacaggttctctaccgaggtgatggaaaaatctttacagatgatgcatcaacactttggagagtacaacagatgttctgcattgaatcaagacaatgagaagaatgaattaaaagctaataatggtcattctatggctttagaatggaaaagagtgacaatacatatgtattcacagaggaacaaaagaccggaggcaccgcttgcaaaagttataaatctaccaggatctcttgataaacttttcgccatagcttgtcagaagtttaacaattatcgtcttacaaaacttgtcaatccagaatttgctgaaattgatgatattacagtaattcgagatggtgatcatctgttttttatggaaatttga

SEQ ID NO: 3641 - DNA, 486 bp, Oryza sativa
atgacggtggttgatgcggagtcgcggttccatgtcctcgcggtggatgatagcctgatcgacaggaagctcatcgagatgctgctcaagaactcgtcctaccaagtgaccactgtggattctgggagcaaggccttggagctgcttggattgagggatgagggtgatgactcctcctcttcaccttcttcctcctcacctgaccatcaggagattgatgtcaacctgataatcactgactactgcatgcctggcatgacagggtatgatctgctcaagagggtgaagggatcatcttcattgaaggacataccagttgtgatcatgtcttctgagaatgtgcctgcaaggatcaacaggtgcttggaagatggtgcagaggagttcttcctgaaacctgtcaagctcgctgacatgaagaagctcaagtctcacctgctcaaaaggaaacagcagctgcccattggctgctgctgcaccagataa

SEQ ID NO: 3642 - DNA, 1566 bp, Oryza sativa
atgggggaagacctcgtcaccaccctgtccatggagaacggcggcggtggcggtggcggtggccaccacagcctctgcacccttctctccatggatcccgccggccacctcgacgaccgcgccgtcggggtcatggtgcagccccgcatcggggacggcgccgggcgcgcccacgccgtgtcgctctccggcgcgcatccgccggacatcaaccagccgtggcagactgacctctgcgacatgctcgacgtcagcctcggcccgcagattcaggtgtacgacgccgaggcgctcgccgtgctgagcagtgccccgaaggctgggaaccgcaaggccgccaagcgcggggacagcatctggggcgcctggttcttcttcacgttctacttcaagcccctgctcgcggacaagtgcaaaggcaaggtcacccgggatgccaacggtgtgtcagggtttgacaagacggatctccggctcgacatgttcatggtgcagcacgacatggagaacatgtacatgtgggtcttcaaggagcggccggagaatgcccttggcaagatgcagctgaggagctacatgaacgggcactcccgccctggtgagccgcaattcccgttcagcgttgacaggggatttgtgcgatcacaccggatgcagcgcaagcactaccgtggactctcaaacccacagtgtattcatggaattgaggtggtgagatcaccaaatcttgcaagcataactgaggtagacaggaggaggtgggtggagcttacagggagggagctcaatttcgcaatcccgcaggaggcctgtgattttgggacatggaggactatgccaaacacagagattgagcttgacaggccacatcctgtcatgaagggcaacgttcatcaacacccaaagaagctgcttaatggatctggcttgaatttgtcatcaccctccaatcactcaggagaagatggcatggatctctccccagttagcagcaagcgcaggaaggaggtgtttccgcatgccatggatgaggaatgcttcttgccactcaactcttgcggcgagaggacacaacaagatgtggagatgcattcagtagtgcagccttcatggcagcacgaattttctggggtgatgaaaaaggctcgcgggcctgtgactgccgccaagtcgatttatgaagatgaccaaggctacttgataatggtcagcttaccatttgttgatcagcagaaggtgaaagtttcatggaggaacagtcttactcatggtatagtaaagatcctttgtgttagtacagcccagacgccatacatcagaaggcatgacagggtattcaagcttgctgatcctatgcctgagcactgccctcatggggaatttgtccgtgaaatacctctagcaactcgcatccctgaagacgctaagctagaagcatactttgatgaggccgctgcagtgcttgagatcatggttcccaaacgtggaaatgagccagaagaacatgaagtaagagtctctatgcgcccccctcaccttgcagctaacgatctactcctgacataa

SEQ ID NO: 3643 - DNA, 980 bp, Oryza sativa
atggcgttcgcgctcaaggcctcaactgctcgccgcggcggcgtccacggcctcggcctcggcctcgtccctgtccgtggctgcggccgcgcccggaagcccgcgcccgccgggaggtctcgttccgcgggtccctgctcccatggtggcgatcagggcggaggcggctgccgtcggggaggacgagcgcgtcatctccggcacttcgccaagctcaaggagcaggggaagaccgcattcattccattcatcactgctggtgaccctgacttggcgactacagcgaaagcgttgaagattcttgatgcttgtggttcggatctgatcgaattgggcgtgccttactctgacccattggctgatggccccgtcattcaggcttctgctacacgtgcactatcaaaaggcaccacatttgaggatgttatctctatggtaaaggaggtgatacctgagctgtcctgccctgtagcgcttttcacatattataacccgattctgaagcgtggcatcgcaaacttcatgactgttgtaaaagaagccggtgtccatggtcttgtggtacctgatgttcctctggaagagacaaatattttgaggagtgaagctgctaagaacaaccttgagctggtgctactgacaacaccaactacaccaacagaaagaatggagaaaattacaaaagcttctgaaggatttatttatcttgtaagcactgttggagttacaggtgcacgtgcaaatgtcagtggcaaggtgcaatctcttctccaggatatcaagcaggtcacggacaaagctgtggctgttgggttcggtatatcgactccagagcatgtgaagcagattgcgggatggggcgcagatggtgtgatcattgggagcgctatggtgaggcaattgggcgaagctgcttcacccgaagaaggattgaagaagctagaagagctagccaagagcctgaaggctgcattgccctg

SEQ ID NO: 3644 - DNA, 900 bp, Oryza sativa
atggaaagcccgccgcacgccaccgcctccgccgacgagatgccgagcatatggaaggagcagcacgcgcaggacgcgccgccggggttcgtgccgccgatgggccccggcgaggtcgccgccgtggagtcgctcctcggctacgagttcagggacaaggcgctggtggaggaggccctcacgcacggctccttctactacccctaccgccccggcgtgacctacgagcgcctcgaatacctcggcgacgccgtgctcacctgcgtcgtgtcgcgggaggtcttcctcacctacggccagctccagccgggccccctmacccgcctccgcgccgccaacgtcgataaggagaagctcgcgcgcgtcgccgtcgtgcacggcctccaccacttcctccgccacaaggcacccaaccttgacggccagattacagatttcatagaagaattgtcgatgtacccaattcactccaacggattattggatcctccaaaagtgctctgtgacgttgtggaatcccttattggtgccatatattgtgactccaacttcaaccaagaaatagtttggcaggtttttcaaaagttggctgatccacttattagtcttgagacattaggcaagcatcctgtaagcgagctttttgagttttgccaaaaaactcgccgaggtgtgaaaattgtgaaggatgaatgggataagaatttgacagttgaagtattgattgacggtgagatggttggaagggcaacttatgctcaaaagaaggagatagcgcagaatcgtgctgcaaaggctgctctggataaattaaaggagacattgggacaatcccaaactgaaccaatgtcagcagaagtttccgaacaattcaataaaatagatctaactggaagttga

SEQ ID NO: 3645 - DNA, 4173 bp, Oryza sativa
atggcaaatggagggaagcaggagagcagagcagccgccaggaaagcaggtggccgcttctccaagaacgagccccagattcaggcgattttttggatggcaaaaaaattgcttcagtgccgtttactctataaattgctttctaagaaaactcaatttgtcattatcttgggtgattgcctgaaacaattttcttatttctccaagttccaggaggacaaaaatgtttacagcaaggaaatagcaacactgttaatggttgaagaaaaagtttctgaggagttaactagtgaaactgagaatccatatgctgttagtgatttctcaaagctgtctccaactgctaacccagcttcacctcctgaatgtggccgttctgaatttgagcataacatgacttcgcttcataaccatgtaatggcgcacttatcattatgtagcttgaacatgaaggaggtcactacttctactgacagggaggttccatcagccattcttaattgtcctttgaagggtgttaacaaggatgctaacacggagttggtaatagaatggaggcttggaatgggcaatttccccttggtgctatcagagtgcggtgattcttcttgtgatagttctgtcagtgaacagtcatctgtgacgagcagcccatgtacatcattcacggctcattcagatacccggtctgaggatcttgatggagtagatatttgggtctcatctttagacctcgatgaagaagattcagacttgcttcaagagaaggaacaagatctgggatttttaagttgtgacttccccagcccttctttcagtgcagtgagaagaagcctccaatttggtccttccagttcgagtccagcgacgtcacatgggaaacaagccaatgactctgaagagcctatattttggccatttgaacacgcttcatattacagtcctgaatttgataaatttctgcttgtatcgccacgtagagttaccatggatgttgggtctgctgaatttcgccggttaaatccaattgtgcagaggctacataagaacaaattatcttcagcaaggaaaaacgtcggaccgcatcatggaagtgtcagtttgggtgcaaaaggaaccaaaacatcccaagataaggttcagaatgccgctgcagttccctcctggttgagcagaacaacaaaaacatcagcaaaaacatcctcttctaagcaccagcaactgagcaacagtgagaaaagaaagccgtctcacttgaaaatctctcctccaagaaaggataggtttccacagttgcagtcaggccacaccgttcaagagcttgaagcaagtgatcaccgaaagctagctgttgagaagattctgatcgagcagttcatcggcttagatgagtttgatggccatgaagatatatcacgtggatacaatgtatcaaggaaaggtttggggaagctacttctgaccatggcaggcaccctgctccagccggttgccctcggaacaacttttgcaggccgtgtaagtggtcagcgatggaagtctcatggcacaaggaggcctccctcaatgttggcgatgtccttgagccgcccagttaagatggccgcatttgtcggtctgagatcggtgcatagcttctcagtcacgcctgtcaccaacttcagatcgacggttgcatcttacagatcaagacggggaaggcgtgctcgctttgtaaccagatcgatgtttgagaggttcactgagaaagctattaaggttataatgcttgcgcaagaagaggcaaggcggttgggccacaactttgtcggtactgagcaaattctcttgggtctgattggagaagggactggtattgctgctaaggtgctcaagtcaatgggcataaatctcaaggatgcacgtgtggaagtggagaagatcattgggaggggcaatggtttcgttgctgtcgaaataccattcacaccacgtgcaaaacgtgttttggagctttcattggaagaagctcgtcagctaggacacaactatattggatctgagcacttgcttcttggactgctccgtgagggtgaaggtgtagcagcccgtgtgctcgaaagccttggagccgatcctagcaatattcgcacgcaggttatccgaatgattggcgagactacagaagctgttggtgcaggagttggaggagggagtagtggcaataaaatgccaacacttgaggagtacggaactaatttaacaaaattagcagaggagggaaagctagatcctgttgttggaaggcaaccccagattgagcgtgtcgtacaaattctgggcagacgaacaaagaacaacccatgcttaattggagagcctggtgttggaaagacagcaattgcagaaggccttgctcaacgcatttctactggtgatgtgcctgaaacaattgaaggaaagaaggtcattacccttgatatgggacttcttgttgctggtacaaaataccgtggagaatttgaagaaagattaaagaagctgatggaagaaatcaagcagagtgatgagataatactatttattgatgaagtccacactctcataggagcaggagcagctgagggtgctattgacgctgctaacattttaaagccagcattagcaagaggagaactacagtgtattggagccaccacacttgatgaatacaggaagcatattgagaaagacccagcattagaaagacgtttccagcctgtaagagtgccagagccaacagttgatgaaaccatagaaattctcagagggcttcgggaacgatatgagatccatcataaacttcgttacactgatgatgctctgatttcagctgccaagctatcttatcaatacatcagtgatcgtttcctcccagataaagcaattgatttgattgatgaagcaggttcacgtgtaaggcttcgacatgcccaggttcctgaagaagctagagagcttgacaaggagctcaagcaaatcacaaaagataagaatgaagctgtccgtagccaggacttcgaaaaggctggagagttacgtgatcgtgaaatggaattgaaggcccagataacagctctcattgacaagagcaaggagatgagcaaagcagagactgaatcaggggagacagggccactggtcaatgaagcagatatccagcacattgtatcctcgtggactggtattccagtagagaaggtatcaagtgacgagtccgataagcttcttaagatggaagagactttgcatcagcgtgtcattggtcaagatgaggctgtgaaagccataagtcgctccatccgccgtgctcgtgtgggcctcaagaacccgaacaggccgattgcaagcttcattttcgcaggtccaaccggtgttggtaaatccgagctcgcaaaagcacttgcagcatattactttggatctgaggaggccatgatcaggcttgatatgagtgaattcatggagaggcacactgtatccaagttgattggttcacccccagggtatgttgggtacacggaggktgracagctgactgaggcagttcgacgcaggccatacacagtcgtgcttttcgacgagatcgaaaaggcgcatccagatcagggaagaacagtggacttcaagaacacacttctcataatgacttcgaacgtcggaagcagcgtcatcgagaagggtggtcggaagataggtttcgatctcgattacgatgagaaggacagcagctacagcaggatcaagagccttgtcgtcgaggagatgaagcagtacttccgccccgagttcctcaaccgtctcgacgagatgatcgtcttcaggcaactcaccaagctggaggtcaaggagatcgccgagatcatgctcaaggaggtctttgacaggctcaaggccaaggacattgacctccaggtcaccgagaagttcaaggagcgtatcgttgacgaaggcttcaacccgagctatggtgcgaggccgctaaggagggccatcatgaggctcctggaggacagcctcgcggagaagatgctagctggggaggtkaaggagggtgattctgccattgtcsawgtggatyccgaggggaaggtgattgtactgaatggccaaagtgggttgcctgagctttcaactccggctgtcactgtgtag

SEQ ID NO: 3646 - DNA, 1692 bp, Oryza sativa
atgggcaactgctgcgtgtcccggccgtccggcgccgacaagcggcggcgctgcggcagctccaccgccccgcacacccgcggcggcaggcgggtgatcggcgccgccaacatgcggtgcctctccacggtctcctccgtgtcggacgcggcgcgcgccgtgatgtcgaacgagccggcgaccgtgctgggcaacagcggcagcagcggcaacggcggcgtgatggcggcggaggagatgctgcggcggtacgagatcggggaggagctgggtcggggggagttcggggtgacgcggcggtgccgggacgcggtgacgggggagcggctggcgtgcaagtcgatcagcaagcggaagctccggagcagcgtggacgtggaggacgtgcggcgggaggtggccatcatgcggtcgctgccggcgcacgccaacgtggtgaggctccgggaggcgttcgaggacgccgacgccgtccacctcgtcatggaggtctgcgagggcggcgagctcttcgaccgcatcgtcgcccgcggccactacaccgagcgcgccgccgccgccgtcatgcgcaccatcatggacgtcgtccagcactgtcacaagaacggcgtcatgcatcgggacctcaaacctgagaactttctgtatgccaatgcatctgagaactcccctctcaaggtcatcgacttcggcctctcagtgtgcttcaaacctggtgcaagattcaatgagattgttggatctccctactacatggcaccagaagtcctgaagagaaactatggacaagaaatagacatatggagtgcaggagtcatactgtacatcttgctatgtggtgttcctcctttctgggccgagaccgacgaagggatcgcacaggccatcatccggtcacatatcgacttccaaagagagccttggccaaaggtgtcagataatgccaaggatcttgtaaggaggatgcttgatccaaacccatatactcggttgacggctcaacagaatgaagagcatccttggatacagaatgcaagtgcagctcccaacattcctctgggagaagcagtcaggtccaggctgaagcaattcactgttatgaacaagttcaagaagaaggccttacttgtggtggcggagtacttaccaaccgaagagctggatgcaatcagggagctgttcaatatgttggacaccaaaaagaaggggcacttgacactagaagagctcagaaagggactgcaagtgatagggcacaacatccatgacacagatgtcgatatgctcatggaagctgcagacatagatggaaatggcatactggattgcaaggagtttgtgacagtatccattcacctgaagaaaatccgtagcgatgagcaccttccgaaggtgttcagcttcttcgacaagaacggcagcgggtacatagagatcgaagagttgaaagaagccctctccccaagaggtgaccagaagtcgatcgacgacatatttctggatgttgacatagacaaggatgggaagataagctacgaggagtttgagttaatgatgtcagccggaatggactggaggaatgcatcccggcaatactcgagagcagtttacaacactctcagccgcaagatattcaaggaagtgtccctgaagcttgatcacagtggtccacttgttgcagcaggaaaatag

SEQ ID NO: 3647 - DNA, 915 bp, Oryza sativa
atgccggagcacgggtcgaagcccgacatctccttcgccggccgctttaccgcaagcgccatcgctgcatgcttcgctgaggtgtgcacgatccccctggatacggccaaggtgaggcttcagctgcagaagaacgtggccgccgatgccgcccccaagtaccgcggcctcctcggcaccgccgccaccatcgcgcgcgaggaaggcgccgccgctctctggaagggcatcgtcccgggactccaccgccagtgcatctacggcggcctccgcatcggcctctacgagcccgtccgtaccgtgaaatccttctacgttggcaaagaccatgtcggggatgtgcctctcaccaagaagatcgctgccggcttcaccactggtgccattgcgatcagtatcgccaaccccactgaccttgtcaaggttaggcttcaggcggagggcaagctggcgcccggcgccccgcgccgatatgctggggccatggatgcctatgccaagattgttaggcaggaagggtttgctgctttgtggactggcattggacccaatgttgcgcgcaatgccatcatcaatgctgccgagttggccagctatgatcaagtcaagcagactattttgaagcttcctgggttcaaagatgatgtggtcactcacctcttatctggtctgggcgcgggcttcttcgctgtctgtgttggttctccagtggatgtggtcaagtcaagaatgatgggtgactcggcctacacaagtactattgattgtttcgtgaagacgctgaagaatgatggacctctggcattttacaaaggcttcctcccaaactttgctagactgggatcatggaatgtgataatgttcttgacactggagcaggtccagaagctgtttgtgaggaaacctggtagttga

SEQ ID NO: 3648 - DNA, 1850 bp, Oryza sativa
atggagcacggtggccacgagctcgccgtcgtcgtcctcgtcttgctgcttctcgtgtccgccacctcgtgcacgttcctggaggaggacgtgattcttggcacggtggaggaggcgaaggtggcgaggctgggtggcggcggcggtggcggcagcaagggcgcgaacgcgagcacgaggagagcggacaacacctgcgccggcgtcggcgtcggcgtcggcggcggcggcggcggtggcggtggcggtggagggggtgggagagggaggttttacttggggtggaaggaggagattgccgggatggcggggcggccggagacggcggcgtggctgcgcgcggtgcggcggcggatccacgagcggccggagctggcgtacgaggaggtggagacgagccggctggtgcgcgacgagctggacgccatgggcgtcgggttccgccacccggtcgcccgcaccggcgtcgtcgccaacatcggcaccggccggccgccggtggtcgcgctccgggccgacatggacgcgctgcccatccagacctttttggggttgatccagactgtgtgtgtgcatgtgggaattggagtagtgactatacctggagggtgtgccagattgtattgctgtagttcaacagaggctctgaaaggcaggaagcagtggaatgggagccacaagagcaagaacccagggaagatgcacgcctgcggccacgacgcgcatgtggcgatgctcctcggcgccgccaagatactcaaggctcgcgagcaccatctcagggatttcaacttatatagtacgataataggacagccgggtacagtgaggctactgttccagccagccgaggagtcgggcgctggcgccaagcggatgatcgaaggcggcgcgctggaggacgtggaggcgatcttcgccgtccacgtgtcgcaccagcatccgacgtccgtgatcggctccaggaccggccctctgctcgccggctgcggcttcttcaaggccgtcatccacggcggccgccgctccggcgacgccgtcctcgccgccgcatccaccatcatcagcctgcagagcatcgtgtcccgcgaggcggatcccctcgactcgcaggtggtgtctgtggccatggtgaacggcagcgatcacccggcggcgacggcgagggcggcggcggcggaggaggaggaggagttcgtgctgggcggcacgttccgggcgttctcgaacgcaagcttctaccaggtgcggcggcggatcgaggaggtgatcacggcgcaggcgagggtgcacgggtgcgaggcggcggtggacttcttcgagaaccagagcttctacccgccgacggtgaacgacgcgcggatgtacgcgcacgtgaaggcggtcgccggcgagctctcgcgccggagctaccgcgacgtgccgccgatgatgggcgccgaggacttctccttctactcccaggtcgtccccgccggattctactacatcggcgtgcgcaacgagacgctcgacggacgacgtggcggcaagaaggccaaggacggtgktggcggcggcacggtgctggtgacggtggacggcgatgtggaactggagatggagacgctactgaaggcgtcggcgtacatcctgggcgcagcgggcagcagcatcgtgtacatggcggtgctggacgacggcgccgtgctggcggtgtgcaggatcggcagcgacgacgcatcgcccgcagcatggcgagagggctggccttcctccacgacaagaagttcgtgcggcaacgtccggccgagcaacatcctgctcgacgctgacatggagccgctattggcggacctcgaaatccacta

SEQ ID NO: 3649 - DNA, 1320 bp, Oryza sativa
atggccgcctcccccgccgccggggccgcggccgccaccgtctcgtcgttcgtctcgccgtcgtccttctcctccgtcaactttcgttttgaagctttcaagacgaaagtaccacgaaatgccaatatggccaagctgcaagctggctatctgtttcctgagattgccaggagaagggcagctcacctgctgaagtttcctgatgcgaagattataagccttgggatcggtgacactacagagcccattccagacgtcataactaatgccatggcaaagagagcacatgctttatccacagttgatggttatagtggttatggagctgaacagggtgaaaagaaactaagggcagctattgctgcaacctactatgcggatcttggtattgaagaaacagatatattcgtctctgatggtgcaaaatgtgacatttctcgtctgcaggtcctttttggatctaatgtgaagattgcagttcaagatccatcatatcctgcctatgttgattcaagtgttatcatggggcaaactggtttatatcaggaggatgttcagaagtatggaaatattgagtacatgaaatgcagtcctgaaaatgggtttttccctgatctgtcaagtgttccacgaacagatataatcttcttttgttcacccaacaatcctactggtgctgctgcatctcgggaccaattaaccaaattagtcaaatttgcaaaggacaatggatccattatagtttatgattctgcttatgccatgtacatatcagatgacagcccaaaatctatctttgaaattcctggagcaaaggaggttgccattgaaacagcatctttctccaaatatgctggattcactggtgtgcgtttgggttggactgtggttcctaaggagctccttttctcagatgggcatcctgttgctaaagatttcaaccgcatagtctgcacttgcttcaatggtgcatcaaacatttctcaagccggtggtttaggttgtctatctccagagggtctaaaggccatgagtgacgttgtcggcttctacaaggaaaatactaaaattattgttgacacatttacatcacttggattcaacgtctacggtgccaagaatgctccatatgtgtgggtgcacttccctggccgtaattcttgggatgtcttcgccgaaattcttgagaaggcacatgtggttactactcctggtagcggatttgggcccggtggtgaaggcttcgtaagggtcagtgcatttgggcacagagagaacattattgaagctgcgagaagactgaagcagctgtacaaatga

SEQ ID NO: 3650 - DNA, 978 bp, Oryza sativa
atggcagtcatggcagccgccgtgctggccgtgtgcagctttgcggcggtgaccatggcccagctggagatggacttctacagcaagacgtgcccgaacgtcgaggagatcgtccggcgggagatggaggagatcctccgggtggcgccgacgctcgccggcccgctcctccgcctccatttccacgactgcttcgtcagggggtgcgacgcgtcggtgctgattgactcgacggccggcaacgtggcggagaaggacgccaagcccaacctcactctccgcggcttcggggcggtgcagcgggtcaaggacaagctcaacgccgcctgcccggccaccgtctcctgcgccgacgtcctcgccctcatggcccgtgacgccgtcgtcctcgccaacgggccctcctggcccgtctcgctcggccgccgcgacggccgcctctccatcgccaacgacaccaaccagctgccgccccccaccgccaacttcacccagctctcccagatgttcgccgccaaaggcctcgacgccaaggacctcgtcgtcctctccggcggccacacgctcggcacggcgcactgcgcgctcttctccgaccgcctctacaacttcaccggcctggtgaacgacggcgacgtggacccggcgctggacgcggcgtacatggcgaagctcaaggccaagtgccggagcctgagcgacaacaccaccctgtcggagatggaccccggcagcttcctcaccttcgacgccagctactaccggctggtggccaagcgccgcggcatcttccactccgactccgcgctgctcaccgatcccgtcaccagggcctacgtcgagcgccaggccaccggccacttcgccgacgacttcttccgcgacttcgccgactccatggtgaagatgagcaccattgacgtgctcaccggggcgcagggcgagatcaggaacaagtgctacgccatcaacatataa

SEQ ID NO: 3651 - DNA, 1785 bp, Oryza sativa
atggccgattcgccaaaccctagctccggtgaccaccccgcgggcgtcggcgggtcgccggagaagcagcccccggtggatcggcgcgtcgcggcgctcgccgcgggcgcggcgggcccgggggcgagcccctcggctctcctcgagtcccccgtcctcctcaccaacttcaaggttgaaccctctccgacaactggtactctgagcatggctgcaattatgaacaagagtgcaaatccagacatacttccttcgcctagggataaaacatctggtagcacccatgaagatggtggctctcgagattttgaattcaagcctcatctgaattcatcctctcaatcgacggcttctgctatcaatgatcccaaaaagcatgaaacttctatgaaaaatgaaagcctgaatactgccctgtcatctgacgatatgatgatcgacmatatacctctatgttctcgtgagtcaactctcgcagtcaatatttcaagtgccccgagccaactggttggaatggttggtttaactgacagctcacctgctgaagttggtacatctgagttgcatcagatgaatagctctggaaatgctatgcaggagtcacagcctgaaagtgtggctgaaaagtctgcagaggatggttataactggcgcaaatatgggcaaaagcatgttaagggaagtgagaacccgagaagctattacaagtgcacacatcctaactgtgatgtaaaaaagctattggagcgttcgcttgatggtcagattactgaagtggtttataaagggcgtcacaatcaccctaagccccaacccaataggaggctgtctgccggtgcagttcctccaatccagggtgaagaaagatatgatggtgtggcaactactgatgacaaatcttcaaatgttcttagcattcttggtaatgcagtacatacagctggtatgattgagcctgttccaggctcagctagtgatgatgacaatgatgccggaggagggagaccttaccctggagatgatgctgttgaggatgatgatttagagtcaaaacgaaggaaaatggaatctgctgctattgatgctgctttgatgggcaagcctaaccgtgagcctcgtgttgtagtacaaacggttagtgaggttgacatcttggatgatgggtaccgctggcgcaagtatggccagaaagtagttaaaggaaaccccaatccacggagttactacaagtgcacaaatacaggatgcccagtcaggaagcatgttgagagagcatcacatgatccaaaatcagtcataacaacatatgaaggaaaacataaccatgaagtccctgcgtcgaggaatgcgagccatgagatgtccactccccccatgaagcctgttgtccatccaattaacagcaatatgcagggccttggtggcatgatgagagcatgtgaacctaggacatttccaaaccaatattctcaagcagctgaaagtgacaccatcagccttgatcttggtgttggaatcagcccgaaccacagcgatgccacaaaccaattgcagtcctcagtttctgatcagatgcagtatcaaatgcagcccatgggttcagtatacagtaatatgggacttccagcaatggcaatgccgactatggctggcaatgcagctagcaatatatatggttcgagagaagaaaaacctagtgaaggttttactttcaaagccacaccgatggaccattcggctaacttatgctacagtaccgccggcaatttagtcatgggtccgtga

SEQ ID NO: 3652 - DNA, 630 bp, Oryza sativa
atgggggaagtgtgcaagcgagtggcgccgagcgtgcgggaggaggaggaggaggaggagaatggcgacggcggcggcgtcgacccggcagcggagtcgtcgtcggcgaagctgtacgaggacgtgccggagatgccgctgatggcgctgaaccacatctcccgcctctgcaagtccatcgacgcctccgtccgcttctacgtcaaggccctcggcttcgtcctcatccaccgccctcccgctctcgacttcaacggcgcctggcttttcaactacggagttgggatccatctcgtccagagagacgacgcgaggagagcgcccgacgtcaaccccggggacctcgaccccatggacaaccacatctccttccaatgcgaggacatggggatgatggagaagaggctgaacgagatggggatcgagtacatgaagcggaccatcaacgaggaggagggctcgcccatcgaccagctcttcttcaaggaccccgacggcttcatgatcgagatctgcaactgcgagaacctcgagctcgtccccgctggcgccctcggccgcctcaggctgccccgagaccgccacaacccgccgctccggatggccgccgccggcaacgacgaggcgtga

SEQ ID NO: 3653 - DNA, 1014 bp, Oryza sativa
atggcaatatcagaaatgtcagctcttttctttctatttagtgctttgctaagaagttctttggtccacagtcaaggattgcagatagggttttatgataataattgccctgatgctgaggacatagtcaggtctaccgtcgaaaagtattacaacaatgatgcaaccatagccccaggcttgctcaggctacatttccatgactgttttgttcaaggatgtgatgcgtcagttttgatttcaggtgcatcctctgagaggactgcaccacagaattttggtatcagggggtttgaagtgatagatgatgctaagtcccagttggaagccgtatgctccggggtggtatcctgtgctgatatattggctctcgctgcacgcgatgccgttgatttgaccggtgggccaagctggtcagtcccactgggacggagagatggaagaatttcatcagcttcagatgccaaagccttgccgtctccggctgatcctgtatctgttcagaggcaaaaatttgcagctcaaggcctgacggaccgtgctcacaccatcgggcagacggactgcatctttttccggtaccggctctacaacttcacggcgacggggaacgcggacccgacgatcagcccgtcggcgctgccgcagctgcgggcgctgtgcccgcccgccggcgacggctcccggcgcgtggcgctggacctgggcagcccgggggcgttcgacgtgagcttcttcaagaacgtcagggacggcggcgccgtgctggagtccgaccagcggctgtggggcgacgccgcgacgcaggccgccgtgcagagcttcgccggcaacgtcagggggctcttcggcctccggttcagctacgagttccccaaggccatggtcaggatgagcagcatcgccgtcaagacggcagccagggcgagatcaggaggaagtgctccaagttcaactaggtgcagtagcccagtcgacagtgaattttgtgatcgatcgagtcacctgtcctga

SEQ ID NO: 3654 - DNA, 1686 bp, Oryza sativa
atgcgggggccggcggggctgccgctgccgctggtggtggcggtggcgctcgccgcggcggcggtgatggtggtggaggcgcggttcgtggtggagaagaacagcctgatggtgacgtcgccgacgtcgctgcgggggaggcacgacagcgccatcggcaacttcggcgtcccgcagtacggcgggagcatggccggcaccgtcgtgtaccccaaggacaacgccgacgcctgcgaagcctacgacggggaccgccacttccgcgccaagcccggcgcgctccccaacttcctcctcatcgaccgcggaaattgcctatttgctaagaaggtttggaatgcgcaaaatgctggtgcctcagcggtccttgtggttgatgacaaggatgagccactgattactatggacttgccacgggaagatgatgaggctgcaaagtatatacagaatataaccattccttctgctctgattgataaaaaattcggggaacagttgaaaaaagctattaaagatggtgaaatggtaaatgtgaatctggactggagggaggctgttccacatccagatgatcgggtggagtatgagttgtggacaaacagcaatgacgaatgtgggcctaaatgtgatatgctgatgaatttccttaaggaatttaaaggagctgctcaactactcgagaaaggtggttatagtcagttcacgccccattatatcacctggtactgtcctcaagcatttgttgttagcaagcaatgcaagtctcagtgtataaaccatggaaggtactgtgcgcctgatccagagcaggatttcagcactggttatgaaggaaaagatgttgttgttgagaacctgagacagctttgtgtatttcaagttgcaaaagagagcaaaaaaccatggatctggtgggattatgtaactgattttcacataaggtgcccaatgaaggacaaaaagtataacaagaaatgtgcagaaactgtcatcaaatcactaggtttagatgtaaagaaggttgacaagtgcatgggagatccaaatgctgattcggaccaccccttgcttaaaatggagcaggatgcacagattgggaaaggatcaagaggagatgttactatattgcctactcttgttgtgaacaatcggcaataccgaggaaagcttgaaaggaaagctgtcctcaaagctatatgtgctggctttgaagaaactaccgagccaaatgtttgtcttagtgatgaaatggaaactaatgagtgcctgaatgacaacgggggttgctggcaagacaaagctgctaatgtaacagcttgcagggacactttccgtggtagagtgtgtgaatgccctacattcaatggtgtgcagtttaaaggcgatggctacagcaattgtgaacctgctggaccaggaaagtgcttgataaatcatggcggctgttggcatgagactcgcaatggcaaaacattttctgcttgtcagacatcaatgagtgcaaagagaaaaaagcttgtcaatgtccagaatgcagttgcagagatacatggggtgactatgaatgtaagacagctgttcaggtcatacatggactctgagatcagagcaatcatggcacagtacatgccactggacagtcaaggggaggtgccaaatcatacaaatgatgaagaacaccattag

SEQ ID NO: 3655 - DNA, 963 bp, Oryza sativa
atggagggatccgccggggcgccgctccgcacgcgcgtgtgcatcatcgggagcgggccgtcggcgcacacggcggcgatctacgccgcccgcgcggagctcaagcccgtgctcttcgagggctggctcgccaacgacatcgcggcggggggccagctcaccaccaccaccgacgtcgagaacttcccggggttccccgaggggatcctcggcggcgagctcatggatcggtgccgcgcccagtccctccggttcggcaccagcatcatctccgagaccgtcaccgcggtcgacttctccgcccgccccttccgcgtcgcctccgactccaccaccgtgctcgccgacgccgtcgtcgtcgccaccggcgccgtcgcccggcgactccacttcgccggctccgacgcctactggaaccgcggcatctccgcctgcgccgtctgcgacggggccgccccaatcttcaggaacaaacccatcgccgtcatcggcggcggcgactccgccatggaggagtccaacttcctcaccaagtacggctcccatgtgtacatcatccaccgccgcaacaccttccgcgcctccaagatcatgcaggccagggcgttgtcaaaccccaagatccaggttttctgggactctgaggtcgtcgaggcctacggcggcgagccttggaggctcattggcctggctgtcaaggtgttcggtctcttcttcgccatcggacatgaaccggcgacgaagtttctcggcgggcagcttgagctcgatgctgatgggtatgtggccaccaagccaggctccacgcacaccagtgtgaagggggtctttgctgctggggatgtgcaggacaagaagtatcgccaggctattactgccgctggatcagagatcagtcgcttcatgggttgctatttgctagtgcgaattgcaatagaaattgttcagggcttgagtatgtag

SEQ ID NO: 3656 - DNA, 1488 bp, Oryza sativa
atggcactcgccgtcgtcgtcgtcgcgctcctcgtcgccttcctcacgccgctggccgtctacctggccggaagatcgacgaggacgaagccgccgccgcggcgcaacctgccgccgggatccctcggcctgccgctggtcggccagagcctgtccctgctgcgtgccatgcgtcgcaacaccgccgagcggtggctgcagggcaggatcgacaggtacgggcccgtgtcgaagctgtcgctgttcggcgcgccgacggtgctcctcgccggcccggcggcgaacaaggcggtgttcctcagcgaggcgctggcgcccaagcagccgcggagcctcgcggcgatcatcgggaggaggaacatgctggagctcgtcggcgacgaccaccgccgcgtgcgcggcgcgctggcgcagttcctgaggccggagatgctgcggcggtacgtgggcaggatcgacggcgaggtcaggcgccacctcgccgggcgttgggccgggcgccgcaccgtcgcggtgctgccgctgatgaagctgctgacgctcgacgtcatcgccaccctgctgttcgggctcgcgcgcggcgccgtccgggaacggctcgccgccgcgttcgccgacatgctggagggcctgtgggcggtgccgctcgacctgccgttcaccgcgttccgccggagcctcagggcgagcgcgagggctcgccggctgctcgcggcgacggtgagggagaagaaggccaacctggagcagggcgagtcgtctccatcggacgacctcatcagctacctcgtcagcctccgagacggcgacggcggcggcggccggccgctgctcaccgaggaggagatcatcgacaactccatcgtctgcctcaccgccggccacgacacctccgccatcctcttgaccttcatggtccgccacctcgccgacgaccctgccatcctcgccgccatgcacgaggagatcgcgaggagcaagcgagacggcgaggcgctgacatgggaggacgtggcgaggatgaagctgacatggcgcgtcgcgcaggagacgctccgcatggtgcccccggtgttcggcagcttcaggagggccctcgaggacgtcgagctcgacggcggctacgtcatcccgaaagggtggcaggtgttctgggcgccgtgcgtgacgcacatggacccggccatctaccacgacccggacaagttcgacccgtcgcggttcgacgcccaggcggcggcgtcggcgccgccgccgtactcgttcgtggcgttcggcggcgggccgaggatctgccccgggatggagctcgcgagggtggagacgctggtgacgatgcactacctggtgaggcacttcaggtggaggctctgctgcgggggggaggagaacaccttcgtcagggacccgctgccgtcgccggccaacgggctccccgtcgagctcgaccacattgctcctctccgctgcgacgagttcaactcctga

SEQ ID NO: 3657 - DNA, 2688 bp, Oryza sativa
atggcgggcggcgggggctgggttgccgttgccctccctccctccctcctcgagattccagcggaagccgcgcggtgcgtgaacagcccggaggagttcatcggcgccatcaggacaaagttcatcaggctcaaggaggaggtcgacgccgagctcggggtgttcgccggggacctcgtcggcgcgctcgacaaggccgacggggacgaggagcgcgtcgcgctcgaggacctgctcgtcgtcgcgcagcggtgcgccgagatgagccccgaggagctctgggtcaagtgcgagtgcatcgtccagggcctcgacgaccgccgccaggagctcaccgccggcgtcctcaagcaggcgcacacccgcgtcctcttcatcctcacgcgctgcacccgcctcctccagttccgcaaggaaggcggcggatacgtcgccgccgacgacaagcagcacgtcctcagcctgcaccagctcagcgacctcggcctctaccccttcaaggtcgccggcggctccagcgagctcggccgcaagagcacctccagcttgaccgagctcaaggagaggctcatcaggcggaggatgctggagcacaagcaactcaccctcgacttctcggcgggccgtgtcatttcgtcagacaccggcggcgattccccgggcagcggcggcaagatctcatcctggaagaagcttccatcccctgccgagaagaccctgcacaaggttacggaaccgacaacggaggagaagaccacccctacaaagaagaaggccattacgaggaacaaggtcgccgtggatgagatcgtcgagaggattgacgcggctagcattcaccccgacggattgtcatatcttggggactctgctgtgaagctcgaggttccatctgggttcccagaggctcagcagatcatcgtcgacgggaagccgaggatgatatgcaggatctgtgactttgagatccccatggtatgcgcagaagggcacttcatagtgtgcacattagctgatcggtgtgattccaagggcctgaatacggaccagcggctgcagagggttgccgaggtgctcgggagggttttgggttgctttgaatcgaagagcccgcaaactgcagaatgtaatcataatgagactgcaagaggtagcacgtcgagtttaacggaatccgatggatccatggatcatgatattctgtctcatctgttgacagtgccatcgacagagttgttttcagagggagcactcacaccagcgtcaggcagcatgccacagtcaccattgctgacaccaagaactagccacgcagagtcacagctgactaaacacaaggcattcgtggaactagagaactttcagcaggttgaaagcttaatgactattgctagaggcatcgagagaataaaaaactctgagtacaactcgcttgaggacttgagctcttatctagaagatctaaatgctgtcattgacacaagaaaagtggatgcccttgttgtggagacatttggaagaaggatagctaaattactacaggagaaatttattcaactatgcggacaaatagaggactcaaacactgattcattaggttcaatagacgaagatggtcctatggagagtagtgtaagctcgagaacaagccagatgaatggtaaattcaaagatcgtacctcaattgaggactttgaaattataaagccaatcagccgtggtgcatttgggcgtgtgtttcttgcaaagaaaagggtaacaggagacctttttgccatcaaggtgctcaaaaaggctgatatgatccgcaagaatgcagtggaaagcatcttggcagaacgtgatatcttaatatcagctcgcaacccatttgtggttcgatttttctactccttcacatgtagggaaaacctttatcttgttatggagtacttgaatggaggagatctgtattccctcttgagaaacctaggttgtttagatgaagatatggcaaggacgtatatggctgaacttgttcttgctttggagtatctgcattctatgaatgtgattcatcgtgatttgaagcccgataaccttttgatctcccgtgatggccatataaagttgactgattttgggctatcaaaagttggtcttatcaatagcaccgatgatttgtctggtccagatgtcagcaatgttcttgttggtgatcatcaacctgcagatgcagaacaacgtgcacaaaagcgagagcaaaggcaaaaacaggcagctgtgggtactccagactatttggcccctgagatactgctagggatgacccatggtccaactgcagattggtggtcagttggcgtcattctctttgagcttcttgtgggaattcctccattcaacgctgagcatccgcagataatatttgataatataatgaatcgggaaataccttggccacaagtaccagaggaactgagtttcgaagcatatgacttgattgacaaatgctattttaactcagttaactttcatgtcaggttgctaattgaaaaccctgtacaaagattaggagcaactggtgctggagaggtaaaggctcatcctttcttcaaagatataaattgggatatgattgccagacaacagatgatgaatatgatacaagttattttgcctgtcgtcacacatgggacgaccaagtga

SEQ ID NO: 3658 - DNA, 849 bp, Oryza sativa
atggctcatctggcgccgctcttcctcctcctcctcctcctcctcctcccgctccacgccgccgccacgccgtccgcccacccggcctaccccaacgagccgccgtcctgcgcggcggcggtgccggtgccggagcggcgggaggcgcatggcggggggcgcatcctggacataacccactactaccgggaggacatgccgtcgtgggagtcggacggcggggtcggccaattcctgtggctccccgcctccatgcgcaacggttcccgcgccaacaactccgagatgcgcctgcccacccacaccggcacccacgtagacgccccgggccacgtcttccagcactacttcgacgccggcttcgacgtcgactccctcgacctcgaagtgctcaatggtctggcattgttagttgatgttccaagagatgataatattacagctaaaatgatggaatcattacatattcctaaaggaattcaacgagtgctatttagaacactaaatactgacagcatgtctacggatagttttattgcgtattcttataatctatctattatggaatttcctgaaataccgcacttagtaaagctgtcatcttgcaggcaactaatgtggaagaaagaatttgacactagttatgtgggttttatggaggatggcgcacaatggttggtagacaacacagatattaaacttgtcgcgtatgcaactatccgtacaattgactcttatcttaagcttgctcatgcaaatgattattgttttggcatggatattgtgtgtctcaggcagaagcagacatcagctgaccttctgttcaaggatgatattaatattgaatag

SEQ ID NO: 3659 - DNA, 1580 bp, Oryza sativa
atgatgctgctcgtcgcctgccgccgccgcctcgcctacgaccaccccaagatcgcctccttcggggatctgggcgccgccgtgtgcggccccgcggggcggcacgtcgttgacgccatgctcgtgctcagccaggccagcttctgcgtcggctacctcatcttcatctccaacaccatggcgcacctttacccggttggggattcgtcgccctcgtcgccgctcctcaccgccaaggcgatcttcatctgggtcatgctgccgttccagctggggcttaactccatcaagacgctgacgctcctygcgccgctcagcatcttcgccgacgtcgtcgatctcggcgccatgggcgtcgtcctcggccaggacgtgtccacctggctcgccaacaagccccccgtgttcgcctccgccggacccacggagatcctctacggcctcggcgtcgccgtctatgccttcgagggcatcggcatggtcctcccgctggaggccgaggccgccgacaagcgcaagttcggcggcacgctcgcgctgtccatggcgttcatcgccgtcatgtacgggctgttcggcgccatgggttacctcgcgttcggcgcggccacgcgggacatcatcaccaccaacctcggcaccgggtggctgtccgtcaccgtgcagctgggtctctgcatcaacctcttcttcaccatgccggtgatgatgaacccggtctacgaggtcgccgagcggctgctctgccgcaagcgctacgcctggtggctgcgctggctcctcgtcatggtcgtcgggctcatggccatgctcgtgcccaacttcgccgacttcctctccctcgtcgggagcagcgtctgcgtcctgctcgggttcgtgctgccggcggcgttccacctcaaggtgttcggcgctgaggtcgggtggcccgggctcgccggcgacgtcgccgtcatcgtcgtcgggaccgcgcttgcggtgtccgggacatggacatcgctcgcacaaatcttcagttcttccgatgtagctatgatatgcataggaccccgaatcattttcgttctaggtttgccactagacgggagggtggaggaggaggacggctggcgttgtaggcggcaccgcatctcttgggagagagttgatggcagcggccgacaggagaggtgcgtggtgactggcgaggagaagctcgaggaccggcggacgcatcctcgcccacctcaactcccaccagccgctcacgcacttcgcctctctcgaggagaaccttgtctcccactccgcattgctcgacaaggccttagccgccgcgacacctacacctccgagtccctcgtggtgttggaggcccatgaggccgctgtccccgcgtgcctcgacaagactgaggccgtgttgtccacggatcccccgctcactgattttcagggcacactccaaattgatgtgtggtttcatggacgccgccgcgcaggcgcttcatggcggcatgccaacgggagctcgtcgccgtttggaaagaggttggtccctcattgtcaccacgtcggtcgacccatcccgcctcatgcttg

SEQ ID NO: 3660 - DNA, 1227 bp, Oryza sativa
atgcagagcgcggcggccgtcgggctcctccggccatgcggcgccaccaccgccgccgccccgctccagctccgcaaccctagcccccggggcttcggcgtcggagtcgggcagccgctgctcccgccgagggggctccgcctctccgccgtggccccgcgcgcgggcatctccgcccggcgcatcgggctcgtgccggcytccccggagcaggaggatgagcggcggcggggcgcacgcgacgtggccktggcggcgacagcggcggcggcggttaaggcagggccgraggaggttggagggctcgcgaagacgctgcagctcggcgcgctcttcgggctgtggtacctcttcaacatctacttcaacatctacaacaagcaggttttgaaggtttttccataccccataaacatcacaaatgtccagtttgctgtcggcactgtcattgctctgttcatgtggattaccggtatccttaaaagaccaaagatctccggtgcgcagcttgctgctatccttcctctcgctatggtccacaccatgggcaatcttttcacgaacatgagccttggaaaggttgcagtgtcatttacacatactatcaaggctatggagcctttcttttcagttctgctttcagcacttttcctcggagagatgcctactccttttgttgtattgtctcttgttccaattgttggtggtgtggcattggcatctcttactgaagcttcatttaactgggctggattttggagtgcaatggcctcaaatgtcaccttccagtcaaggaatgtgttgagcaagaagcttatggtgaagaaggaggaatctctggacaacattaccctcttctcaatcattacagtgatgtcattcttcctcttggccccagtaaccttgctaacagagggtgtcaaagtcactccgacagttctgcagtctgctggtctgaacttaaaacagatatacacaaggtcactgattgctgcgttctgtttccatgcataccaacaggtgtcgtacatgatcctggcaagagtgtcccctgttactcactcggtgggtaactgtgtcaagcgagtggtggtcattgtgacatccgttctgttcttccgcacccctgtttcgcctatcaactctctgggaaccggagtcgctcttgccggagttttcctgtactcacaattgaagcggcttaaacccaagcccaagactgcctga

SEQ ID NO: 3661 - DNA, 1572 bp, Oryza sativa
atgccgggcggcggcgcgatggtggcggcgagcggcgccggccggcctgagtacccgggcgggctcaccatgttcgtgtccatggcgtgcctcgtggcggccaccggcggcctcatcttcggctacgacatcggcgtctccggcggcgtcacctccatggacccgttcctcagcaggttcttcccgtcggtgtaccgcgcgcagtcggcggcggctgcggcggccggcgggaaccagtactgcaggttcgacagccagctgctgaccatgttcacctcgtcgctctacctcgccgcgctcgcctcgtcgctcggcgccgccacggtgacgcgcgtggcgggtcgcaagtggtccatgttcgccggcgggctagtgttcctcgccgggtgcgcgctcaacggcgcggcggcgaacgtggcgatgctcatcgtcggccgcgtcctgctcggcgtcggcatcgggttcgccaaccagagcgtgccggtgtacctgtcggagatggcgccggcgaggatgcgcgggatgctcaacaacgggttccagatgatgatcaccaccggcgtgctcgccgccaacctcatcaactacggcaccgcgaggatcgccggcgggttggggtggcgcctcagcctggcgctcgcggcggtcccggccgccgtcatgaccgccggcgcgctgttcctcccggagacgcccaactccctcctggagcgcgggaggcgcggcgaggccaggcggatgctccagcgcgtgcgcggcgagggcgtggacatggaggacgagtacaacgacctggtcgccgccggcgaggcgtcccacgccgtggcgagcccgtggcgcgacatcctgcgccgccgcaaccggccgccgctggtgatggcggtggcgatcccgctgttccagcagctgaccggcatcaacgtgatcatgttctacgcgccggtgctgttcaggacgctggggttcggcggcggcgcgtcgctgatgtcggcggtgatcaccggcggcgtgaacatggcggcgacgctggtgtccgtgctcgccgtggaccgggtggggcggcgggcgctgttcctggagggcggcgcgcagatggtagcgagccaggcggcggtgggggcgctgatcggggcgaggctggggtggtcggggacggcggcgatcccggcggggtacgcggcggctgtggtggcggccatgtgcgtgtacgtggcggcgttcgcgtggtcatgggggccattggcgtggctggtgccgagcgaggtgatgccgctggaggtgaggccggcggggcagagcatcacggtggcggtgaacatggccatgacgttcgccgtcgcgcaggccttcctgccgctgctctgccgcctcaggttcgtgctcttcttcttcttcgccgggtgggtcgccgccatgaccgccttcgtcgcgctcttcgtgccggagaccaagggcgtccccatcgaggacatggccgccgtctggagcgaccactggtactggaagcgcttcgtcgacggcgacggcgacggcgcacgacgccggggagacattgagatgggacacaagtag

SEQ ID NO: 3662 - DNA, 650 bp, Oryza sativa
atggcctcaacatggttcttcctccttgscctcctggctgtatcgatttcgaatgctttcgcctccgatcccagccaactccaggacttctgcgtcgctgacaagatgtcgcaagttctagtcaatggatttgcatgcaaggacccagcggccatcaccgtggaagacttcttcttctccggccttcacatggctggaaacaccagcaacaggcagggatcggccgtgacaggagtcaacgtcgcccagatctctgggctcaacaccttgggcatctctttggcccgcgtcgactatgcgccctatggtcttaaccctccgcacattcacccacgtgcgaccgagatcctgactatactggagggctcactctacgtcggcttcgttacctccaaccccgagaacaagctgttcaccaaggttcttaacaagggggacgtattcgtgtttcctcaggggttgatccactttcagttcaactatggtacaaaagatgttatagcccttgcggctctaagtagccagaaccctggagtcatcaccatagcaaatgcggtgtttggatcgaagccgttcatatcagatgatatccttgccaaggcctttcaggtggagaagaagatagtagaccggattcaagctcagttctg

SEQ ID NO: 3663 - DNA, 1446 bp, Oryza sativa
atggaggagagaatacctctgctctcgaaacgattcccggcggacggcaccgccggagtgggaggagggagggaggaggagggcggagataggtggtggagcgggctggcgcgggaggcaggaaaggtggggtccatggcgctgcccatggccgcgatgagcgtggcgcagaacgccgtgcaggtggcgtccaacatgatggtggggcacctccccggcgtcctcccgctctccgcctccgccatcgccacctccctcgccagcgtctccggcttcagcctcctcgttggaatggcaagtggattagaaactctctgcggtcaagcttatggggcaaaacagtatgacaagttaggagtgcaaacctacagagcaatagtcacactaacagtagtcacaattcccatctcacttctatgggtattcataggcaaactcttgaccctaataggtcaggaccccgtgatctcacatgaagctggaagatacatagtgtggttgattccaggactcttcgcatacgcggtctgccagcctctcacaaaatttctgcagtctcagagtctaatatttcccatgctctggtcctccattgcaactctgctcctgcacatccctctgtcttggctgttggtgttcaagaccagcatgggatttactggagctgctttagcaattagcatatcttactggttgaatacattcatgctcgctgcatacatcagattctcatgttcttgtaaggtgactcgctcgcctcctacaatcgaggcattcagaggagtcggtttgtttctgcgaatagcactaccatctgcactaatgttatgttttgaatggtggtcatttgagatccttgttctcctgtcaggacttctacccaacccagagcttgaaagttcagttccttccatatgcactcgagtagcaaatgagttaggcgctgggaatcctgaaggagctcgatcggctgttcaccttgtaatgtctattgctgggacagaggcagttcttgttactgggatgctgtttgcagcacagcgcatcttgggctatgcttacagcagtgatgaggaggttgtcacatatttcacctcaatggttccttttgtgtgcatctcagttgctgctgatagcctacaaggagttttatcaggtattgctcggggttgcggatggcagcacctgggagcctatgtaaacctcggttcattctacctggttggcattccggtagccctacttcttggctttggtttcaagatggaaggcaaagggctttggctgggcatcgcctgtggttccgtattacaattcttgcttctcgccgtcattgcattcttcagcaactggcaaaagatggccgagaaagcgagggagagaattttcggcgagacaccgtcagagaagcaacatttggtgcttgatgcaacgaattcggtctga

SEQ ID NO: 3664 - DNA, 2028 bp, Oryza sativa
atgcagctggggcttctcctcgccgcgcttctcctcttcacgtcgtcgctggccggctctgtggcggctgccgcaccgccgccgccggcgggggccaagggtggtggtgccaagagcggcggcggcggcggcaccgtgatcgggatcgacctcggcacgacgtactcgtgcgtcggcgtctaccggaacgaccgtgtcgagatcatcgccaacgaccaggggaaccggatcacgccctcgtgggtcgccttcaccgacggcggcgagcggctcatcggcgaggcagccaagaaccaggcggcggccaacccggagcggaccatctacgacgccaagcggctcatcggccggcagttctccgacgccgaggtgcagcgcgacatgaagctgctgccgttcgccgtcgtcgaccggaacggcaagccgcacgtgcgcgtcgaggtgaaggacggcgacgtgcgcgtgttcagcccggaggaggtgagcgccatggtgctcacccggatgaaggagacggccgaggcctacctcggcgagaaggtcacgcgcgccgtcgtcaccgtcccggcctacttcaacgacgcgcagcggcaggccaccaaggacgccggcgtcatcgccgggctcaccgtcgaccgcatcatcaacgagccgaccgccgccgccatcgcctacggcatcgacaagaagggcgcsgagaagaacgtcctcgtcttcgacctcggcggcggcacgttcgacgtcagcatcctcgccatcgacaacggcgtgttcgaggtccttgccaccaacggcgacacccacctcggcggcgaggacttcgaccaacgcctcatggaccacttcgtcaaggtcatccgccggaagcacgggcgcgacatcgccggcgacgcgcgcgcgctgggcaagctccgccgcgagtgcgagcgcgccaagcgcgcgctcagcaaccagcaccaggtgcgcgtcgagatcgagtccctgttcgacggcgtcgacttctcggagccgctctcccgggcgcggttcgaggagctcaacggcgacctcttcaagaagacgatggtgccggtgaggaaggccatggcggacgccgggctgggcaagggcgacatcgacgagatcgtcctcgtcggcggcagcaccaggatccccaaggtgcagcagctgctcaaggactacttcggtggcaaggagcccaaccgcggcgtcaaccccgacgaggccgtggcgtacggcgccgccgtgcaggccagcatcatcagcggccacgtcgacgagaacacggagagcatgatcctcctcgacgtcgcgccgctcaccctcggcctggagacggccggcggcgtgatgaccaagctgatcccgcgcaacacggtggtgccgacgaagaagacgcaggtgttcaccacgtacaaggacaggcagacgacggtgaccatccaggtgttcgagggcgagcggagcatgacgagggacaaccggctgctcggcaagttcgacctcaccggcatcgcgccggcgccgaggggggcgccgcagatcgcggtgacgttcgaggtggacgccaacggcatcctcagcgtgctggccgccgacaaggccaccggcaggtcggagaagatcaccatctccggcgacgaccgcaagatcagccaggaggagatcgaccggatggtgcgcgaggcggaggagttcgccgacgaggaccgccggcacagggagcaggtggacgcccggaacagcctggaggcgtacgtctacaacgtcaagagcacgctcggcggcaagatggcggacgccatggagggggaggagaaggagaaggtggaggaggcggtgagggaggcgcacgagtggctggacggcaacccggacgccggcaaggaggagtacgaggagaagctgcgggagctggaggacgtgtgcaaccccgtcatgtcggcggtgtaccagaggtccggcggcggcggcggcgcaccggaagatggcaacgtcgacgacgaggatgaccacgatgagctttag

SEQ ID NO: 3665 - DNA, 2030 bp, Oryza sativa
atgcagctggggcttctcstcgcygcgcttctcctcttcacgtcgtcgctggccggctctgtggcggccgccgcacygccgccgccggcgggggccaagggtggtggtgccaagagcggcggcggcggcggcaccgtgatcgggatcgacctcggcacgacgtactcgtgcgtcggmgtctaccggaacgrccrtgtcgagatcatcgccaacgaccaggggaaccggatcacgccctcgtgggtcgccttcaccgacggcggcgagcggctcatcggcgaggcagccaagaaccaggcggcggccaacccggagcggaccatctacgacgccaagcggctcatcggccggcagttctccgacgccgaggtgcagcgcgacatgaagctgctgccgttcgccgtcgtcgaccggaacggcaagccgcacgtgcgcgtcgaggtgaaggacggcgacgtgcgcgtgttcagcccggaggaggtgagcgccatggtgctcacgcggatgaaggagacggccgaggcctacctcggcgagaaggtcacgcgcgccgtcgtcaccgtcccggcctacttcaacgacgcgcagcggcaggccaccaaggacgccggcgtcatcgccgggctcaccgtcgaccgcatcatcaacgagccgaccgccgccgccatcgcctacggcatcgacaagaagggcgccgagaagaacgtcctcgtcttcgacctcggcggcggcacgttcgacgtcagcatcctcgccatcgacaacggcgtgttcgaggtccttgccaccaacggcgacacccacctcggcggcgaggacttcgaccaacgcctcatggaccacttcgtcaaggtcatccgccggaagcacgggcgcgacatcgccggcgacgcgcgcgcgctgggcaagctccgccgcgagtgcgagcgcgccaagcgcgcgctcagcaaccagcaccaggtgcgcgtcgagatcgagtccctgttcgacggcgtcgacttctcggagccgctctcccgggcgcggttcgaggagctcaacggcgacctcttcaagaagacgatggtgccggtgaggaaggccatggcggacgccgggctgggcaagggcgacatcgacgagatcgtcctcgtcggcggcagcaccaggatccccaaggtgcagcagctgctcaaggactacttcggtggcaaggagcccaaccgcggcgtcaaccccgacgaggccgtggcgtacggcgccgccgtgcaggccagcatcatcagcggccacgtcgacgagaacacggagagcatgatcctcctcgacgtcgcgccgctcaccctcggcctggagacggccggcggcgtgatgaccaagctgatcccgcgcaacacggtggtgccgacgaagaagacgcaggtgttcaccacgtacaaggacargcagacgacggtgaccatccaggtgttcgagggcgagcggagcatgacgagggacaaccggctgctcggcaggttcgacctcgccggcatcgcgccggcgccgaggggggcgccgcagatcgmggtgacgttcgaggtggacgckaacggcatcctcagcgtgctggccgccgacaaggccaccggcaggtcggagaagatcaccatctccggcgacgaccgcaagatcagccaggaggagatcgaccggatggtgcgcgaggcggaggagttcgccgacgaggaccgccggcacagggagcaggtggacgcccggaacagcctggaggcgtacgtctacaacgtcaagaacacgctcggcggcaagatggcggacgccatggagggcgaggagaaggacaaggtggaggaggcggtgagggaggcgtacgagtggctggacggcaacccggacgccggcaaggaggagtacgaggagaagctgmgggagctggaggacgtgtgcaaccccgtcatgtcggcggtctaccagaggtccggcggcggcggcggcggcgcaccggaagatggcaacgtcgacgacgaggatgaccacgatgagcttta

SEQ ID NO: 3666 - DNA, 1056 bp, Oryza sativa
atgggcgccgtcctcggcaccgggagggtggggactctgactcgggtggcgctgacgatcgtcgtcttcctgctgctcctgccatcgcacgccctcgccgcggccgtcgcgaaggacacctccgccacactggtcgagacgctgccgctgcccacgacgctggtcggcccggagagcgtcgcgttcgacaagttcggcgatggcccctacagcggcgtctccgacggccgcatcctccgttgggacggcgccgacgaaggttggacgacgtactcccactccccggggtacaacgtcgccaagtgcatggctcccaagctccatcccgccgagctcaccgagagcaagtgcggccggccgctcggcctccggttccacaacacctccggtaacctctacatcgccgacgcgtacaagggcctcatgcgtgtcggcccgcgcggcggggaggcaacggtgctcgccacggaggccgacggcgtgccgttcaagttcaccaatggtgtcgacgtcaaccaggtcaccggcgaggtctacttcaccgacagcagcacgcgcttccagcgatcccagcacgagatggtcacggccaccggcgactccacgggccgcctgatgaagtacgacgcgacgacgggctacctcgacgtgctccagtccggaatgacgtaccccaacggcctcgcccttagcgccgatcggagtcacctcgtggtggcgcttacggggccgtgcaagctggtgaggcactggatcgatggccccaaggccggtacgtcggagccattcgccgagctgccgggctacccggacaacgtgaggcccgacgggaagggaggctactgggtggcgctgcaccgtgagaagacggagtcgccgtacggctcggacacccacctcctcgccgtgaggatcggtcgcaaggggaagatcttgcaggagttgagggggccgaagaacgtcaggccaacggaggtgattgagagaggcggcggcaagctttacttgggttcagttgtgtggagattatgggtaccccatacccacacggcatag

SEQ ID NO: 3667 - DNA, 1560 bp, Oryza sativa
atggatctatgctataatttcatgcagagatcagagaggtggatgcaggagagggctgagaagctgagagggcaaatccagacactatttgggacctgccacgacatgtcggcgaggatgaacttagtggattccgtccaacatctcggaattgatcacctcttccaagaggagatagaagatgctctaacaagcatccatggcagtgaattcagaagctctagtctctatgagattgctcttcggtttcgcttgcttagggaacatgggttttgggtgtctccagatgcattcaataaatttaagggagatgatggcaagtttcgaaatgatatagcgaatgacccaaaggggctactaagtttatacaacgctgcacacctcctcattcatggcgagccagaacttgaagaagcaatctcatttgcacgaaaacaccttgaattgatgagtcaagacagtgttctcaaccctccattagctgagcaagtcaagcgtgcacttagcctaccactgccaaggactttcaagagagttgagactatttgctacatgtcggagtacgaacgagaggcaggaaatatcccaattcttcttgaactcgcgaagctagattttaacctcctgcaacatatccacttggaggaactcaaagcaatttctgaatggtggaaagatctttatggatatatggagctacgttacattagggatcgtacgatagaggcatacgcttggtcctacatgatgttctacgaagaagactttgcattcaccagaatgtttgttgccaaaataattgcactggatactgtgatggatgatacgtatgatgctcatgccaccgttgaggaatgccggcagctaaacacagccatacaaagatgggacaaaagcgctatttctattttgccggagtacctgaaaaagttctatattaaattgctaatcaactttgaggagtttgagcaccaagtgtccgacaacgaaaaatacaaggttacttacaccaaacaagagtttcaaaggcagtctacttattacctacaagaagctgaatggtcctaccagaaacacaagccaagctttaaagatcaggtggttttgtccaccaaatcctcggccgtgcaattagtgtgtgtggctgctatgattggctggggtaatgcagtgacgacagaagcattcgagtgggcagctagtggtaatgatgcagtcatagcatgcgcaaagattggacgttttatgaatgatattgctgcatttaagtgtggaaagaacaagggagatgttgcgagctccgtagagtgttacatgaatgagaatagggtcacaagcgaggtcgcctttgcaaagattgattcactggtcgaagatgaatggagaaccacgaaccagacccgccttgagcatggtacactgctgcccatggtgcagcgagttgtgaacttcaccgtttctatggtactcttctacgatgacaggaatgatgcctacacatttgccacacttcttagggagattatagagtctctcttcgtgaggcctgctcccatctag

SEQ ID NO: 3668 - DNA, 590 bp, Oryza sativa
atggcgaaggcgcggaagcagcagccgcagggcccgttcgccggcggggccgccgccggggagaggtcgttcctcgggttccagtaccaccaccaaccaccgcggcggctccgtgcgccggcctacggcgacgacgacgacctccccgatttggcggaggctgatgtctggtacgcgccgtcgtcggaggggggcgcggatcatcgaggcggcggcggcggcggagggggaaggggagggctggaaatcggcggcggcggctggggcggagggaagcacaaggtgggcgggctgagccgggcgttcgcggacgggcggcaggtggcggcgtcggcgccggtgcaggtgcccgcgtggcccggccgctacgccgaccccgaccaggcggcgttcgcggaggaggagaagcgccgcgaggaggaggacgacgccggcgacggcgacggcgacgggtgggtgccgccgcacgtgtacctggcgcggcggcaggcgaggtcgtcggtggtggagggcgtcggacgaacactcaaggggcgcgacgcctcccgcgtccgcgacgccgtctggagccgaaccggcttcgacggctg

SEQ ID NO: 3669 - DNA, 4176 bp, Oryza sativa
atggggtcgctcaccagggcggaggaggaggagacggcggcggccgaggagtggtcgggcgaggcggtcgtctacgtcaacggcgtccgccgcgtgctccccgacggcctcgctcacctcaccctgctccaatacctcagagacattggtcttcctggaacaaagcttggatgtggtgaaggtggctgtggagcctgcactgtgatggtctcatgctatgatcaaactacaaagaagacacagcattttgcaatcaacgcatgcttggctccgctttattctgtggaaggaatgcacataatcacagtagagggaattgggaatcgtcagcgagctgtgtggaactatttatgtgatgaggtagttacttgttggctaaagaccttgagaaaggaacgtttagccatggcccacggttcacaatgtggattttgcacccctggttttgtgatgtcgatgtatgcattgctgagatcaagtgaacagcctcctactgaagagcagattgaagatagccttgcaggaaatttatgtcgctgtactggctacagaccaataatagacgccttccgtgttttctcgaaaagagatgatcttttgtacaacaattcatctctgaaaaatgcagatggccgacctatctgcccttcaacaggaaaaccatgttcctgcggagatcagaaagacatcaatggtagtgaatcttcattattgacacctacgaaaagctactcaccttgttcatacaatgagattgatggaaatgcgtacagtgagaaagaactcattttccccccagaacttcagttgagaaaagttacgtcacttaaattgaatgggtttaatgggattcggtggtatagacctcttaaactaaagcaagtattgcatttgaaagcatgctacccaaatgcaaaactaatcattggtaactctgaagtaggagttgaaacaaagttcaagaatgcccagtataaggtcttgatctcagttactcatgttccagagcttcatacccttaaagtgaaagaggatggtatacatattggttcttctgtaagacttgcacagctccaaaatttcctcagaaaggttattttagagcgtgattcacatgaaatttcatcctgtgaggcaatactgcggcaattaaaatggtttgctgggacacaaatcaggaatgttgcttctgttggaggtaacatttgtactgctagtccaatatcagatctaaatccactttggatggctacaggtgcaacgtttgagataattgatgtgaacaataatattaggaccattcctgcaaaagatttttttctgggttatcgtaaagttgacttaaaacctgatgagatattgctctctgttatactgccatggacaaggccatttgaatttgtcaaagaattcaagcaggcacatagaagggaggatgacattgcgttggtgaatgctggaatgcgtgtctatataagaaaagttgaaggtgattggataatttcggatgtttcaattatctatggaggggtagctgcagtttcacaccgtgcttcaaaaactgaaacctttctcactggaaaaaaatgggactatggattgttggataagacttttgatctgttgaaagaagacgtagttctggctgaaaatgcacctggtggaatggttgaatttcgcagttcacttactttgagtttctttttcaaatttttccttcatgttactcatgaaatgaatataaaaggattttggaaggatggattacatgcaaccaatctttcagccatacagtctttcactagacctgtcggtgttggaactcaatgttatgaattggttagacaaggaactgcagttggccaacctgtggttcacacatcagctatgcttcaggttactggtgaagcggaatatactgatgacacaccgacaccccccaataccttgcatgctgctctggtgctgagtacgaaagctcacgcacgcatattatctattgatgcttcacttgccaaatcttcccctgggtttgcgggtctcttcctttcaaaagacgtgcctggcgctaaccatactgggcctgttatccatgacgaggaggtttttgcatctgatgttgttacatgtgttggccagattgttggacttgttgtggcagatacccgtgataatgcaaaagctgctgcaaataaagtcaatattgagtattctgaacttccagcaattttatccatagaggaagctgtgaaagctggtagctttcatccaaatagcaagagatgcctagtaaaaggtaatgttgaacaatgttttctgtcgggtgcatgcgatagaattatagaaggaaaagtacaagttggaggtcaagagcacttctacatggagcctcagagcactcttgtatggccagttgattctggaaatgaaattcatatgatttcatctacccagaaggctccccagaagcaccaaaagtatgttgctaatgttcttggtcttccacaatcaagagttgtttgcaagactaagcgtattggtggtggatttggtggaaaagaaaccagatcagcaatatttgctgcagcagcatctgtagctgcttattgtttaaggcagcctgtaaagcttgttttggacagggatattgacatgatgacaactggacagaggcacagtttcctagggaagtacaaggtgggatttaccgatgatgggaagatattggccttagaccttgatgtttataacaatggtggtcattcacatgatttgtcccttccagtcctggagcgtgctatgtttcattcagacaatgtctatgatataccaaatgtcagagtcaatgggcaagtatgtttcacaaatttcccaagcaatactgctttcagaggttttggtggtccacaagctatgctgattgcagagaattggattcagcacatggctacagaactcaagcgaagtcctgaggagataaaagaacttaattttcaaagtgagggatctgtgcttcattatggccagttgcttcaaaattgtacaatacattcagtatgggatgaactaaaggtttcttgtaattttatggaagctcgcaaagctgtaattgattttaacaataataaccgttggagaaagcgtggcattgctatggttcccaccaagtttgggatatccttcactacaaaattcatgaatcaggttctgaggatgaacaattgcaggctgtgcttagtgcaagtttacactgatggaactgtccttgtaacgcatggtggggttgaaatggggcagggtttacacacaaaggtagcccaagttgcggcttcatcattcaatatccctcttagctctatatttatctcagaaacaagcactgataaggtaccaaatgcaacaccaacagcagcctctgctagttcagatttatatggtgctgcagttttggatgcttgtcagcaaattatggctcggatggaacctgttgcttcaagaggaaaccacaagtcctttgctgagttggttctagcatgctacctggaaaggatagatctctctgctcatggattttatatcactcctgatgttgggtttgactgggtgtctggcaagggaactccattctactatttcacatacggagcagcatttgcagaagttgaaattgataccctaactggggatttccacacaaggacagtagatattgttatggatcttggctgttcaattaatccggctattgatattggccagattgaaggaggttttatccaaggattaggttgggcggccctggaagaactaaaatggggggatgataaccacaagtggattcgacctggacatcttttcacttgtgggcctggctcttacaaaataccctctgtaaatgatatacctctaaacttcaaggtctcacttttgaagggcgttttgaatccaaaggtcattcactcatccaaggctgtaggagagccaccgtttttcctcggttcagccgtcttgtttgccataaaggatgcgatatctgccgcaagagctgaggagggtcacttcgactggttcccactcgacagcccagcaacaccggaaagaataagaatggcatgcgtggattccatcacaaagaaatttgctagcgtatattaccgtcccaagcttagtgtatag

SEQ ID NO: 3670 - DNA, 1053 bp, Oryza sativa
atgggcttcctcgactttcccttcgcctcctccgccgcggaggccggcggcggcggcgacacgcgcaggttccccggccacgacgaggtgctccggtatctggaggagttcgcgcggcggttcgacctgtacggcctcgtccgcttcgggacggaggtggttagggttcggagggatggcggcggcggcggcgggaggtgggcggtgacgtcgaggaagatcggggagaaggggaggcgtgaggaggaggaggaggtgtatgatgccatcgtggtttgcaatggccattacacggagcctcgcgtcgcccacatacctggggtggaggcttggcctggaaagcagatgcatagccacaattaccgcgttccagagcctttccacgatcaagtagtgatcataatcggggcatcagcaagtgcagtagacatctcaagggaccttgcaggtgttgcagaagaggttcatgttgctgatagatcagcacctgcctgcacttgcaaaaggcagcctggatatgataatatgtggctccattccatggtaaacgcccttttctcgtgctacttgtatgattttccattccttgaggatgatagcgccatcaccgttgatgacaactgtgtcgatccactatacaagcacgttttcccaccagaagtagcacctcacctgtccttcatcggattgccatggaaggtcattccttttccattgtttgaactccaaagcaaatgggttgccggcgtgctatcaggacgagtcaagcttccttcgagcgaagaaatgatggaagatgtgaaagccttccactcgaaaatggaagcgcgtggatggcctaagagatacgcccacaacttttcagactgtcagtttgaatatgatgattggcttgcggagcaatgtggccatccaccaattgaacaatggaggaagctgatgtatgctgctaattcagagaacaaggctgctcgtccggagagttaccgcgatgagtgggacgatgatcatcttgtggcagaagcagcagaagatttcaagaaatacttgtaa

SEQ ID NO: 3671 - DNA, 1704 bp, Oryza sativa
atgagccacaagattgtagtctttgccatggccctacagttgtggggctcaaaagaagatccggtagagagcataatattagagcacagggaatatccttgttcagaagaatatcctatatctatatctccccattctctgtccctggcatttgaactggccattagcaaaatccacctaaccggcaaagccgcctcagcggaaaaaccaaattcagcttcattcatgggttccccaagcaaaacacgtcggatgaagccattggggattcagctatatgagtgtgcccgggggagtcctatctccttcagatcatgccaggctcttgtattgatactgacgttcttatcctatgctagctatcatgccactaggaagactacaagcattgtcaagagtgttcttgatcctaagacagaaaacctaggtatgttgcattggccgagccatctgtatcttcaggatttaagagatgcacagggcaacatgacggctctctatagcggctgggctccgtttaatgccgacgatggtactgcattgctcggggagatcgacttggcatttctcggagtatatgcaatcggcatgttcttcgctggccatttgggtgatcgggtggatctcaggatacttctgaccatcggaatgataggcactggatttttcactgctgcctttggtgccggcaactggctcaacatacacaacttctactactttctgggtgttcagatgatggctggcctgtttcagtcatccggctggccatctgtggttgcagttgttggtaattggtttggaaagagcaaaagagggctgataatgggaatctggaatgctcatacatcttcccctggagtgatgatcgcagtcgttgggcttgcagtgtttctgttcttgcctgtcggtccggagatgattggaatcgaggaggatatccatgagaaggatgctgagaaggatgacatgagtgcacctctgttggaagaacgatcggcatcaaaagaaaaggcagtcgggttcattcaggcttggagaattcctggtgtagcgccatttgctctctgccttttcttctgcaagcttgtggcttacacattcctgtattggcttccgttttatatcagccacacagcaatcggtggagtgtacttgtcagacaccgcagccggtgtactgtcaactctgttcgacgtgggtggcgttgtcggcggcatccttgccggccacatctccgaccgcctcgacgcacgggcgctgacggcggcgagcttcacgttctcggcgatcccggcgctcttcttctaccgcatatacggcagcttctcgctgtactcgaacatcgccctcatgttcgtcaccgggatgctcgtcaacgggccgtacgccctcatcaccaccgccgtctccgccgacctcggcacgcacagctccctgaacggcaactccagggcgctcgccaccgtcacggcgatcatcgacgggacggggtcgatcggcgccgcggtcggcccgctgctgacggggtacatctctgccaagagctggagcggcgtgttcacgatgctcatggcgtccgctttcgtcgcggggctgctcctgtcgaggctggtcatggcggagatctccgcgaagatggagtcccggaggcctgacgctgctgctagtgatctgccagtgtcctccatggaacaatcttag

SEQ ID NO: 3672 - DNA, 1242 bp, Oryza sativa
atgtcgtccgaaaccgccgcttcgccgccgccgccgccgccgaatccaccggccgccgactccacccattccagccccgcctccatgaccgacgagacgcacggcgcaggagcccatcccgacgagtcccaaccgcatcgctcctcatcgtcgtcctcctcccctcccgtggccgtcgacggcgagacgcgcgtcccactcccagtccggtccctgccccaacctagccacccatcgccgcctccttcgggggaggacgaggatgacgtcgtcatcaccggccaaatcgcagtgggtgacgccgcgggggcggcgatggaggagcgggtgaaggggccctggtcctcggatgaggacacgctgctgagcaatctggtggagaaactcgggccgaggaactggacgctgatagcgcgcgggatacccgggcgctccggcaagtcctgccgcctccgctggtgtaaccaactcgacccccaagtcaagcgcaagcccttcactgaggaggaagaccgcattataatggctgctcatgcaatccatggaaacaagtgggcggctattgcaaagcttttggttgggagaaccgataatgcaatcaagaatcactggaactctaccctgaggcgtcggcactgcactggtggccgatgcacacaaggtggtgttatgaagagagctattccggagaggcctaggtcggtttcagaagaaccttggccattgggcaatcttagttccttaaatgttagggaagcaatggaagctcccgcacaaacagtatctgaaagttatgttggggcatggcaaatcggggatcagagttgcaaaactgaagttgttgatccaccttatcttgcccgaccagttgcaaaggttggtgcattcaaaccatacaatgtaggacctgctcaatcatcacaaaaggaaatgctgagctttgccaccaagtttgactcaaaccttcatcctttcaagcctgaaaatggggtctgcaagtttgttgatcctacaagttttgctgctgaggtgccaaataaatgtgggcatggctgctgcagttctcatgggcaacttcgtaagaactcattgctgggtcccgagtttaatgagtttgaagatcatccaccaatttcagatagtagttttgcttcgttggtgtcagaaattagcagcattgcctggatgaaaagtggtttgcaaagcagtgacaccttagcgcggtctgttccaccagcttaa

SEQ ID NO: 3673 - DNA, 950 bp, Oryza sativa
atggcggcggcagtggctgtggctgggccgtccatggaggtggagcaggacctcccgggcttccgtttccaccccacggaggaggagctcctcgacttctacctctcccgcgtcgtcctaggcaagaagctccacttcaacatcatcggcaccctcaacatctaccgccatgatccctgggacctcccaggcatggcgaagatcggggagagggagtggtacttcttcgtgccgcgggacaggaaggccgggaacggcgggcggccgaaccggacgacggagcgcgggttctggaaggcgacggggtcggacagggcgatccggagctccggcgacccgaagcgggtgatcgggctcaagaagacgctcgtcttctaccagggtcgcgccccgcgcggcaccaagacggactgggtcatgaacgagtaccgcctccccgactacggcgccgcccgcgccgccgcgccgcctcccaaggaggacatggtgctctgcaagatataccggaaggcgacgccactgaaggagctggagcagagagcctcggcaatggaagagatgcagagaggatcaagtcacggagactacacggcgacgagagcatccctcgtccacgacgcctccgcctccaccggcgacgactacttctcgtcggacgacgtccacgacagcggcttcctgatccagtcctcatcctcgtcggcggcgccgtccggcagcagcagcaagaacggcggcgctggcgcaccaagggaagccaagaaggaagaagcagacgtcacggtcacggtggcgtcggcgacgagcctacagctcccggcggtgagccagctgccgagcctgcagcttccggcgatggactggctgcaggacccgttcctgacgcagctgcgcagcccgtggcaggaccagcactgcctgtctccctacgcccatctgctctactacta

SEQ ID NO: 3674 - DNA, 1974 bp, Oryza sativa
atggcggtgctacacaaggtggcggcgccgccggcgcagagcacggcgagcaagctgaaggcgagggtgaaggagaccttcttccccgacgacccgttccgcgggttcaaggggaagccgctgacgaccaagtgggtcatggcggtgcagtacctgttcccgatcctcgactggggcattagctacgcgaagctggcgagcttgcctccgatcatcggcctctattcgagctttgtgccgccgatggtgtacgcggtgctggggagctcgagggacctggcggtggggccggtgtcgatcgcgtcgctgataatggggtccatgctgcggcaggcggtgagccccgccgccgagccgctgctcttcctccagctcgccttcacctccaccttcttcgccggcctcgtccaggcctccctcggcatcctccggctggggttcatcatcgatttcctgtcgaaggcgacgcttgtcgggttcatggccggcgcggcgatcatcgtgtcgctgcagcagctcaaggcgctgctcggcatcgtccacttcaccaccgagatgggcctcgtccccgtcatggcctccgtcatccaccacaccaaggagtggtcgtggcagacgatcctgatggccgtgtgcttcctggtgctcctgctcacggcgaggcatgtgtccgtaggttctgactggaaggctacaaatggagcagcccaagacgaaataatgcaaccgacactgatctatgctactagctccagaggaatagtgttgggcctctcaaggccacatggccacattggttttgaccctggaagaactgaacagatcttgcagagtatgaaatggccaaagcttttctgggtttcagcttgtgctcccttggcatgtgttatcgtctctaccctgcttgttttcctgttcaaagctcagaaacatggcattagcataattgggcagctcaaatgtggcctgaatcgcccttcatgggataaactactctttgatcctcaatatttgggcctcactgtaaagactggccttgtcaccggaatcatctccctaacggaaggagtggcagttggtaggacatttgcttcactcaaggactaccaggtagatggtaacaaagagatgatggccataggattgatgaacattgtgggctcatgtacatcatgctatgtaactacaggagcattctctcgttctgctgtgaaccacaatgctggttgcaagactgccatgtcaaatgtgatcatggcactgactgtcatggtcacactgttgttcctcatgccactgtttgtgtacacaccgaatgttgttcttggagcaatcataattgctgctgtgattgggctcattgatctccctgctgtatacaacatctggaagatggacaagatggatttccttgtgtgtctatgtgcatttgctggtgtaatcttcatctcagtccaacaaggccttgcaatagcggttggtatatcaatattcagggtactgttgcaaatcacaaggccaaagatgatgattcaagggaacatcaaaggcactgatatttaccgaaatcttcatcagtacaaggacgctcaaagagttcctgggttcttaatcctgacagttgaggctcctataaactttgcaaacaccaactacctaaatgaaaggattaaaagatggatagaagaagaaagttctgcaggaaccaaacaaagtgaactccatttcgtaattttggatctgtcagctgtccctgcaattgatacaagtggcatatcgttcctcatcgacttgaagaaatcaacagagaagcatggactagagcttatacttgtgaatccaactggagaggtcatggagaagatacaacgagcgaatgatgctcatggtcatttcaaatcagatagtctgtacttaaccactggggaagcagtggcttcactctctacattttccaagatgacagcgccttag

SEQ ID NO: 3675 - DNA, 987 bp, Oryza sativa
atgccttacagactcctcttcggatttgtcctttctcttgtcctacagttctccttagtattatccaatccaccagggctaaacattggcttttaccaatacacatgtccaaaagcagaggtcattgttcgtgatgagatgaccaagatcatatcccgagttccaagtctcgcaggccctctacttcgcatgcatttccatgattgttttgtgaatggttgcgatggctctatacttctggatagcacaccaggatcaccatctgagaaggaatcaataccaaacctcagtctgcgaggttttggcacaatagaccgtgtcaaagctaagctggagcaagcctgccctggagttgtgtcctgtgctgatatccttgctctggtagccagagatgttgtcttcttgaccaaagggcctcactgggaagttccaactgggcggagggatgggacaagatcagtgaaggatgatgctgtgaacaacctccctccccccttcttcgatgccacgcggaacttgtatcaattcttcatcccaaagggccttgacgcaaaggatcaggtggttctgctaggtgggcacactcttggaacctcccattgttcatccttcgccagccggctgtacaacttcagcggcatgatgatggccgacccgacgctggacaagtactacgtgccgaggctgaagagcaagtgccagcccggcgacaagacgacgctggtggagatggacccggggagcttcaggacgttcgacaccagctactacaggcacatcgccaggggcagggcgctcttcacctccgacgagacgctcatgctcgaccctttcaccaggggctacatcctccgccaggccggcgtcgccggctacccggcggagttcttcgccgacttcgcggcgtccatggtgaagatggggaacatgcaggtgctcaccggcgcccagggggagatcaggaagcactgtgcctttgtgaattag

SEQ ID NO: 3676 - DNA, 1077 bp, Oryza sativa
atgcagatattcgttaagaccctcactggcaagaccatcaccttggaggttgagttctccgatacgattgacaatgtgaaggctaagattcaggacaaggagggcatccctccggaccagcaacgccttatcttcgctggcaagcagcttgaggatgggcgtactctcgcggattataacatccagaaggagtccaccttgcaccttgtcctccgccttcgtggaggcatgcaaatattcgtgaagaccctcaccggcaagaccattaccctggaggtcgagtcctccgacacgatcgataatgtgaaggccaagatccaggacaaggagggaatcccaccagaccagcagcgtctcatctttgctgggaagcagctcgaggatggccgcacccttgcagactacaacatccaaaaggaatccaccctgcaccttgtcctgcgcctccggggcggtatgcagatctttgtgaagacccttactggcaagacgatcaccttggaggttgagtcctctgacacgatcgacaatgtgaaggccaagatccaggacaaggagggtattccaccagaccagcagcggctcatcttcgctggcaagcagcttgaggacggccgcacccttgctgactataacatccagaaggagtccaccttgcacttggtcctccgccttcgtggaggtatgcagatcttcgtgaagaccctcaccggcaagaccatcaccctggaggttgagtcgtctgacacgatcgacaatgtgaaggccaagatccaggacaaggaggattacaacatccagaaggagtccaccctgcaccttgtcctgcgccttcgtggaggtatgcagatcttcgtgaagaccctcactggcaagaccatcactctggaggttgagtcctctgacaccatcgacaacgtgaaggccaagatccaggataaggagggcatccctccagaccagcagcgcctcatcttcgccggcaagcagctcgaggatggccgcacccttgccgactataacatccagaaggagtccaccctgcaccttgtcctgcgcctccgtggtggtctctga

SEQ ID NO: 3677 - DNA, 1716 bp, Oryza sativa
atggcggcgctgcgtgacgtgctgctgtcgatcgcgcagacgccgcaccggctgcggcggcgggcgctggtgacgtggacgccggcgcaggagacgarcgaggtgagggacaggtcgggggcgcggatgaagcggcggctggagtggtacgacctcgtggggctcggcgtcggcgggatgctgggcgccggcgtcttcgtcaccaccggccgcgtcgcgcgcgacaccgccggccccgccgtgttcgcctcctacgtcatcgccggcgtctccgcgctcctctcctccttctgctacgccgagttctccgtccgcgtccccgccgccggcggcgccttcagctacctccgcgtaacgttcggtgagctggtggggttcttcgggggagccaacatcctgatggagtacgtgctgtcgaacgcggcggtggcgaggagcttcacggactacctggcctcgacgtgcgggatcacggagccggacgcgtggaggatccaggtcgacggcatcgccaagggctacaacgcgctcgacttcccggccgtcgcgctcatccttgtcctaactctctgcttgtgctacagcaccaaggagagcgcgatgctgaacatggtgatcacggtgttccacctgctcttcttcgtgttcatcatcctggccggcctgtggaacggcagcgcgcggaacctggtgtcgccgcacggcctggcgccctacggcgtccgcggcgtcctcgacggcgccgccatcgtctacttcagctacatcggctacgactcggcgtycaccatggccgaggaaatccgcgacccsgccsgsgccctccccgtcggcatcgccggctcagtcctcgtcatagcggagagcgcgccgttctcggcggtgttcagggagaaggcggggtgggagtgggcggggagcgtcgtcggggccggggcgagcctggggatcgtggcgtcgctgctggtggcgatgctggggcaggcgaggtacctgtgcgtcatcgccagagcgcggctggtgccggcgtggctggccaaggtgcacccttccaccggcactcctatgaacgccaccatctttctagatagagcaaacggaagcataaaatacactaataacttcaccgaagtcaaggtccttaccactgtatcagatcatgaaaactgcaatgcaggattgtgcacagcatcaatcgcactcttcacagagctgcaggtagtgttcgagatgatatcaatcggaacactcctggtcttctacctggtcgccaacgcgctcatctaccaccgatacgcgaagctgggtgccaaccgatctctgcatgtcctcctcttcctgctcatccttacactgagctcccttggcttctccctctcgaggaggatccatgggcaatgccgatggggaatggctttgttcggcgccacctccgtgacgattaccgccatgttccactgcgcggtacggcgagacatgccagagccaccatcagagtggatggtccctctgatgccatggccggcggctgcatccgtcttcctgaatgtgttcctgatgaccactctcaaggtgatgtcatttcagaggtttggcctctggagctttgtgatcatagtcttctatgtctgctatggggtgcactccacatactctgcagaagaaaatgaggctgtcaatgctatgattcatcatgccaatatggacatatcttag

SEQ ID NO: 3678 - DNA, 1200 bp, Oryza sativa
atgcctggagcagctaccaccgccgccgttgttgacagccgccgtagcgcacagcgcgcggaaggccccgccaccatcatcgccatcggcactgcaaacccagctaatattgttcctcaggataactttgccgactactacttcggcctaaccaagagcgagcatcttactgaacttaaggacaagatgaagaggatatgtaaaaaatcaggcatagagaagcgatacatccaccttgatgaggagatcatccgtgcccatccagagatcattgacaaacaccagccctcccttgaagctcgtgttgaaatcgccgccgccgaggtcccaaagctcgccgagtctgctgcaaggaaggccattgccaagtggggccgtccagccaccgacattacccacctcatcttcagcacctactctggatgtcgtgcccctagcgctgacctccagctggcatcgctccttggcctccgtccttctgtctcccgcacaatcctcagcctccacggctgctctggcggtggcagggcgctccaactcgccaaggagcttgctgagaacaaccgtggtgcacgcgtccttgtagcactctcagagctaaccctggtatgtttctccaccccagacgaaagcaaaattgtcggacatggactgtttggggatggtgccggtgcaataatcgttggcgcaggcccgttttctgatggcgagtgcccgttgttcgagatggttgctgcctcacagaccatgataccaggaaccgagcacgcacttggcatgcaggccactagcaccggcatagatttccacctctctgtccaggtgccaatgctgatcaaggataacatccagcagagcttgctcgaatccttccaatcggtcggatacacagatcctgactggaacaatctcttctgggcggtgcaccccggcggccgtgctatccttgacaacatagagggcaagctacagttgcaaccatggaagcttgcagcaagccggcaagtgctacgcgagtttgggaacatgagtggtgcaactattgcattcgttcttgatgaactatgccaccgtcgggagaaggacgaagatgagtcacagcagcatgaatggggagtgatgctggcctttggaccagggatcacaattgagacaattgttatgcgcaacccattggcacgtggtcttaagcaaaattag

SEQ ID NO: 3679 - DNA, 1374 bp, Oryza sativa
atggagaagggcccgagggagaagctcctctacgtcacctgcgtctacaacggtactggaattaacaagccggattacctgggtacggtggacgtggaccccaattcccctacatactcccaagtgatccacaggctcccagtcacccatgtcggcgatgagctgcatcactctggatggaacgcttgcagttcttgccatggtgatccatcggctagccgccgtttcttgattctgccttcgttgctgtctggccgtgtgtatgtcgttgacacgctgaaggacccaagggcgcctgccttgcataaggtggtcgaggctgaggacattgctgagaagacagggcttggatttcctcatacatctcattgcctggcatctggggagataatgatttcttgccttggggataaggagggaaatgctgctggcaatggcttcctcctgctggattctgaattcaatgtcaaaggacgttgggaaaagccaggtcacagccccttgtttggctatgattattggtatcaacctcgtcacaagacaatgatcagttcatcatggggagcacctgcagctttcaggactggttttgatcttcagcatgtgcaggatggtctctatggaagacatctgcacgtgtatgactggcctggtggtgagctcaagcagacactagatttaggcagtacaggtcttcttccacttgaggtgaggtttttacatgatccatcaaaggatactgggtatgtgggctgtgctctgacaagcaacatggtcagatttttcaagactgcagatggatcatggagccatgaggttgctatatctataaaaccattgaaagtgcgcaactggattctgcctgaaatgccaggactgataactgattttgttatctctctggatgatcgctatctctacttggtcaactggcttcatggtgatatcaggcagtacaacatcgaggaccctgcgaagcctgtgttggctggacaagtatgggcaggaggccttcttcaaaagggcagtgaggttgtgtatgtaactgaggatgacaaagaagagcagtacagtgtgccccaggtcaagggtcatcgacttagaggtgggccacagatgattcagctgagcctggatgggaagaggatatatgtgaccaactctcttttcagccgatgggacgagcagttctatggccaagatcttgtcaagaagggctcccacatgttgcagatcgacgtcgacactgagaaaggaggactatcgatcaaccctaacttctttgtagattttggtgctgagccagagggtccctccttggcccatgagatgagatatcctggtggagattgcacctctgatatatggatataa

SEQ ID NO: 3680 - DNA, 777 bp, Oryza sativa
atgcagaatgaaaattggcgttacgcagcaaaacatttcatcaaaaaacatcctgaggatgtggttgttcactgcagtggatgcaacggggcagttcgaactttcgatggagttgatgtgatgggaacaagattagcagaggaggtgctctcacttgttcagcgtagaccagagcttcaaaagatctcctttgttgcccattcattgggtggattaattgcaagatatgctattgcattgctatataagagtgctacagaaatagattctcatgaagagcatgagaagcaaatcactgatgtttccagcaaccaacttattgatcgaggcaaaattgctggtttggagcctattaatttcataacttttgcaacaccacaccttggaacaagatcacataagcagataccccttctccgtggttcctataaactggaaaagatggcatatcgcatatcatggattgctgggagaagcggaaaacatcttttcctaaaggacattgaagatgggaaaccaccactccttctccaaatgccgaaggttcaggatactgatttttcagattcaatgatatatcaggcgaaaaatacaagtgaaatggaagaactgatgctcaaaggtctgaacagaattccatgggaaagggtagatgttagcttcaagaaaagtagacaaaggatttttgctcatagcaccattcaggtcaagacctatttcttcaactctgatggggctgatgtgatttttcacatgatcgaccattttctttattaa

SEQ ID NO: 3681 - DNA, 1599 bp, Oryza sativa
atggccgccgccgccgcccgttccggcgcgcatccgccatcgttcgcctcctcgctcggccggtgcagggttcttccagtcgtggtggtgcgtcggccgggcggtgccgcgaggccgtcaccgctgctcgctccggcgaggtgcgccgccgccgtcgggacggcggcscccaaggtggagggcggcggacggcggtcgtcggagcaggggcagctggcggtggcsccggcgcggctggtggatgagctggtcgaggaggcgctggtgtggtcgtcgcagcacggcctcgtcgttggcgacaagaaccacccggtgaaatgctgtcccatcttaattgacccaaccggaaacagccagctcaaccatactgattatagatcaggaaaagctcccggtgttggtttgctccatgccccatttgctctactgccaatgtcattttcgaaagtttactgggatcaggcggttgaattggctccccttttcaatgagcttgttgatcgtgttagtttggatggggattttttgcaggagactttggcaagttttagtttatcattttccagaacgaaagaggtggattcattcactggaaggcttcttgatatccatgcaaagatgatgaaactaaacaagaaagaggatgttaggttgggtcttactaggtcagattacatgattgatggggccactgaccagcttcttcaagttgaactcaacaccatttcaacatcatccaacggtcttgcttgcggtgtatgtgaacttcacagaaacctgattaggcagcatgagagggagctcggtttggatccagagagtgttgttgggaacacagcaattgctcagcatgctgaagcattagctggagcatgggctgagttcaacaatcaaaggttttcagtagttctggtggttgttcaaccagaagaaagagatggattgccagttgctgttgtgtacttcagagcaggttatacaccaaatgattacccttcagaagcggaatggagagcaagactcttgattgagtgttcctctgctattaagtgcccatcaatagcacaccatcttgttggaaccaaaaagattcaacaagaattggcaaaagaaaatgtgctcgaaaggtttcttgacaacaaagccgacatagaaaaagttcggaaatgctttgcagggctatggagcttggagaatgacagtatagtcatgtctgctattgaatcaccagaattgtttgttctgaagccacaaagagagggtggaggaaacaacatttatggggacaatctgcgtgaaacactgataagtctgaagaaggatggaagcaatgaacttgcagcctacatcctaatgcagaggatctttccaccagcatcactctgctatctagtccgagatggcacatgcattcgggaaaatgcggtttctgaatttggaatttttggagcctacctgcggaacaaagacagggtcattataaatgaccagtgtggttatttgatgagaaccaaggctgcctcactgaacgaaggtggggtgactcgagatgccgggagagaatttgcggtgaaggaccgggagtcggcttggggataa

SEQ ID NO: 3682 - DNA, 1767 bp, Oryza sativa
atggcgttggcgccgccgctctgccacctactcgccgcaccgccgccgtccacgtccgccgcagccgacgcggctcacgaccacgcgggagccctggccccacaccgccgcgcctccccgctccgccgccgcggccgcctcttcctcgcctgcagggtccccgctgctgcgccctccgcccgtggggtcgcggcggaggcggcggcgggaaggccgacggtgcttgtgacggagaagctgggcgacgcggggctggagctgctgcggaggttcgcgaacgtggactgcgcgtacgagctcacggcggaggagctccgcgccaaggtgtcgctcgtggacgcgctcgtggtgcgcagcgccacgcgggtgacgcgggaggtgttcgaggccgcgcgcggccgcctccgcgtcgtcggccgcgccggggtcggcatcgacaacgtcgacctccaggccgccaccgaggccgggtgcctcgtcgtcaacgcccccaccgccaacaccgtcgccgccgccgagcacgccatcgccctcctcgccgccatggcgcgcaatgtcgcccaggccgacgcctccctcaaggccggcaaatggcaacgtaacaaatatgttggtgtttctttggtgggaaagacgctagctattatgggctttgggaaggttggctcagaagtagcacgacgcgcgaaaggacttggaatggatatcatttctcatgatccctatgctcctgttgatagagcccgggcaattggtgtagaccttgtatcgtttgatgaggccatctccactgcagacttcatatcactgcatatgccacttacaccatcaacagcaaagcttttcgatgatgaaacttttgcaaacatgaaaaaaggtatgagtcaggcagcacttgatgtattcactgaggagccaccaccaaaagacagcaagttagtacaccatgaacatgtgactgtcactccacaccttggagctagtacatcagaagcacaggaaggtgtagcccttgaaattgcagaggctgttcttggagcactgaaaggggaattagctgctactgctgttaatgccccgatggtccctgctgaggttttatcggagttatctccgtatgttatccttgctgagaaactaggtcggcttgtcgtgcaacttgtagctgggggaagtgggattaagggagtgaagattggatattcatcatctcgagaccctgatgatctggacacaagggtactccgtgctatggtcaccaaaggcatcatcgagcccatttcaagtgcatttgttaacattgtcaatgctgactatgtggccaagcaaagaggccttcgcatcagcgaagagagaatcctccttgatggatcaccggagattcctatagattctatccaggtgcatctcgccaatgtagagtccaagttcgccggtgccctctctgacgaaggtgacatcagagtggagggagaggtgaaggatgggaaaccacatctcacacttgttgggccattcagtgtggatgttagtcttgagggcaacctaatactctgccgtcaagttgatcagccaggtatcattggaaaggtaggatcaattttggggaagatgaatgtgaatgtgaatttcatgagcgttggaaggactgctcctggaaagcaggcgataatggccattggggttgatgaggagcctgagaaggaagctctcaagttgatcggcgacataccatcagttgaggagtttgtctttattaagctttag

SEQ ID NO: 3683 - DNA, 876 bp, Oryza sativa
atgtcggcggcgccggtagtggacgcggagtacatggcggaggtcgagagggcgcgccgcgacctgcgcgccctcatcgccagcaagagctgcgctcccatcatgctccgcctggcgtggcacgacgccggcacgtacgacaaggcgacgaagacgggagggcccaacggctccatcaggttcccgcaggagtacagccacgccgcgaatgcgggcatcaagattgctattgatctgctagaaccgatgaaacagaagcatcccaagattacctatgctgacctgtatcagcttgccggagttgttgccgttgaagtcaccggtgggccaactatagattatgttcctggcaggagggattcttcagattccccagaggaaggccgtttgccagatgctaagaaaggtgctgcgcatctgagggaagtcttctacaggatgggcttatcagacaaggacatagtagcactctcaggcggccatactctcgggaaagctcgtcccgaaagatcaggatttgatggtgcctggacaaaggatccactgaaatttgacaactcctatttcattgagcttctgaaagagaattcagaagggcttctgaagttgcctactgacaaggctcttgttgaagatcctacattccgccgctatgtcgaactatatgccaaggacgaagatgcatttttcagggactatgcagagtcgcacaagaagctatctgagctggggttcacgcctcctcgctctgcattcatctacaaatcatgccagaaaccaaagtccctgttgatgcaaactgcagctggggttgcagttgctgctgcagttgtcgcatgggcttacctctgtgaatccaacaagaggcttggctaa

SEQ ID NO: 3684 - DNA, 1910 bp, Oryza sativa
atgagtagcacaaagctcatcttgtgcttcctacttctgttcctaaccctcaatctttcagcttccagcaccggtggtgaccatgaaagattcatgtacgccggcttcactggtgccaatctcaccatggacggctcagcaaaaatcataccaaccggcctgcttgcactgacaaaggacacgttcagggctcaaggccacgcgttgcacccggctccactccgcttcggtcagtctaatggaatggtgacatctttctctgtttcatttgtgtttggtattctctcttcatttggtgacataaggggccatggtttcgccttcttcatagctcccaccaataatttctcctccgccttcccaatccagttcctgggccttctcaatgataaaaacaacggtagtttgagcaaccatctctttgccatcgaatttgataccatccgaaacaatgagtttggggacatcgacaacaaccatgttggcattgacataaatagtctgaattctatgcaatcctatcatgctggcttctacgatgacaagggtggcacattcacaaacttgagcctcatcggaggagggccaattcaagtttggatagagtacgacgggtacaccacattaactaatgtgaccatagctcctcttggcatggctagacctataaggccactactctcagttacccgtgacctttctacagtgtttacaaatcaatcatatcttggtttctcatcctcaacaggcttaagcacagctcatcactacgttcttggttggagctttggtatgaacagtcccgctccaaccattgactctaccaagctacccaagctacccgaaccacctaattatagtggtccaagaactcaatccattctattaatccttccactaatagggtcaattctattggtattaattattggcattgtggttctacttgtgaggagacaacttgtgtacaaggaggtacgcgaagattgggaagttgaatatggtccacgccggtttgcttaccaggatctatttcgcgcaactagaggatttaagaacaataacttggtaggaataggtgggtttggaaaggtgtacagaggggttttcccaatatcgaaattacaggttgctgttaagagggtatcatatggctcaaagcagggtattaaagaatttatagctgaagtagttagtatagggaatctccaacaccgcaacattgtacaattatttggatattgccggcgcaagaatgaactccttttggtatatgactatatggaaaatgaaagtctcgacaagcacttatacaattttcatggccaaccaactttgaattggtcacaaaggttcaaaattatcaaagacattgcctcgggcctgctctacttacatgaggagtgggacaaagttgtaattcatcgagatgtcaaggcaagcaacgtgcttattgataaggagatgaatgcaagattaggagatttcggtctctcacgactatgtgaccacggcagtaacctacatacaacaaatgttatcggcacaataggatacttagctccagagctagttcacacaggcaaagcaactacacttagtgatgtctttggttttggcatcttccttcttgaggtttcttgcgggcaaaagcctatcaggcaaaactcggaaggtaaacatctcatcttggttgattgggtggttgagaattggcataagggatcacttcttgatacaatggatagaaggctccaaggtaactacaatatcgatgaagcctaccttgcactgaagctaggattattatgctcacacccattttcaaacgcaaggcccaatatgcggcaagttctgcaatacctcgatggcgatgcgcagttgccagaactaaatgtgtccgtgatgta

SEQ ID NO: 3685 - DNA, 906 bp, Oryza sativa
atggctccggtgcggctcggggctcccacttccggcgccctgctgcttcttgtcctcctcctcatctgcggcggcggcggaggcggtggcgttgctgccgggggtggaggcggaggtggaggcgggaaggggagctcggtgtaccsggcgcccgtggtgtacccgcaccactcccgccagatctcctggaagcccagggtgttcctctaccagcatttcctcagcgacgacgaggccaaccacctcgtctccctcgcgagaacggagctcaagaggtcagcggtggctgataacctgtccggcaagagcgagctcagcgacgcccgcaccagctccggcaccttcatccgcaagagccaggatccaattgttgctggtatagaggaaaaaattgctgcgtggacatttcttcctaaagagaatggtgaggatatccaagtgttaaggtataagcacggcgagaagtatgaacggcactatgattacttcagcgacaatgttaacactctccgtggtggtcatcgcatagctactgttcttatgtacttaacagatgttgcagaaggtggagaaacagttttccctctagctgaggagtttacagaaagtggcacaaacaatgaagattcaaccttgtcagaatgtgctaaaaaaggtgttgcagtgaaaccacgaaaaggggatgcacttctgttcttcaaccttagcccagatgcttcaaaagattcattgagcctccacgctggatgcccagtcataaagggcaattgcactgacgacaatgagagttgtgaaaaatgggctgccttgggagagtgcataaagaacccagaatacatgattggaacagcagcattaccagttactgcagaagagttgcaacatatgttagcgatccaattgtaa

SEQ ID NO: 3686 - DNA, 1407 bp, Oryza sativa
atggagatgaggcggtttcttggtgggctatgcttcttggctctgctgcggctgggcggcgccgcggaggccgtggtcggggtcgccggcgttgacgggcggcgcgccattgccgccaaccgacgaggacttcgtgtgcgcgacgatggactggtggccgccggacaagatctctccaacaaaatcttgctcaatgccattcgagccttytcsccgttgaagctgcggctgggcgggtcgctgcaggacaagctggtgtacggcaccggcgacggcggagggccgtgcgcgccgttcgtcaagaacacgtcggaaattttcggcttcacgcagggatgcctgcctttccaccggtgggacgagctcaacgcctttttccaaaaatccggcgcgagaatcgtgttcgggctgaacgctctcaacggccgggttccgttgccggatgggtcgatgggagggccatgggattacaccaatgctgcatcgctgattcgttacaccgcgagcaagggttacaaaattcatggatgggagcttggaaatgaactcagtggcagtggagttggaacaaaagttggggctgaccaatatgctgcagatgtgattgcactgaaatcactagttgacactatctaccaaggcaatccatcaaagccacttgttcttgctcctggaggtttctttgatgcaggctggtttactgaagttatagtcaaaaccaggccaaacctactgaatgtggtcacccatcacatctacaacttagggccaggagtggacacacatctgattgagaagatcctgaatccatcttatcttgatggaatggtgagcacattcagcaatcttcaggggatactgaaatctgccgggacttcggctgtcgcatgggtcggagagtccggaggcgcgtacaacagcggccgccatcttgttaccgattcatttgtgttcagtttctggtttttggatcagcttgggatgtcagcaaagtatgacacgaagagttactgcagacaaagtttgattggtggcaactatggcctgctaaacaargaaacattccaaccaaatcctgactattacagcgctctactatggcatcgcctcatgggaaccaaagttctatctgcaacattcaatggcaccaacatgattcgcacttatgcgcattgcgcaaaagattctccaggaataacactactgctgatcaacctcagtggcaacaccacaagccaagtttcagtgacaagtgaaggtgctcatgcaaacactgtgaagaagcatagcagaaagaccaggcatcttgcagctggatcaatgagagaagaataccatcttactgccaaagatggcagcttgcagagccaagtgatgctgctgaatggcaggggcattggttgctga

SEQ ID NO: 3687 - DNA, 2919 bp, Oryza sativa
atgtcctcctccgatcgccgccgcggcggcaacggcggcggcggcggaggccccgtcgcggtgccttcttcccgcgccgtatggcgaccccgctctaccgcccctgatattcccccacggccccgcgccgccgcccccgcacccgatcgcatcggcccgatcctgccctcccccaatccggcctcggaggatcgaccgcagcagcagcaacgtcgcccgcgccggaggaatcatgggggtggcggccagcgccgcggcccgccgcaggagaggccttccgctgcgccgcccccgccgccgccgcagcagcagcagcggcagcagcatgcggcgcccgctccgacccgtgccgccgcgcctgcgcctgcgcgtgtggcggcgacgaaggcggcggccgggggaaatkgggcsgttccgcagctggtgcaggagatccaggacaagctggcgaggggggcggtggagtgcatgatctgctacgacatggtgcggcggtcggcgccggtgtggtcctgcggcagctgcttctccatcttccacctcccctgcatccgcaagtgggcgcgctccccggcgtccgccgccgacgcgtccgacccggactcctcctggcgctgccccgggtgccagtccgtgcacgccgtccccgcgcgcgagctcgcctacacctgcttctgcgggcgccgccgcgagccacccaacgatctcttcctcargccgcactcctgcggcgagccctgctccaagcccctcgagaaggctgaccctgccgtgaaggccgacgacgctgcagccaccaggtgcccccatgtgtgcgtcctgcagtgccacccagggccctgcccgccttgcaaagcgttcgcgccggaccggctgtgcccatgcggcaagcagaccattgtgcggcggtgtgcggaccggacaacgcctgtgacgtgcgggcagcggtgtgatcggctgctcccctgccggaggcaccgctgcgagaaggtctgccacactggaccatgcggggactgtaatgttctcatttctgcccggtgtttctgtgggaagaagacagagacattgctgtgtggagagatggaactgaaagggaatttatctgagaaggatggagtgttctcatgcagtgaggcctgcagccatatgctgtcgtgcggaaatcatgcctgccaagacatttgccacccagggccatgcggggagtgcgaacttatgccagggaaggtcacagcatgccattgtgggaagacaaggctgctggagaagagagcaagctgcttggacccgatcccaacctgtgacaaggtgtgcgacaagaagctgccttgtggtgtgcataggtgcaaggtcacatgccatgagggagactgcccaccttgtgtggttcgtgtggaacagaggtgccgctgtggttcatcaggccagatggtggagtgctacaaggtcttggaggaagaattccgttgcaacaagccttgtgggcgaaagaaaaactgtgggaggcacaggtgtagtgagtgctgttgcccactttcaaagccgctcgctcggcttgaagggggtaattgggatccccatctctgccagataccgtgtggcaagaagctccggatatcagatgcaaccaaccttgtggaaagaaccggcaatgtggaatgcacgcttgcaacaggtcttgccatccttccccttgtgatccaccacctgcaaatggagatgctagctcaagtactggtggtagagcttcatgtggacagtgctgggggaaccgccaatggcgataatatgtttgaagtatccatcatacagaagctgccaatgccactccagccggtggaatctgatgggaggagggtaccacttgggcagaggaagctctcttgtgatgaggactgtgccaagatggagaggaagagggtccttgctgaagcatttgacatcactccacccaatttggatgcattgcattttggtgagaactcaaatgcatcggatttgctttctgaccttttccgccgtgagccaaaatgggtgatggccatagaggagaggtgcaagttccttgtacttgggaagacaagaggcaattcttcaggcaacctcaaggtccatgtcttctgtcacatgacaaaggataagagagatgctatcagggtcattgccgacaggtggaagctttctgttcaggctgctggttgggaacccaaacgtttcattactatccatcccacaccgaagtcaaaggcgcctgctcgcatcctgggttccaagccaggtgtatttgttgctgcttcccatcctttctttgatcccttggtggacatggacccaaggcttgttgttgcaatgctggacctgccccgggatgctgatgttagcgctctggttttaaggtttggcggggagtgtgaattggtttggctgaatgacaagaatgctgtggctgtcttcaatgatccagctagagcagcgacagctctgaggcggctggattatggttctgcttaccagggtgctgctgtgtttttgccaagcagcagcgctcagccaggcaatgtctgggttgcagggcagaaagatggagtggcggctaccaagagcagtgccaatccatggaagaaggccactgcctctgagcctgatccatcctcaggagactggacaggtgtgcttggtcaagctccaggatcagtatggaggcgtggcggtgacactgtcgcccaagtcatggggacatcgaaccgctggaacgccctggagtccgatgcggccacaagctccaggccagtcgaggagagtaagcctgctcctcgcaccgatgctgtatccagcgcagggccaagtactgcgccaccggttagtaagatgcagcctgaagtcgaagtggatgattgggaagaagcttgtgaatga

SEQ ID NO: 3688 - DNA, 807 bp, Oryza sativa
  misc_feature (1)...(807): n = A,T,C or G
atggtcaccgcgctagcccacgtcatccgcgccgcccccgacctgcacctcccccaccacccatcctcctccgcctcmgccgccgccmacccgcagcaggcttcttccttctacccgaccgccgccgccgccgcctcctcgccgtccgaccagctcgccgccgccgccgctgccgaagagcaagggaggaggcggcactacagaggtgttcgacagcggccatgggggaagtgggcggcggagataagggacccgaagaaggcggcgagggtgtggctggggacgttcgacacggcggaggacgccgccatcgcctacgacgaggcggcgctccggttcaaggggaccaaggccaagctcaacttccccgagcgcgtccagggccgcaccgacctcggcttcctcgtcacccgtggcatcccccccgccgccacccacggtggcggctactacccctcgtcgtcgccdgctgctggggcatgccccccgccgcggcagcagcagacggtcgtgccgtacccggacctcatgcggtacgcgcagctgctgcagggcggcttcggcggcagttacatgccgttcggcggcgccgcaacgatgtcgtcgtcgacggtgtcgtcctcgtcggcgccgcanatactcgacttctcgacgcagcagctcatccgggccggcccgcggtcaccaatgccatcgtcgggctccggctcggcgaccgcggcggcktcgtccacgacgtcggcgtcgtcgcccggtgcatggccgtacggcggctcggagcgcaagaagaaggattcgtcgtcgtga

SEQ ID NO: 3689 - DNA, 1746 bp, Oryza sativa
  misc_feature (1)...(1746): n = A,T,C or G
atggtggtgcagaagaatcagcggaagccaggagaggcttcttggcccaaggttgtgctgaagaaatggctcaacctcaagagcaaggattcggagttcaacgccgacgaggaagacgacgacgacgggagcgacgttgatgagcaagatgagaatgtggagggcggcgcgccgtacaggctgcggcggcgaaactcggagacgctgcgcgcgcagtacatcaacaccaaggagctcaagctctgcgtcggcacctggaacgccgccggcaaggtcccccccggcgacctcgacatcgccgactggctcggcgccggcgccggcgagcccgccgacgtctacgtgctcgggttccaagaagtggtgccgctgaacgccggcaacgtgttcggcgcggaggacgcccggccggcgcaggcktgggaggagctcatccgcagcgcgctgcggcgggcgcggccgccggcgagtagtcggccccggtacaagtgctacagccaccctccctcgccgtcgcgcggggacgcgacggcagccgccgccgccaccgatgacgacgagctcttccctggcaccgatacggacacggacaccaacaccgatgacgactcgctcttcagctcgccggcggagtccgagcagcagaacgtcgccgccaccccgaggaggctgaccaggctgaaccatttcactgccgccgccgaaggcggcngcsgccatggacgactccggcgacgagcatcagcagcggacgcttctcaagacactgagcagccgctggacctgctcgccaagcacgccacggcgacggcgagtaccaccatgccatcgtcaagatccttccgaacctacaactcattcaggccgtctygcgccgccgccgccgccgaccagtcgaacgacgacctcgccatgatcgccgacctcgtcatggacctcgccgcggcgcgcaagaggcgttcgccgtacgtgaggatcgtgagcaagcagatggtgggcgtcttcctgacggtgtgggtgaggcgcgggctgaggaggtgcgtccacaacgtgggggtgtccaccgtcggcgtcggcgccatgggctacatcggcaacaagggcgccgtgtcggtgagcatgtcggtgtaccagaccatgttctgcttcgtgtgcacccacctcgccgccggcgagaagcccgccgacctccacaagcggaacgccgacgtgcaggagatccaccgccggacgcacttcgccggcgtcggcatgccgagaaacatctatgaccatgagaggattttttggttgggtgatctgaattatcgcatcgacgtcgcgtacgagagagcacacgagctgatttcgacgatggattggactcagctggcagagaaagttcrgctgaagcgagagctaaggaagggtcgggcgttcgacgggtggacggaaggggtgctggagttcgcgccgacgtacaagtacgagctcaactcggccaagtacatcggcgacgaccagcgcggcggcaggagaacgccggcgtggtgtgataggatactgtcgttcgggaagggggtgaagctgatgagctacgggagggcggagctgacgatgtcggaccaccggccggtggtggcgacgtacgcggcggaggtggaggtgttcagcagcaggaagctgcagagggcgctgacgctcacggacgccgaggtggaggccggcaccgtcgtcgccgtgccggaccacctcgccggtttttga

SEQ ID NO: 3690 - DNA, 1557 bp, Oryza sativa
atggttaaggcctacattgccatcttctccatcgccgttctcttgttgattcacttcctcttccgccgccgcggcaggagcaatggcatgccgctgcctccgagccctccagccatcccgttcttcggccacctccacctcatcgacaagccgttccacgccgcgctgtcccgcctcgccgagcgccacggcccggtcttctcgctgcgcctcggctcgcgcaacgccgtcgtggtgtcgtcgccggagtgcgccagggagtgcttcacggacaacgacgtgtgcttcgccaaccgccccaggttcccgtcgcagatgctcgcgaccttcaatggcacctctctaggcagtgccaactacggcccgcactggcgcaacctccgccgcatcgccaccgtgcacctcctctcctcgcaccgcgtcagcggcatgtctggcatcatctccggccaggcgcgccacatggtgcggaggatgtaccgcgccgccaccgcctccgccgccggcgtcgcgcgcgtccagctgaatcggaggctgttcgagctctcgctcagcgtcctcatggaagccatagcccagagcaagacgacacgtcgtgaggcgccggatgcggacacggacatgtccatggaggcccaggagttgaggcatgtcctcgacgagctcaacccgcttatcggcgcggccaacctgtgggattacttgccggcgctccggtggttcgacgtgttcggcgtgaagcgcaagatcgtggcggcggtgaacaggaggaacgcgttcatgcgccggctgatcgacgcggagcggcaaaggatggacaacaacgatgtcgacggcggcgatgatggcgagaagaagagcatgatttccgtgctgcttactctgcaaaagactcagccagaggtctacacggatactctgatcatgactctctgtgcgccattgtttggtgccggaacagagactacatcaaccacaatagagtgggcgatgtcacttctactgaaccatccagagattctaaagaaagcacaagcagaaatagacatgtccgtcggaaactctcgcctaatcagtgtcgtcgacgtgcatcgtctgggctatctccagtgcatcatcaacgagacgcttcgcatgtaccctgcagcgccacttctgctacctcatgaatcatctgcggattgcaaagtcggtggctaccacatcccaagcggagcgatgttgcttgtcaacgtggctgccatccaaagagacccagtgatttggaaagagccaagtgagttcaagccagagaggttcgagaatggcaggttcgagggattgttcatgataccgtttgggatggggagacggaggtgtcccggggagatgctggcattgcagacaattgggttagttttggggactatgatccagtgctttgattggggcagagttgatgatgctatggttgatatgacacagagcaatggactgactagcctcaaggtcattccgttggaggccatgtgcaaaccacgagaagctatgtgcgatgttcttcggaaattcatgtga

SEQ ID NO: 3691 - DNA, 1584 bp, Oryza sativa
atggataaggcctacattgccgtcttctccattgccatcctcttcttgctcgtcgactacttccgctgtcgccgccgccgcggcagcggcagcaacaatggcgaaaacaaggggatgttgcagctgcctccgagccctccagccatcccgttcttcggccacctccacctcatcgacaagccgttgcacgccgcgctgtcccgcctcgccgagcgccacggcccggtgttctcgctgcgcctcggctcgcgcaacgccgtcgtggtgtcgtcgccggagtgcgccagggagtgcttcacggacaacgatgtgtgcttcgccaaccgcccgcagttcccctcgcagatgcccgcgacgttctacggcgccgggttcggcttcgccaactacggcgcgcactggcgcaacctccgccgcatcgccaccgtgcacctcctctccgcgcaccgcgtcaggggcatggccggcgtcgtctccggcgaratccgccccatggtgcagaggatgtaccgcgccgccgccgccgccggcgtcggcgttgcgcgcgtccagctgaagcggaggctgttcgagctctcgctcagcgtcctcatggaagccatagcgcagaccaagacgacgcggccagaggcggacgacgcggacacggacatgtccgtggaggcccaggagttcaagaatgtcctcgacgagctcaacccgcttctcggcgcggccaacctgtgggattacttgccggcgctccgggtgttcgacgtgctcggcgtgaagaggaagatcgcgacgctggccaacaggagggacgcgttcgtgcgccggctgatcgacgcggagcggcagaggatggacaacggtgtcgacggcggcgatgatggcgagaagaagagcgtgatctccgtgctgcttagtctgcaaaagactgagccagaggtctacaaggatatagtgatcgtgaatctttgtgcggcattatttgctgctggaacagagactacagcaatgacaatagaatgggcaatgtcgcttctgctgaatcatcccaagatactcaagaaagcaaaggcagaaatagacgcatccgtcgggaactctcgcctgatcaatggagacgacatgcctcatcttagctatctccagtgcatcatcaacgagacgcttcgtctataccctgtagcaccactgttgatccctcacgaatcatccgcagattgtaaggttaatggctatcacattccaagtggaacgatgctgcttgtcaatgtgatcgccatccaaagagatccaatggtttggaaagagccaaatgagtttaagccagagaggttcgaaaacggcgagtccgagggattgttcatgataccgtttgggatggggagacggaagtgtccgggagagacgatggctttgcagacaattgggttggttttgggggctctgatccagtgcttcgattgggacagagtcgatggcgccgaggttgatatgacgcaaggcagtggactgaccaaccctagggctgtcccgttggaggccatgtgcaaaccacgcgaagctatgtctgatgtttttcgggaactcttgtga

SEQ ID NO: 3692 - DNA, 1520 bp, Oryza sativa
atggataacgcctacattattgccattctctctgtagctatcctcttcttgctccactactacctcctcggccgcggcaatggcggggcggcgcggctgccgccgggtccaccggccgtcccgatcctgggacacctccacctcgtcaagaagccgatgcacgccaccatgtcccgcctcgccgagcggtacgggccggtgttctcgctgcgcctcgggtcgcggcgcgccgtggtggtgtcgtcgccggggtgcgccagggagtgcttcaccgagcacgacgtgaccttcgcgaaccggcccaggttcgagtcgcagctgctggtctcgttcaacggcgccgcgctcgccacggcgagctacggcgcgcactggcgcaacctccgccggatcgtcgccgtgcagctgctctccgggcaccgcgtcggcctcatgtcggggctcatcgccggcgaggatgtaccgcgccgcggccgcgtccccgccggcgccgcgcgcatccagctgaagcggaggctgttcgaggtctccctcagcgtgctcatggagaccatcgcccacaccaaggcgacccgccccgagacggacccggacaccgacatgtccgtggaagcccaggagtttaagcaggtcgtcgacgagatcatcccgcacatcggcgcggccaacctgtgggactacttgccggcgctccggtggttcgacgtgttcggcgtcaggaggaagatcctcgccgctgtaagccggagggacgcgttccttcgccgcctgatcgacgcggagcggcggaggctggacgacggcgacgagggcgagaagaagagcatgatcgccgtgctgctcactctgcagaagacagagccggaggtgtacaccgataacatgatcacagctctaacggcgaacttgttcggagcaggaacagagacaacctcgacgacatcagaatgggcgatgtcgctactgctgaaccaccccgacacactcaagaaagcgcaagccgagatcgacgcatccgtcggcaactctcgcctgatcaccgccgacgacgtgactcgcctcggctacctccagtgcatcgtcagggagacgctccgcctgtaccccgccgcgccgatgctcctcccgcacgagtcctccgccgactgcaaggtcggcggctacaacatcccgcgcgggtcgatgttgctcatcaacgcgtacgccatccaccgtgacccggcggtgtgggaggagccggagaagttcatgccggagaggttcgaggacggcgggtgcgacggcaatctcttgatgccgttcgggatggggaggcggaggtgccccggcgagacgctggcgctgcgcacagtggggttggtgctgggcacgctgatccagtgcttcgactgggagagggtcgacggcgtggaggtcgacatgactgaaggtggcgggctcaccatccccaaggtcgtgccgttggaggccatgtgcaggccgcgcgacgccatgggtggtgttcttcgcgagctcgtctg

SEQ ID NO: 3693 - DNA, 1539 bp, Oryza sativa
atggataaggcctacattgccgtcttctccatcgtcatcctcttcttgctcgtcgactaccttcgtcgtcttcgtggcggcggcacgagcaatggcaagaacaaggggatgcggctgccgccgggtctaccggccgtcccgatcatcggccacctccacctcgtcaagaagccgatgcacgcgacgctgtcccgcctcgccgcgcggcacgggccggtgttctcgctgcgcctcggctcgcggcgcgccgtggtggtgtcgtcgccggggtgcgccagggagtgcttcaccgagcacgacgtggccttcgcgaaccggcccaggttcgagtcgcagctgctcatgtcgttcgacggcaccgcgctggccatggcgagctacggcccgcactggcgcaacctccgccgggtcgccgcggtgcagctgctctccgcgcgccgcgtcggcctcatgtcggggctcatcgccggcgaggtgcgcgccatggtgcggagcttgtgccgccgcccagccgccgccgcgccagtccagctgaagcggaggctgttcgagctctccctgagcgtgctcatggagaccatcgcccagagcaaggcgacccgacccgagacgacggacacggacacggacatgtccatggaagcccaggagtacaagcaggtcgtcgaggagatcctcgagcgcatcggcacgggcaacctgtgcgactacctgccggcgctccggtggttcgacgtgttcggcgtgaggaacaggatcctcgccgcggtgagccggagggacgcgttcctccgtcgactgatctacgcggcgcggtggaggatggacgacggcgagaagaagagcatgatcgccgtgctgctcactctgcagaagacacagccggaggtgtacactgacaacatgatcacggctctttgctcgaacttgttaggagcaggaacagagacaacctcgacgacgatagaatgggcaatgtcgctgttgctgaaccacccagaaacgctcaagaaagcacaagccgagatcgacgcgtccgtcggcaactcccgcctgatcaccgccgacgacgtgccccgcatcacctatctccagtgcatcgtcagggagacgctccgcctctaccccgcggcgccgatgctcatcccgcacgagtcctccgccgactgcgaggtcggcggctacagcgtcccgcgcgggacgatgctgctcgtgaacgcgtacgccatccaccgtgacccggcggcgtgggaggagccggagaggttcgtgccggagaggttcgagggcggcgggtgcgacggcaacctctcgatgccgttcgggatggggaggcggaggtgccccggcgagacgctggctctgcacacggtggggctggtgctgggcacgctgatccagtgcttcgactgggagagggtcgatggcgtggaggtcgacatggctgagggtggcgggctcaccatgcccaaggtcgtgccgttggaggccgtgtgcaggccgcgcgacgccatgggtggtgttcttcgcgagctctga

SEQ ID NO: 3694 - DNA, 1143 bp, Oryza sativa
atggggcggttctccaatggcgtcctgggcgccctgagcttcgccgccctcctcgcctccgtgccgctcatcggcgcgggcgcctacctcctcgaccacccggccagcgagtgccagcgccttgtgcgggtgcccgccgtggcgctcggcagcgcggcgctcctcctctccctcatggcgatcgccggagttacctgctgccgcggcgcggcgctcctctgggcctacgcgtccgccatgttcctgctcatcgtcggcatgttcttcgtcaccgccttcgtgttcgtcgtcaccaacaggggcgtcgccaccgccgtgtccggcaccggctacggggactaccgggtcagggactactcggagtggctgcgtgccaggatcgaggattacgagacgtggcaccggatcgagagctgcatggccgacgcggccgtgtgcggcggccctctcgccgggatcaaccccggcgagttctaccgtctgcatctgccgctaatccagtgtgaactaaacacaaccgtagtatctgactacctctgtgacgtgacaaccgtgcagtccggctgctgcaagccgccagtgtactgcgggtacgagcgcgtgaacgagacgttctggatagcgccggcgcggggcctggacgcggcggacgtcgactgcctggagtggagcaacgaccaggccgtgctgtgcttccgctgcaacgcctgcaaggccagtgcgctggacaccgtcaggcgaaactggagggccgtggccgtgctcaacgtcgccgtcctcgccatcctcatgctcgcctactccctcgcctgctgctccgtgcgggatcgcagccgagtcaggttgggcaagaaagaacccatcttagcagtgccggctatatccatcaagacatcaaagctaaaactttggaacaaccaagcgccaacaacaaccccatcggtgtgtgaccgtcgtgtcctactgaaaaggcaatggattagttctgaggaggccaataagatggttgccgtggcaaaagaagcagttgcgattgagaattcacaagttgtcaatgaacaagaatcggttgttacgaaccaggatgtcatagaagaacaattgctgcttcccaatcttcatctcaatcactgtcacaactag

SEQ ID NO: 3695 - DNA, 624 bp, Oryza sativa
atggccactgccagctctataaacaagaggtttagcctcgccggtgccacggcgcttgtcaccggtggcagcaaaggcatcggccgcgccatcgtggaagagctggcgagcttcggcgcgacggtgcacacctgcgctcggaaccaggcggagctgagcagatgccaggaggagtggacggccaagggcctcgccgtcaccgtctccgtctgcgacgtggcggtgcgcgccgacagggaggcgctcgccggcagggtgtccgccatgttcgacggcaagctcagcatcctggtgaacaacgctgggacggcgtacctgaagccggcggcggacctgacgccggaggagacgtcgaggttgatgacgaccaacttcgagtcgtgcttccacctgagccagctgttctaccctctcctcaaggactccggaagaggcagtatcgttaatatctcgtccgtcgcttctgtcctcgcgttccattctcttcctatctactcggctgccaaaggagcaatgaaccaagtcacaaggaacctggcttgtgagtgggcgagcgatgggatcagagtcaattccgttgcaccgggctacatccagactccactcctaactgccggatcataa

SEQ ID NO: 3696 - DNA, 843 bp, Oryza sativa
atgcgcacgcggctgcgcctccccgtcgtgctcctctcctgctccctcttcttcctcgccggcttcttcggctccatcctcttcacccaggatccgcagggggaggaggagctcgacacgccgatgaggagggagcggctgatggaggcggcgtggcccggaatggcgtatggcgagtccggcgagccggagccgtccttgatcccttaccagattttgagttggcaacctcgtgcactatattttccacaatttgcaacatcgcaacagtgcgaaaatattgtaaaaactgctaaacaaaggcttatgccatcgacattggctttaaggaaaggagaaactgaggagagcaccaaaggaataaggacaagctcaggcacatttctaagttctgatgaagatccaaccggaacccttgctgaagttgaaaagaagattgcaaaggccaccatgatccctagacatcatggggagccctttaatatcctgcgctatgagattggacagaggtatgcttcgcattatgacgcattcgacccagctcagtatggtccacaaaaaagtcaaagggtcgcgtctttcttgctttatctcacggatgttgaagaaggcggagaaaccatgttcccatatgagaacggggaaaacatggatatagggtatgactatgaaaagtgcattggcttaaaggttaaaccaaggaagggtgatggtctcttgttttactcccttatggtaaatggcaccattgatccgacatctcttcatggtagctgcccagtgatcaaaggagaaaaatgggtcgccacaaaatggattagagacaagagtaaggcagtgtaa

SEQ ID NO: 3697 - DNA, 678 bp, Oryza sativa
atgagctccgactccagggagctgctcgggatcgatcccccggagctcatcttccccttcgaattaaagaagcaaatctcgtgttctctgcacctaacaaacaagacagatgaatatgtcacgtttaaggttaagacaactagtccaaagaagtactgcgtccgtccaaataacggcattgtggctccccagtccacatccaatgttcttgtaacaatgcaagctcagcgggaggcgccaccggacatgcaatgcaaggacaaattccttgtgcagagtgccatagtgacacaagagctcacaccgaaggatatcaccggagacatgtttacgaaagaatcaggtaatgtggtggatgaggtgaagttaaaggttgtttatactcaacctcacccgacatctctcaatggcgggtctgaggaaggtctaggaagcttgagttatcaagaagcaacaaaaggatctagagaatcagaaacagtaacctctgagccattggccttgatttcaaagttgaaggaggagaagagttctgccattcaacagaacatgaagcttcgagaagaactggatcttctaaggaggcaaatggggagtcagmacggtggtttctcactagtttttgtgctggttattgctattctgggaatcctgcttggttttctcattaagagatga

SEQ ID NO: 3698 - DNA, 1014 bp, Oryza sativa
atggagtgcgagccggaggagctgcaattcctgggcatggtgggtatctacagggaggcggcgtccatcctgcgcgcccaccggccgctcttcgcccgcatcgccgccgccttcgtcctcccgctctccctcctcttcctcctccacatcgccatctcccacgccctcttctcccacatcgactccgacgactccgccctcgactccgccgccccgggcacccccgcccagcgccgcctcctccaccgcctcgccgacgactggctcgccctcctcctcttcaaggccgcctacctcctcgccctcctcctcttctccctcctctccaccgccgccgccgtcttctccgtcgcctccgtctactccgccaagcacgacgccctctccttccccagggtcctctccgtcgtcccccgcgtctggcgccgcctcgccgccaccttcctcgccgccttcctcctcctcttcgcctaccacctcctcttcgtcgccgtcttcgtcgccctcctcgtcgccgccgactccggatcgggcctcgccgcgctgctcgccttcctcctcgccctygcctacatcgcgggcctcgtctacctcagcgtcgtctggcacctcgccagcgtcgtctccgtcctcgaggactacaagggattcgaggccatgcgcaagagcaaggcgctcatacagggcaagctctggaccgcctccgccatcttcttcgtcctcaacgtcgtcttcatcgtcgtcgaggtcgccttccgggcgtgggtggtgcgcggggccacccacggcctcggcgccggctcaaggctcctcctgggcctcgccatgctcgccgcgctctgcgctgtcgtgatgctggcgctcgtggtgcagacggtggtgtacctggtgtgcaagagctaccaccacgagagcatcgacaagagcaacctctccgaccacctcgaggtctacctcggcgagtacgtcccgctcaaggccagcgacgtccagatggagcaattcaacctctga

SEQ ID NO: 3699 - DNA, 1173 bp, Oryza sativa
atgggttcccgcgacggatggcggctactcctcctcctgctcggcttcctgctcgtggcgccgacttgccgcgctcgggaggcgcagccgctgccggtactggaggaagaggaggtggtggcggacgcggcaggagggcgtggtggcgcgggcgctgctgccggcggaggaaacaggcgcgcgccggtgcggcacgagctgtcgctggacttctacgccaagacgtgcccggccgtcgaccagatcgtcggcaacgtcaccgcgccgcggttccgcgacaaccccgccgccggccccgccgtgctccgcctcttctaccacgactgcttcgtcgaagggtgcgacgcgtccatactgatcgcgccgacggccaacaacggcggcggggcgccgagggtggagagggacatggaggagaaccggaacctgccgcaggaggcgttcgacacggtggagatggccaaggccgccgtggagaaggcgtgccccggcgtcgtcacctgcgccgacgtcctcgcgctcgccgcccgggacttcgtccacctggcaggtgggccctactacgcggtgaagaagggtcggaaggacagcagggtgtccctggcgggcaaggtgcggggcagcctcccgcgcgccaactccaccgtggacgagctcctccgcgtgttcgccgccaagggcctcggcgccggcgacctcgtggcgctctcgggcgcgcacaccgtcgggttcgcgcactgcgcccacttcctgggccgcctctacgacttcggcgggacgcggcagccggacccggtgatggacgcgcggctggtgaaggcgctgcgcatgtcgtgcccctacaccggcggcagcgcccgcgtggtggtgcccttcgacgtgagcaccccgttccagttcgaccacgcctactacgccaacctgcaggcgaggctgggactcctcggctccgaccaggcgctgttcctcgacgcgcgcaccaggccgctcgtcgaggggctcgccgccgacagggagcggttcttccaggcgttcgcggccagcatggacaggatgggctccgtccgggtcaagaagggcaggaagggggaggttgatgtgatggaaaaagttgaaagtttagggaagtttggatctaaacacagccttattgatatggccaggttgatgtga

SEQ ID NO: 3700 - DNA, 969 bp, Oryza sativa
atggtggcgctgcttcgctcgtgccgccgcctgatcccgcacctgtccgcctgcgccgccgccgcgccgtcgtcgtcatcgtcgtgcgctcctcgggctaggccgatctcgcggggactgcggctgctgccggtggtgctcgcaatggcggggtacagcagcggctccgccgcggaggggaggaggctgctgttcaggcagctgttcgagaaggagagctccacctacacctacctcctsgccgacgtcggggaccccgagaaacccgccgtgttgggtaaatggaagcctcttttatggatacctacgcaagatattggcaatgttgcaatcagtgacggtgattataattatccagttcaggagttgattgaccctgtggacagaacagttgatagagatctcaatcttatcaaggagttgggcttgaagctagtctatgctatgaatacccatgtgcatgctgatcatgtcactggaacaggattaataaagactaagttacctggagtaaagtccgtgattgcaaaagtaagcaaagcaaaagcagaccattttattgagcatggggacaaaatatacttcggtaacctcttccttgaggtacgatctactcctggccatactgctggctgtgtgacttatgtaacaggtgaaggcgatgatcaaccttcaccaagaatggcttttactggtgatgccttgcttatacgtgcatgtggaaggacagactttcagattttcacattgccaaaggataccctgctttatcctggccatgactacaaaggtttcacagtaagtactgttgaagaggaggttgcgtataatgctcgactaacaaaggataaggaaacattcaagaaaattatggacaacttgaacttggcctatccaaagatgatcgatgtagccgtgcccgcgaatttgctctgcggtattcaggatcctccaccatccaaggtctga

SEQ ID NO: 3701 - DNA, 3747 bp, Oryza sativa
atggacgaaccagagtacttggtagaaggtaaagttaggatatccttatcatttaagtgtgtatatctacttacagatatagagaccatatttctctatccatcgtgtaattgtaagaatgatctaaacagggtgttcgatgttctcctgaacgaaaagctgcgccatgctgtgaattcagtcgatggcttcttggttactatggacatggtgttcaggtgcgaagacgaggagttcgactcgggcatccagttgtggcgttcacgagcaggacgtcttgtgacgttcatccaggcggtggtgttcgccatcatactgtgccctctggctgtgctctacctgtctgggctggtcatcagcactagtctatcgctgtggcgcctcatacagcacgactacggcgacggcgacggcagcgccaacctgactccggcgctcaatgtgctctactcactggcactcttccagggcgtcctcttcttctaccagtgggtgtcctacttcgccgggaaaaggttgatcgaaaaggtggccagtaaatattggcaaaacagtaaggaggctggcggggccggggcgcgggcgggggcgtggcgcaaattggtgaaggtgtacatgaagaagaccaagatccggtgcgagaaggatccatccttcctagaagagtggaacctggtgacgtttgccgtggagctgatgaagccggagtccaagtccagcgactacgtgtccggggcgatgatcctggacacgatcctcgggcagaaggacctgacggcgcagcacgcgctgatcaggaagctggtcggctcggcgtcctccaggaaggtgatgaagaagctgctgcggtcgcttcggtccgcgagccagtacaaccggaacatccgggtgcacgccgcccggatcgtgtcgcgtctcgccggcgagatcagcctcgccagcttcccggaggcgctctcgtgcatatcgtcgctgctcgacaccaccaccacggagcagcaggaacagcagcagcaagacggagacagtgcgccgtccgctcactacagggatctcatggtgctgggccgcgtcatccttcagaagctcgccgccgccgacgagcacaacctttttctcatcggcaaaaagcagagcactatctccaaggccatgctgcccgtcagaaaagacctgctccacatccacaacaacggccatgtcgacgcatggaaggacatcgtgaccgagtcactgcagctcatgtcccagcttgtcagcgcccctgggaagaccggcgacgatctgcgctcccacatcttgacgattcacaaagacgacatcagagtgaataacattatcatctgtaagcaatgccaaagcaacaagaagctccacatgcaggccattaacatcttcacacagcaacagcatcctatggaagcactttcgacgacgtcttcgaatatagacacaacatatagcgaaacgaacatcaggctgctcgtagacatcttcttgactaacaaggacgcctccacaagaaaaatggcagttggcatactggcaatactgctgtccgaccaaaataaaagcaatgccaatgccaatgccaccattatcttcaaggcaagtgacaccgttgtccgtgatctcaagacagtgcttttagatgatgaggaaacagaatacagaatatgcgcagcagaaatactcgagcatctacacaggacaaaggaagcctcctatctcaagaaactgatggaagccatgcaaaatgtgctaccgaagattctcaacgaaatatttatctctctctctccacctaagcaaggagaaaagcaagcagaaaaggcagaaaaaggaacagacggaaccaagacagatcctgacattgaagaaggtgctggtgccgttgcttcgaaagataatgtcgacgtcaatgaccagaaggaggacattggtaagaaaaaaaaggacaggacgaggaaactacatgcagctttactgtcacttagtgtggcaatatttgaaaaacggatcagagatggtaaagatttggatacacttgctggtgaaattgcccgaggagactctgcatccagctttgtcggtaagctgaggacgatggtagatcaaaacagtgaacaaacagtcaattgcctgagaattctgaagattgccactaggatgatcatatcactgctaaaacttgaaggatgctaccccaaacaagagctggagaacttgatgatggatcggtcgtcatggatgtatgagatacggagaacgcagccgatatttattaaggaagcatctaaatttattgatcaggctaaggagcatgctttgagggagaatatgacaaagatcttttgtccgtgtcgtcattgcaagaatcagaaattgttggtagatcctggtgaaatattgggtcacataatggagtacggattcaccgccaactacaagaggatatgctacgccatgtctcaaccgtttcatagtgagtttttccatggcggcagcgccgccgccggcagtgtcgccggcgagagggtgacggtgctgaccatcgatggcggcggcatccgggggatcatcccaggcaaggtgctcgagttcttggagaccgagctccagcggctggacgggccagatgcgaggctggccgactacttcgactacatcgccggcacgagcaccggcgggctgatcaccgcgatgctcgccacccccaaagaggacggagacgggccgcggcggccgatgttcgccgccggtgagatttgcccgttctaccaggagcacggcccgcgcatcttcccccagaggtggggcaagctcgcctccaccgtcgccgcggtgtgggggcccaagtacgacggcaggtacctccgcgacatggtccgggaggtgctcggcgaaacgacggtggacggcacgctcaccaatgtggtcatccccaccttcgacgtccggctgctccagcccgtcatcttctccacatacgacgcgaagaactcgactctgaagaacgcgcggctctccgacgtctgcatcggcacgtcggcggcgccgacgtacctccccgcgcactacttccagacacacgacgacgccagcggcgaaacgcgcgagtacaacctcatcgacggcggcgtcgccgccaacaatcctacgatggtagccatgacgatgatcacggaggagatgatagcggaggagaaggcgccgctgctcctgacgaagccgccggagaaggagtgcggccggttcctcgtcctgtccatcggcaccggactgacctccgacgaggggctgtacacggcggagaaatgctcccggtggggggcgctcgggtggctgcggcacagggggatggcgcccatcatcgacatcttcatggcggggagctccgacatggtcgacatccacgtcggcgtcaatttccagctgttccacagcgaggggaactacctccgcatccaggaggaccaggatgactcgctcaggagcaccgcggcggcgctggacgaggcgacgccggagaacatgaggaagctcgtcggcgtcggcgagcgcatgctggggcagcaggtgacgagggtcaacgtggagaccgggaggtacgagaaggtgcccgacgaggggagcaacgccgacgcgctcgtcaggatggccaggacgctctccgaggagaagacggcgaggctgcagcggcggatggacgaagtgacggcggcggccagtgccactgggttttag

SEQ ID NO: 3702 - DNA, 1392 bp, Oryza sativa
atgacggtggatcagaggacgacggcgaaggcgatcatgccgccggtggagatgccgcccgtccagcccggaagggttggattgtggggggtgaccgtgcggtgtagggatcatggaagatgttggggattttgttgggttgaaagctgggacaggtttaacttcgtaatacagtctctgatacatgaagtactgattgagatgggtcccttgtgtccagcagtgaagtgtgagcacaaaataactgcttgtgtttcagcaggagctcttccctgtaatgagcatgcactcttggcccagcagacccccaagggagatgcgccatcagtgggctctaagatttggaaaaagcgaccacggagatcacgcgatggacctacttcagttgcagagaccatcaagcggtgggccgagctcaacaatcagcaggagcttgatccacagggtccaaagaaggcaaggaaggcacctgcaaagggttcaaagaagggctgcatgaaggggaaaggaggaccggagaatacacgttgtgacttccgtggtgtgaggcaacgtacctggggcaagtgggttgctgaaattcgggagccgaatcagcaaagtagactctggttggggaccttcccaactgccgaagctgcagcttgtgcttatgacgaggcagccagagcaatgtatggtccaatggctcgcactaattttggccagcatcatgcccctgctgcttccgttcaggttgcactagcagctgtcaaatgtgctttacctggtggtggcttaacagcaagcaagtctagaacatccactcagggtgcatcagcagatgttcaagatgttttaactggtggcttatcagcatgcgagtccactacaacaacaattaataatcaatctgatgtcgtctctaccttacataagccagaagaggtttctgagatctctagtccactgagagctccaccagctgtcctggaagatggttctaatgaagacaaggctgaatcggttacctatgatgagaacattgtcagccagcagcgtgcccctcctgaagccgaggctagtaatggaagaggcgaggaggtctttgagcctctggaacctattgccagcctaccagaggaccaaggagattattgttttgatattgatgagatgctgagaatgatggaagctgaccctacgaacgagggtttgtggaaaggcgacaaagatggatcagacgccatcctggagcttggccaggatgaacctttctactacgaaggggttgatccaggcatgctggacaacttgctcaggtctgatgagccagcatggttattggcagatcctgcgatgttcatctccggtggcttcgaagatgactctcagttctttgagggcttgtga

SEQ ID NO: 3703 - DNA, 2697 bp, Oryza sativa
atgagcatcgggtttttaaacgtcgactgcggattgacaaatcgtagtacttacaatgacaccgacacaactttgacgtacgtttctgacagagaatttgtcgagagcggcaagagctacgatattatggcacaatacatggcagatgctacaaatgaacaagaaaaaacgttgagaagcttccctgatggccaacggaactgttatacattaccaaccaacagtagcaagaagtatctcatcagagccaccttcacttatggaaactacgatgggctcaactcgtcagagaagggttctttgtttatctttggactccatatcggtgtcaacttctggacgacggtaaacttgacaaagtgggatccatcgagcacggtatggaaagaggtgatcacggttgctccggacaagtccgtatctgtctgtctgataaacatgggatcaggaactcccttcatatctacactagatcttaggcccttgcaagacacaatgtatcccttcgtgaatgcctcaacgtccgtcagctatttttctcggataagatttggatcggttgatgaatacatcacaagattcccaacggatcagtatgatcgcttctgggagggctgggtctttaccatgcacacctttccatgggttaataagagtagcaacggcaaggtggctgaacttcctaatattgacacctttgggcttcctccagccattctgggaagcgcttcaaccataaacggaaacttctcttggctcaacatcagcgttagtgccagtaactctctcgcaacagacctagagcttcttccagtctttcactttgttgaactcggcaataatggttcaaagagaatttttgacatctacaatgtcgatgaaccgcaagcactgttctccaacttcagcccaccgtcattcctgagctccatgttccacaactggttcttgcgcaaaggcagaagggcatattttcagcttcgcaagaccccagactcacagctaccacctcttattaacgcatatgaggtgtactcccgtgtccaggtggagaacttcaccactgcttcaagtgatgttgactccatgaaaacaatcaaagagaagtacatggtaatcaaaaactggaacggggatccatgctcaccaagagagtacatctggaatggtttgacttgcacctaccctaatggtggccagaacccaaggattgttgaaataaatctatctggcagcggtctgcaaggagagttagaaatatcattcatgaaaatgtcatcactgaagaaattggatttatcacacaacaacctgacaggcaccattccagactatcaagtaaattccctcactgttattgacttgtctaataaccagctcaatggatccatccctgattctattcttcaaagatacaaagccggtttgcttgagctaagactagaaggcaatcccatatgctccaaagtcagagctagctactgtggaaataagaagaacacacgcacacgtattttgctcatcagtgtgttagttcctgtgacatctctcctagtggtgctgttcatattctggaggttatgctggaaagggaagtcaagaaaatcagaagaagaagattatgatatgtatgaagaggagactcccctacatatcgacatcagaaggttcacatatgcagagctgaagctcataactaacaatttccaatcaatcattggaaaaggaggttttggtactgtttatcatggcatactggaaaataatgatgaagtagctgttaaggttcttgtggagacatccatagcagagtcaaaagactttctccctgaggtacaaaccttgtcaaaagttcatcacaagaatcttgtcgctttggtagggtattgccaaaacaagaagtgccttgcacttgtttatgatttcatgcctagaggaaatcttcaacagcttttaagaggaggatatgacagtttgaattgggaagagcgacttcacattgcacttgatgctgcacaaggtctggaataccttcatgaatcatgcaccccatcaatagttcacagagatgtgaagacacccaacatccttctggacaagaatctggtggccaagatatctgattttgggctttcacgggcttttaatgctgctcacacgcatatatctactgttgctgctggcactcttggttaccttgaccctgagtaccatgccactttccagcttactgttaagacagacgtttacagttttggaatcgtcctcttggagattgtgactggtcaacccccggtattcatggaccctcaaaccgtccacctgccaaattgggtgcgacaaaagattgctaatgggagcgttcacgatgttgtggacaagaagctgttggatcagtatgatgccacgcacctgcagactgtgatagacctcgccatgaactgcctcgaaaacgcatcgattgacaggccaagcatgaccgaggttgtttccgtgcttaaggtgtgcttgccgatttcaagcgagagacaatcggcaacttcaacccctcgaaagaagaacgtcatggatgcagagattccaagacagttccagttgatgatttctggagcttcaacaacaagctacgagggcagctcctttcagtctggatataccggtggggtatcagaaataagccacatttctgggcggtga

SEQ ID NO: 3704 - DNA, 1533 bp, Oryza sativa
atgaggaaattcatagcagcactgcggcttgcactagcagcagcagctcatctgctgctgacgctgccaccggcacaatgctactggctcaacccggagatctacgacgccggcgggctgagccggcgagccttcccggaggggttcgtgttcggcacggccgcgtcggcgtaccaggtggagggcatggcgaagcagggtggccggggccctagcatctgggacgctttcatagagaaaccagggacgatccctaataatgccacagccgatgtgacggttgatgagtatcataggtacaaggaagatgtgaacataatgaagaacatgggctttgatgcgtatagattttcgatctcttggtcaagaattttcccaaatgggactgggatggtgaaccaggaaggagttgattattacaacaggttaatagattacatggttaagaaaggcatcaaaccgtacgcaaacctctaccactatgacctaccattagcactccatgagcagtacttaggctggctaagcccaaacatcgtagaggcgtttgcagactacgcagatttctgcttccagacgttcggagacagggtgaaggactggtttaccttcaatgagccgagatgcgttgctgctctaggatatgacaatggcttccatgccccgggaaggtgctctggctgtgatgcaggaggcaactccacgacagaaccataccttgctgcccaccatctcatcctttctcatgctgccgccgtcaagcgataccgcgaaaagtatcagctttatcaaaaggggaggattggaattctcttggattttgtctggtatgaaccattcagtgacagcaatgctgatagggctgcagcacagagggcaagagattttcacctcggatggttccttgaccccattatccatggtcggtacccatactcgatgctcgaaatcgtcaaggacaggatgccaaccttcagtgatgaggagtccaggatggtgaaagactcaatagattatgttggcatcaaccactacacctctttctacatgaaagaccctgggccatggaacctgacaccgaccagttatcaggatgactggcatgttgggtttgcctatgaacgaaacggcgtgcccattggagctcaagcaaactcctactggctttacattgtgccatggggaatcaacaaggctgtgacctatgtaaaggaaacatatggaaaccctacaatgatcctttctgaaaatggtatggaccaacctggcaacgtcagtatcactcagggtgtgcatgatacagtaagaatcagatactacagaaactacatcactgagctcaagaaggcgatagacgatggtgccaaagtgattggatactttgcttggtcattgcttgacaacttcgagtggaggctcgggtacacttcccgttttggcatcgtctacgtggactacaagacgctaaagaggtaccccaaggactcagctttctggttcaagaacatgctctccagtaagaagaggaactaa

SEQ ID NO: 3705 - DNA, 540 bp, Oryza sativa
atgtcgctggagcgcgcgttcgccggaggggacggcggtggcggcggaggcattggccccgcggtcgagtccaccgttgagaagggttgtgtgtacattaaagaagcataccatgtctactggacaagctgtgttagaggtgtccatacagggcagatggtcctcaggctcgtcgaggctatcgatgtgtatcttgctggaacagtcatgctgatttttgggatgggtctgtatgggctgttcatcagcaacgattttcctgatgtacctgcatctgatcgtgctctcaagggatcatccttgtttggcatgtttgctttgaaggagagaccgaggtggatgagaatcagctctctcgatgagctcaaaacgaagctgggccacatcatcgtgatgattctcctggtgaagatgttcgagaggagcaagatggtgcacatcaccacgggaatggacctgctcagctacgcggtctgcatcttcttgtcgtcggcttccctgtacatcctgcacaaccttcatcgcccagaacacgagtag

SEQ ID NO: 3706 - DNA, 2577 bp, Oryza sativa
atggccgcggctcggcttccttctcctgcgccggtggctcatcctcctgctctccgcgcgcgccctctagctccgcatctatacgccgccctgccgcgcgctccctatccggcatggcagtggcgcggtgctcgggcggcaagcccggcgaggagggaggctgtggtcaggggggcagccgtagcagaggacgaaggagtggagctagccgacgacgacgacggcgagcgcggggtkgggggcggcgacggcggttcagagtcctttcgaaccccggctaggcatcctcccgcagttgctttcgctattggcgtgggatctcatggtatcatggtaatctgttggattggaggaggggctaacgagcacccgcaaccccatggtgatctccgttttgtctccctctcgatatttccatttatagatgtaacttatttgtacaacgttgtgttcactttagtctttttcaggaaagcaagtcttgcgatgggtgcatctgccagcagttcagtaacgtcgaagcttactaacgatggagagaatcagagagttaagtatgcctcatcaactatgcaaggatactgtccgacaatgcaagatgctcttgcagttgaactagatctagatgcattaaggaacacatcattctttggtgtttatgatggcgatggaggagctgaagtagcaatgtactgtgcaaaacgatttcatgctatgctttgcgaggatgaaaactatctcaacaatctgcccaatgcaattacatctgtgtgctccagacttgatgatgatttgcaacgatcaaatgaatggaaggagtcactttatccccgtggtaatggtgaatgtttccagttccttaagactggcgtttgtgctaacctctggcattccgaagagttgggatttatgctccctcagcaggcttacagggcgccgttatacgaaggaagcacagcatgtgtggtaatcattagaggaaatcagatcactgttggaaatgttggtgattctcgttgcgtagtttcacataatggccaggcaattgatttgtccattgatcacaaaccaaccgtcggaagtgaacgtgagagaattctaagagcaggaggacgagtattggtaaaaagaattcctgtcatgggctcagatggaagactcatgcgaggatggggttattttgaattaaagaagaaccaaaatattcctgcttcacagcagatggtgacatgtgatcctgagtttaccattgtggacataactgctgatactgaatttcttgtcatagcaactgacggcatctggggtcacatgtcaagtcaggacgtggttgatttcatacgcaaggaattacactcgggggaggaaaatctgcgcgccatttgtgagaagcttcttgatcattgcttgacctcgagggacaacgtgacggtcatactggttcggttcaagcccggcgccgcggttatccctatcctgtccgacatcgatgaggagcctgtcctctccgacgttgaggaggagccccatgaacctcaacacaatcccggggatggcggcggcggccagcaagacatcggtggcgaatcagaggagctcccattggcccattttcctcaggaatacctcctccccgtctacggtgatcatccactgctcaccggcgccgtcgtccaggagcccttgccgctgccagaaggcggcgatcaccctgtgcctcccaagaagaagatcaaggtcgcaccgctgctgccagagcgcgccgatcagccggtggtcaccagcaactcagcgacgacgacacggccgcagctgtgcgcgccctacgacgacgaaatcgaggccaccctacgtgccatggagacgaaccccgccgagcggccctccccgtacttcttggagacgacacagggtgggcggatgaccgcactggtgcgcgcctcgatgatcgccttcatggacgagttcagccggttccacgagctcgccgacggcacgctccagcgcgccgcctacttcctggaccgctacctgtcggtgacgcccgagtcggacgacgcgctgcagctccgcctcgtcggggccacggccgtgttcctggcggccaagtacgaggaccagtacaccctgaggaagatcgacgccagcatggtcgccgcccggcgcggctacaccagcgagacgaggcacaagatggtgtcgatcatggagaccgagatgctcgccgcgctgggcttcaaccttggcggcccgacggcgtacacgttcgtggagcacttcaccaggtactacggcgacggagaagaagaggagctgttgaaggaggcggcgcatcggttcgccgacgggtcgctgctgacgtacgggttccaccgctacctgccgtccattgtggcggcgtcgtcgatcttcctggcgaggctggacgtgctggggcatgagccatggagccaggatctcgcggagctgacagggtacaaggccatcgacttgatgggctgcgtgtgcgacatgtacagtcaaatcgcatgtcctcgctttgctctcttccaagagtacttcttcgagaatccatag

SEQ ID NO: 3707 - DNA, 810 bp, Oryza sativa
atggccgggggaggcgaagagctgaagctgctgggcatgtgggcgagcccgttcgctctgcgagcgaagcttgcgctcagcttcaagggcctgagctacgactacgtcgaggaggacttcaagaacaagagcgatgtcctcctcagctccaacccggtacacaagaaggtccccgtgctcatccacaaaggcaagcccatctgcgagtcgcaggtcatcgtgcagtacatcgacgaggtgttccccgacgccggcgtcaccctcctccccgccgatccccacgatcgcgccgtcgctcgcttctgggctgcctacattgacgaaaagctgttcagtgcgtggattctggtgttcagaagcaagacggaggaggagaaggcggaggcggtgaagcagacgtttgcggtggtggagaaactggagggagcactgagcgagtgctccaaggggaagcccttcttcggcggcgacaccgtcggctacgtcgacgtcgtgctcggaggcttcgtcgcgtgggtgcacgcgatcgaagaggtgttcggcctgaaccagttcgacgccgccaagacgccgctcctggcggcgtggttggagcgcttcgacgagctcgacgccgtcaaggaggtcatgccggacattggcaggctggtcgagctcgccaagatgaggcaggcacaggcagcgggggcggccgcagccgccgcggttcgtattgccgcaccgtgtatcttcgccatgtaccgtcgcagttgccaagtgggaagtggctattctaccaagatgatgtatgatgtgctacgtctatattaa

SEQ ID NO: 3708 - DNA, 702 bp, Oryza sativa
atggccggaggaggagacgagctgaagctgctgggcatgtgggcgagcccgtacgttctgcgagtgaagctcgcgctcagtctcaagggcctcgactacgagtacgtcgaggaggatctcaagaacaagagcgagctcctcctcagctccaacccggtgaacaagaaggtgcccgtcctcatccacaatggcaagccagtctgcgagtcgcagatcatcctgcagtacctcgacgaggcgttccccgatgccggcgccaccctgctccccgccgacccccacgaacgcgccgtcgctcgcttctgggccgcattctgcgacgacacgatcgcgaaggcgtcgcagcaggcgtcgtcgggaaagacggaggaggagaaggcggaaggggagaagaaggtggtggaggcgctggagaagatggaggtcgggctgagcgagtgctccaaggggaagcccttcttcggtggcgacaccgtcggctacgtcgacatcgtgctcggcagcttcctggcgtgggttcgcgccggcgacgcgatgaagggcgtcaagaggttcgacccggccaccaccccgctgctggcggcgtgggccgagcgcttcgtcgagctggacgtcgccaaggccgccatgccggaggtggacaagctgatcgagctcgccatggcgaggatggctggcgccgctgctgctgccaccaactga

SEQ ID NO: 3709 - DNA, 663 bp, Oryza sativa
atggcgctcgacgggaagccaccggtgccgccgccgtccacgccgccgatggactcgtgggcctgcggtggtcgccgctccaagcgccgcggcggcggcggcgggagcagcgggagtagtggcagctccggcggcggcggcggcggcgartccgaggaggagtacctcgcggcctgcctcttgatgctcgcgcatggcgtccgcgacgaggccgagktcgtcggcttcgcggcggcgacggcgaagccacagcatgggtacgagtgctcggtgtgcggcaaggtgtacgggtcctaccaggcgctgggcgggcacaagacgagccaccgcaagccgccgtcgccggcggccgaaccggcggccggcgaagagccgtcctccggcggggtggccggcgaggcgaaggtgcaccgttgctccatctgcctccgcacgttcccgtccgggcaggcgctgggcgggcacaagcggctgcactacgagggcggcgccgtcggagacgccgtcaaggagaagaactccctgaagaccaaggcggcggtggcgacagcggtgctgaaggacttcgacctgaacctgccggccgcggcgacgacggcgggggacgaggccgagagctcaccaccggaggccaagagagcacgtctgctgcttctcgtctaa

SEQ ID NO: 3710 - DNA, 987 bp, Oryza sativa
atgggcgatcataaggccgtcttcatctcccttcaggagctattccctcaggttgatcctcgcatactgaaggctgttgccattgagcaccacaatgatgttgattctgctgtagtcgcaatccttgatgaagtcatgccgtctgttacatctacaagtccacctacagtttcgtctgttcgtcaagaaattgcgccatgctgtattgcaacttcgtcagcttctgatggtacttctgaaacaggggattcctcttctgctgggcatggtaagcaggttgaagttgatgaaaatgtccactctacacaatgcaaatcttctatggagatcacaaatgataggcaaaggaatgtggtggatgaagtggaatcacattcatcatacccatggatgaatgaacaacttcacctgcctatccgcaatgtcccagaacctgttgatatttcttatgttggacatgacggacatttgttaagtgaatatctagatgcaatactcaatggagaaagtggaaattctagcacacaacccaatgttgcatatgtccacaagcaagattctgacaacccaatcccagctgatggttgtgttacaaaggataattcaatcactttacctcttgattatgtggacataaatgatgtgaattattccttgaagtcttctgctggtgtttccaacagtgaagattcatttggaacctgtggaacatatcagtttgcccatgtgctgaacattccgattccagacgctagaaaatcctctaaggggcttggcggagaacaggacaccaacagcatcggcaaagctgacttgctccctgatcttaatttgaatcaccttgctaccattgcttcaactcattctgttagtattgaatccctcgatgattccatttctgatgccaaaagcaataagggtgctatgagctttctacgtttcagtagtggttcatctataggaatgaagcgaagaactattgactaa

SEQ ID NO: 3711 - DNA, 615 bp, Oryza sativa
atggctggagtacatggacttgcagctgcaggtctggtggtgctactcctcgccgccgttgcgccggctttcgccgtggactacaccgtcggcgacacatccggctggagcagtggcgtggactacgatacctgggcgaagagcaaaaccttcagcgttggtgactcgctcgtgttccagtacagcatgatgcacacggtggcggaggtgagctcggctgactacagcgcgtgctccgccagcaactcgatccagtcctacagcgaccagaacaccaagatcgcgctcaccaagcccggcacccgctacttcatctgcggcaccagcggccactgctccggcggcatgaagctcgccgtcacggtctccgcggcggccgccaccacccccaccccgacggcgtcgtcgtccccgccgtccaccgcgacgcccgccacgccgtcatcggaccccggcatggacacgcccttcgtcgacgccggacgcgaccacgacgccgacgacgacgacgacgaagtcgacgggcagcaccggcggggccagcggcagcgaggcccgttcggtgatgggcctgctggtcggggccgtcggcctcgccatgatgggctaggctag

SEQ ID NO: 3712 - DNA, 1059 bp, Oryza sativa
atggcccgctgcttcgtcctcaacaccggcgccaagatcccgtcggtcgggctcggcacatggcaggccgagccgggcgtcgtcggcaatgccgtctacgccgccgtcaaggctggttatcggcacatcgattgtgctcaagcctacttcaacgaaaaggagattggggtcgctctcaagaaagtgttcgacgagggcatagtcaagcgcgaagatatattcatcacctccaaactctggtgcactaaccatgctccggaggatgtcccggttgcactggacagcacgcttcaggatttgcagaccgactatgtggatctttaccttatccactggccagtgaggatgaagaagggcgccggctttggcgggcaaaacgtcctcccgaccgatatcccggcgacgtgggcggcgatggagaagctccacgactccggcaaggctcgcgccatcggcgtcagcaacttctcgagcaagaagctggaggacctgctcgccgtcgcacgcgtgccgccggccgtcgaccaggtggagtgccacccggtgtggcagcagaccaagctccgcaagttctgcacctccaaaggaatccacctctcagcgtactcgccgttgggctcgccggggacagcgtcggtgaaagcggtgggcaatgtgctcgcgcacccggtggtcgtctccacggcggagaagctggggaagacgccggcgcaggtggctctacggtgggggattcagatggggcacagcgtgctcccgaagagcacccacgaggagaggatcaaggagaacattgacgtctatgactggtccatcccggaggacctgttcatcaagctctctgaaatcgagcaggcaaggccggagtcagcttcagcagcagacgctctgaaactctgttcttgttgggtctttttttttgggcaagatggtgaattggtgatggttctcatgaatggcgattttgatttgcagatgaagctgatccgtggagaattctggactcacccggaaggcgtctacaaatcaatcgaagagctttgggatggcgaaatctaa

SEQ ID NO: 3713 - DNA, 1760 bp, Oryza sativa
atgttcgggcgggacccgtggggcgggccgctggagatctcgaatgcggactcggcgacggacgacgaccggagccgggacctggacaggggggcgctgatgcggcagctggacgagacgcagcagagctggctcctggccgggccgggcgaccaggccggcaagaagaagaagaagtacgtcgacctcggctgcatggtcctcgaccgcaagatcttcatgtggaccgtcggcaccatcctcggcgtcggcctcttcatcggcttcgtcatgatgatcgtcaagctcgtcccccacaagcgcccccctcctcctccccccgaccagtacacccaggccctccacaaggccctcatgttcttcaacgcgcaacgatctggtccgctgccgaagcataacggcgtcagctggagggggaattcttgcatgaaggatggcctctccgacagcaccgtccggaagagcttggtcggaggcttctacgacgcaggagacgccatcaagttcaactaccccatggcctggtccatgaccatgctcagctggagtgtgatcgagtacaaggccaagtatgaggcgatcggtgagctcgaccatgtcaaggagctgatcaagtggggcacagattacctcctcaagaccttcaattcatcagccgatactatcgatcggatcgtcgcacaggtgggtgtaggtgacacctcaaaaggtggtgcccaacctaatgaccactactgctggatgaggccagaggatatcgattaccccagacctgtcactgagtgccactcttgctcagatcttgcttccgaaatggctgctgcccttgctgcagcttccatagtgttcaaggacagcaagacttactctgacaagctcgtgcgtggcgcaaaggccctgtacaagttcggtaggctgcagcgtgggagatacagccccaatggctctgatcaagcaattttctacaattccaccagttactgggatgagtttgtgtggggtggtgcgtggatgtactttgccacagggaacaatacatacctatcggttgcaacagctccggggatggcaaagcatgctggagcatactggctcgatagtccgaattatggagtttttacctgggatgacaagcttccaggagctcaggttcttctgagcaggttgcggcttttcctaagtcctggatatccttacgaagaaatactgagaacatttcacaaccaaacagacaatgttatgtgctcgtatctgccgatgtacaattcattcaactttaccaaagatacacctgggtggtattgtggacctactttctacactacagaagtcctccgcaaatttgcaaggtcacagctcgattatgtcctaggtaagaacccactgaagatgagctacgttgtgggttttggaaacaagtaccccaagcgcgctcatcacagaggtgcatcaatccctcataatggtgtcaaatatggatgcaaaggaggctttaaatggagggagactaagaagccaaatcctaatatccttattggagcactggttgctggccctgataggcatgatggcttcaaagatgtccgtacaaactacaattacacggagcctactcttgcagcaaatgctggcctggtggcagccttgatttccctaactaacattcacgtcaaaagtggaatcgataagaacaccatcttctctgcagttcctccgatgtttccaactcccccacctccaccgtcagcttggaaaccatg

SEQ ID NO: 3714 - DNA, 1926 bp, Oryza sativa
atgatcacggtggtggacctgtaccacgtcctgacggcggtggtgccgctgtacgtggcgatgacgctggcgtacgcctccgtccggtggtggcgcatcttctccccggaccagtgctccggcatcaaccgcttcgtcgcgctcttcgccgtcccgctcctctccttccacttcatctccaccaacaaccccttcgccatgaacctccgcttcctcgccgccgacacgctccagaagctcatcgtcctcgccctcctcgcsctctggtgccgcctctccgcgcgcgggtcmctcgactggctcatcaccctcttctccctctccaccctccccaacaccctcgtcatgggcatcccgctgctcaaggggatgtacgccgccgccggcgccgcagccggcgccgactccggcagcctcatggtgcagatcgtcgtgctccagtgcatcatctggtacacgctcatgctgttcctcttcgagtaccgyggcgcgcggcttcttgtcatggagcagttcccggacaccgccgcctccatcgtctccttccgggtggattccgacgtcgtctcgctcgccggcggcggtggtggagccgcggagctgcaggcggaggcggaggtcggggacgatggcaggatgcgggtcaccgtgcgcaagtcgacgagctcgcgctccgaggcggcgtgctcgcacgggacgcagtcacactcgcagtccatgcagccgcgcgtctccaacctctccggcgtcgagatttactcgctgcagtcgtcgcggaacccgacgccgcgtggctccagcttcaaccacgccgagttcttcaacatcgtcggcaacggcaagcagggcgacgaggagaagggcgccgccggtggcgggggccactcgccgcagccggtggtggggaagaggaaggacctgcacatgttcgtgtggagctcaagcgcctcgccggtgtcggagcgcgccgccgcagcagcagctggcgcggtgcacgtcttcggcggtggtggcgccgaccacggcgacgccaaaggagctcaggcctatgatgagtacagtttcgggaacaagaacgagaaggacgggccgacgctgtccaagctggggtccaactcgacggcgcagctccggccaaaggacgacggcgaggggatggcggcggcgatgccgccggcgagcgtgatgacgaggctcatcctgatcatggtttggaggaagctgatcaggaaccccaacacttactccagcctccttggtgtcatctggtccctcgtctcctacaggtgggggattgagatgccagccatcatcgcccggtcgatttcgatcctgtcagatgcagggcttggaatggccatgttcagcctaggattgttcatggcattgcagccacggatcattgcctgtgggaactcccttgcttcgtatgccatggccgtcaggttcctcgtgggtccggccgtcatggctgccgcctccatcgccgtcggacttcgcggggtgcttctgcacattgccattgttcaggtaagctgcaagttcaggcttctgcaccaaaatgcatccttaactgcaaaagaatctatcgtaactcaacaattgtcattgaattctcaggccgctcttcctcaaggaatcgtgccctttgtgtttgccaaggagtacaatgttcatcctaacattctgagcacagcgtatgatctctttaccatcttttctttttcagtattggaaaaatgtccccattttgagcgtgatattcgggatgctgattgctctccccatcacattggtctactacatactgctggggctctgaagagctctccaagtctcaactcaactgtgcaagaacttgatgttactgacagtttgattaggatttatggttctgttttagttgctcagattttgtttggatga

SEQ ID NO: 3715 - DNA, 3729 bp, Oryza sativa
atggcactcatccaagaaaaagatcaccctgttgaaccctctaaacacatcagtgtggatgatgaggaaatcacttctccgccggtggaagaaaaggcagctgctgcggcggacaaaaagttcccattctttgggctgcttcgctatgctgatggactagattggctgctcatggtagcaggaacaatggggtccttcctgcatggtatggggccttcgatgtcatattacttggtcggcaaaggcatcgatgtggtcgggaacaacataggcaatcgggaggccacagtccatgaactctctaagttaattccttatatgtgggcattggcaattattacacttcctggtggaatgattgaaattacatgttggatgtataccagtcagagacaaatgtcacgcatgcggatggcatacttgagatcagtgctgagtcaagatatcggagcttttgatactgacctaaccacagcaaacgtcatggctggagcaaccaaccatatgagtgctatacaagatgcaattggtgaaaaggtgggtatgctctccatgctggttgttcctatgctcctcatggttggcgcaacatatgcaaaaatgatgattgacgcatcgatgaaaagaatagctttggtctctgcagcaaccacagttgtagaacagactctttcacatatcaagactgtcttctcatttgttggagaaaattcggcaatcaaatcattcaccaaatgtatggacaagcaatataagctaagcaagatagaggcaatgacaaaaggactaggtttgggaatgttacagatcgcaactttctgttcgtattcattaacagtgtgggttggagcagctgctgtagttgatagatctgcaaaaggaggtgaaacaattgcagctgtcattaacatcctctctgccgcaatatatatctcaaatgcagcaccagatcttcagtccttcagccaagcaaaagctgctggcaaagaagtatttgaggttatcaatagaaatccagcgataagttatgaatcaaatggaacaatcctagaaaaggtcactggaaatattgaaattcgagaggtggatttcatgtatccatccagagtcgacaagccaattctcagaagtttttcactatccataccggcaggcaaagttgtggctcttgtggggagcagtggatgtgggaagagcactgtgatttctcttgttcaacggttctatgatcctatatcaggtaatattcttatcgatggtcaaaatattaaggaacttgatctgaagtccctcaggagaagtataggttctgtctctcaagaaccatcactattttccggtacgatcatggataacttgagaattggcaaaatggatggaactgatgaagagataattgaaatagcaaaatcagctaatgtgcactcctttgtatccaaactcccaaaccaatactcaacggaggtaggagaaagaggtgtgcagttatcaggaggtcagaaacaaagaatagcaattgcaagggctatgctaaaagatccgccaattcttcttcttgatgaagccacaagtgcacttgattcagaatcagagaagttggttcaggaagctcttgatggagctatgaaaggaaggacagttattttgattgcccacagaatgtcaacaatcataaattcagacaagattgttgttgtggagaatggaaaagtagctcaatctggaactcatgaagaattgctggagaaaagtccattctactcgagtgtatgcagtatgcaaaatctagagaaggaatctggcaagagtgaagaaagatttactgatcaggtcagagaagaacaagacaatggaagtggaacaagcaatgagccgtcttctactgcacatgaacaagagaagagtctagaactgaacccaaaccaaccgaagcaggatatcagaaacagagcatctgctttctacagaatgttccttggaacatttatgctggagccaggaaagattcttctgggctcaacagcagcagcaatctctggggtctcaaagccaatatttgctttctatatcatgaccgttgccatagcatactttgacccggatgcaaagagaatagttgccaagtactcgataattttgttccttattggattgctcacatttttcagtaacatcttccagcactatatatatggccttgtcggtgaaagggcaatgaataacctaagggaggccctcttttcagtcattctgcagaacgaaatcggttggtttgaacaacccaagaacagtgtcggtttcctgacatcacgcgttgttggtgacacctccatgattaaaaccatcatatctgatcgaatgtcagtgattgtgcagtgtatctcttcaattttgatagctacaggattaagcataggagtgaactggaggatgggtctggttgcatgggctctgatgccatgtcagttcatcgctggcctcgtacaagtaaggtcagcaaaaggttttgccactgacacctctacatctcaccggaagctcatctcactcacttcagaggctgttagcaacattcgtacagtggcctcttttggtcaggaagaggaaatactaaagaaagcagatttgtcgctgcaagaaccaatgcagacaagcaggatagagagcataaagtatggggtggtacaaggggtttccctctgcttgtggcacatgacacatgccatcgcattgagttacaccattgtgctacttgacaagagcctagcaacatttgaaaactgtgtacgggcctatcaagcaattgcactgacaataacttccatcacagagttatggtctttgatccctatggttatatcggccatcgcaatattggatcctgcactcgacattctcgacagagaaacgcagatcgtgccagatgaaccaaaagtgcattgtgaagacagaattactggcaacattgagtttcaagatgtcagtttcagctacccatcaagacaagatgtgatcatattggatggattcagtctagctattgaaccaggccaaagggtagcattagttgggcccagtggtgcaggaaaatccacaatcgtatctcttctgctaagattctatgatccttgcagagggcaggtacttgttgacggtaaggacgtcagagaatacaatctgaggttcctaagaaaacagataggactagttcagcaagagccaatcttgtttaatttgtccataagagagaacatcagctatggaaatgaaggtgcatcggaaacagaaatagttgaggctgcaatggaggcaaacatccatgagttcatcagtggcctgtcaaatgggtacgacacggtggtcggggacaaaggaagccaactttcaggagggcagaagcagagaatagccattgcaagaactatactgaagaggccagtcatactactcctagatgaggcgacaagtgcgctggatggtgaaaccgagaaggtggtgatgagctccctggcagcaaaggagtggaaaagcaaggaaggtgagctatcgaacaagatcacgagtatcacaattgcgcacagactatccacagtcacaagtgcagatgtgatcgtcgtgatggacaaaggcgaggtggtcgagatgggcagccacgaaacattggtcacaacaagcaatggcgtttactcaagattgtactgtatgcaaagcaaaggaatgaaagactga

SEQ ID NO: 3716 - DNA, 1065 bp, Oryza sativa
atggctgctgaatgtggaagtggcaactgtgatgcttgggcagcgagagatccttcagggatcctctccccgtacaagttcaaccgcagggctgtacaaagtgacgatgtttccttgaggatcacacactgtggtgtttgttatgctgatgttgcatggacaaggratatactcaacaattcgatgtaccctttagtccctgggcatgagatagcaggagttgtaactgaggttggtgcagacgtcaagagcttcaaagtgggtgaccatgtaggtgttggcacatacgtgaattcatgccgggactgtgagaactgcaatagctctctagagaactactgctcacaacatgtcttcactttcaatggtgttgacactgatgggactgtcacaaagggaggatattctactcacatagtagtacatgagaggtattgctttaaaatacctgatggctaccctttggaaaaggcagcacctttactttgtgctggcatcactgtatatagtccgatgatgcggcataatatgaaccagccagggaagtcactcggcgtcattggacttggtggcttgggtcacatggcagtaaaatttgggaaagcctttggactgaaagtcacagttattagtactagtgaatcaaagagaaaagaagctattgaccttcttggtgcagataatttcgtggtgtcatcggatgaaaatcagatggagaccttgaaaagctctctgaacttcattattgacacagcctccggcgatcacccattcgatccttatctcacgcttctgaaagttggtggtgtaatggcactacttagcttcccaagtgaaatcaaagtgcatcctgcaaaccttaatctcggtgggcggagtttatctggtagtgtaactggaggtacgaaggacatccaggagatgataaacttctgtgcggcaaacaaaatctacccagatatcgagatgatcaagatagattacatcaacgaggctcttcagaggcttgttgaccgggatgtcagatttcgctttgtaatcgacattgagaactcgttcaagtag

SEQ ID NO: 3717 - DNA, 1062 bp, Oryza sativa
atggcgactcctcagatctcgcgcaaagccctcgcctccctcctcctcctcgtcgccgccgccgccgcggtctccaccgcgtccgccgacgacgtgctcgccctcaccgagtccaccttcgagaaggaggtcggccaggaccgcgccgccctcgtcgagttctacgcgccatgggtaatagcgatgatggtgtgtggtcactgcaagaagcttgcccctgaatacgaaaaactcggtgcaagtttcaagaaagccaaatcagtcctaattgcgaaggttgactgtgatgagcacaagagtgtgtgcagcaagtatggagtttctgggtaccccacaatccaatggttccccaaaggttccttggagcccaagaagtatgaaggtcaacgtaccgcggaagcccttgcagaatatgttaactctgaagcagccaccaatgtaaagatagctgcagttccttctagtgtcgtggttcttaccccagagaccttcgactctgttgtccttgatgaaaccaaagatgtccttgtagagttctatgccccatggtgtggtcactgcaagcatcttgctccgatttatgagaagctagcttctgtttataagcaagatgagggtgttgttattgccaatcttgatgctgacaaacacactgccttggcagagaagtatggagtttctggtttccccacattgaaattcttcccaaagggaaacaaagctggtgaagattatgatggcggtcgcgagttggatgacttcgtcaagtttattaatgagaaatgtggaaccagccgtgattcaaagggtcagcttacttcagaggctggcattgtcgaaagcttggctcctcttgtgaaggagttccttggtgcagcaaatgataagcggaaagaagccctctccaaaatggragaggatgttgcgaagctcactggccctgctgccaagtacggaaagatctatgtgaactctgcaaagaagatcatggagaagggctctgaatacactaagaaggaatctgagaggcttcaacgcatgttggagaagggattgacatag

SEQ ID NO: 3718 - DNA, 1146 bp, Oryza sativa
atgtcgggaaaacaaaaggtacggtatggaaaagttggttttccagacaaagaaatcactgcaaggaatatcatcattgctactggatcagttccttttgttcccaagggcatagaggttgatgggaaaactgtttttaccagtgatcatgcactaaaacttgagtctgtcccggactggatagcaatcgttggaagtggatacattgggcttgaattcagtgatgtatatacagctcttggaagtgaggttacttttgttgaagctcttgaccagctaatgcctggttttgatcctgaaattgcaaaattagcccagagagtccttatcaaccctcggaatatagactatcacactggtgtttttgcaagcaagattactccagcaaaggatggaaaacctgtgcagattgagctcattgatgcaaaaacaaaggaacacaaagaaaccctcgaggtggatgcagcccttatagccacaggacgggcaccattcacaaaaggacttggcttggaaaatatcaatgttgttacacagcgtggttttattcctgttgatgagcgaatgcgagtcatggatgcagatggcaatgtggttccgaacttatattgcattggagatgccaatgttgtcgaacaaatctctgggagggaccacatcctaaatcatttaagcatccccgctgcttgcttcactcatccagagattagtatggttgggcttacagagccacaagccagagaaaaagctgataaagaaggatttgagataagtgttgttaagaccagctttaaggctaatacaaaagcattggcagaaaatgaaggagatggacttgctaagttgatttaccggcctgacactggagaaattcttggtgtgcacattttgggtttgcacgctgctgacctcatccacgaggcatcaaatgccattgccctaggaactcggttgcaagacatcaagtttgctgttcatggaaacccaacattgtccgaggtgctggacgaactctttaaagcagccaagttgcagcctagagaagggccggagcgcaagccaaagcatccaccacaaccactcctgaaggtccttagtttcgtcacgcgcctgctcacttcccagaaacgaaatcggcaaccatag

SEQ ID NO: 3719 - DNA, 1386 bp, Oryza sativa
atggcgatctcgaaggcttggatctcgctgctgctcgcgctcgccgtggtgctgtcggcgccggcggcgagggcggaggaggcggcggctgcggaggargggggcgatgcggcggcggaggccgtgctgacgcttgacgcggacggcttcgatgaggccgtcgccaagcacccgttcatggtcgtcgagttctacgccccgtggtgtggacactgcaagaagctcgctccagagtatgagaaagctgcacaagagctaagcaagcacgatccaccgattgttcttgccaaggttgatgccaacgacgagaagaacaagcctcttgctaccaagtatgagatccagggtttcccgacactcaagatattcaggaaccagggcaagaacattcaggaatacaagggcccgagggaggctgagggcattgttgaatacttgaagaagcaggttggtcctgcttccaaggagatcaagtcaccagaagacgcaaccaaccttattgatgacaagaaaatctacattgttggaatcttctcagaattaagtggcactgagtatacaaacttcatagaggttgctgagaagctgagatctgattatgactttggccacaccttgcatgccaaccaccttccacgcggtgatgctgcagttgagagaccattggttaggctattcaagccctttgatgagcttgttgttgacagcaaggattttgatgttactgctttggagaagttcattgatgctagcagcacccctaaagttgttacttttgacaagaaccctgacaaccatccttaccttctgaaatttttccaaagctcagctgccaaggctatgctatttttgaacttctccactggaccgtttgagtctttcaagtcagtttattatggtgctgctgaggagttcaaggacaaggaaattaagttcctcattggtgacattgaggccagtcaaggtgccttccagtactttgggctgagggaggatcaggtaccactcatcatcatccaggatggtgagtccaagaaatttttgaaggcacacgttgagcctgaccaaattgtttcttggttgaaggaatactttgatggtaaattgtctccattcaggaagtctgaacctattcctgaggtcaacgacgagcctgttaaggttgtggtcgctgataacgtccatgattttgtcttcaagtctggcaaaaacgtccttgttgaattctatgcaccatggtgcggacactgcaagaagctggctccaatcttggatgaggcagctacgacgcttaaaagcgacaaggatgttgtcatcgctaagatggatgcaactgcgaacgatgtgccaagcgagttcgatgtgcaaggttaccccaccctgtsa

SEQ ID NO: 3720 - DNA, 1806 bp, Oryza sativa
atgccacctccaagaaccaagcaccggccgcttctcctcgccaccaccttcctctcccttctgctgctgctgctgctgctcagcttgctctccaccgcgcacaaggcattcgccgtcgctgacgacgacggccaccgcgcgcgcgtgcttcttgcagcagacggcggcaaaaggaattcccgattcccgagcacagcggccgccgtggaccggcattgcgccgggacgctccaccgggacgtctgcgtgtcgacgctgtccaccatcccgaacctcgcgcggaagccgctccgggacgtgatctccgaggtcktggggcgcgccgcgtcggcggtgcgcgcgtcgtcgtccaactgcacgtcctacctccagcggccgcggcagctgcgcacgcgcgaccgcctcgcgctgtccgactgcctcgagctgttcgggcacacgctggacctgctgggcacggcggccgcggagctctccgccgggaacagcaccgccgaggagtccgccgccggcktgcagaccgtgctgtcggcggcgatgacgaaccagtacacctgcctcgacgggttcgccgggccgtccgcctcggaggacgggcgcgtccggccgttcatccagggccgcatctaccacgtcgcccacctggtctccaactcgctcgccatggtgcggcgcctcccgacccagcggcggcgcggggcggaggaggagccattggaagggtacggccgcgtgcgacgcgggttcccgtcgtgggtgtcggcgtcggaccggaggcggctgcagcagcaggtggcggcggacgtggtggtggcgaaggacgggagcgggaagttcacgacggtgagcgaggcggtggcggcggcgccgaacaacagcgagacgcggtacgtgatatacatcaaggccggcgggtacttcgagaacgtggaggtcgggagcgagaagaccaacatcatgttcgtcggcgacggcacgtggaagaccgtcatcaaggccagccgcaacgtcgtcgacaactccaccaccttccgctctgccacgctcggtaaccaatccttttgctcaattcgtgaaccaattttccaaacctttttttgcatgcacaccgccgtggtgggcacggggtttctggcgcgggacataacggtggagaacgcggcggggccgagcaagcaccaggcggttgcgctgcgggtkaacgccgacctgtcggcgttctaccggtgcagcttcgcgggctaccaggacacgctgtacgcgcactcgcttcgccagttctaccgcgactgcgacatctacggcacggtggacttcatcttcggcgacgccgccgtcgtgctccagaactgcaacctctacgcgcgccgcccggaccccaaccagaagaatgtgttcacggcgcagggccgggaggaccccaaccagaacaccggcatcgccatccagggctgcaaggtcgccgccgccgccgacctcgtccccgtccaggccaacttctcctcctacctcggccgcccgtggaagacctactcgcgcacggtgttcctgcagtccaagatcgacagcctgatacaccccagggggtggctcgagtggaacggcagcttcgcgctcgacacgctctactacgccgagtacatgaaccgcggcgacggcgccgacacgtcggcgagggtgtcgtggccggggtaccacgtgctcaccaacgccaccgacgcggccaacttcaccgtgctcaacttcgtgcagggtgacctctggctcaactccagctcgttcccctacatcttggggttgagctga

SEQ ID NO: 3721 - DNA, 1494 bp, Oryza sativa
atgcaggggacgtggaacgcgaggccgcactcggggagtaggcggaggagctcgccgtcgcggaactcgccgaggcagacggggcagtcggtggcaccgagcatgccggcgccgtacgtcgcggtaccgcgtgagggcaatggattcgatcgcggcctcatcgagctgctgctgctggtgctggtgcctacggtggatgaagcagtagattttttgaacgatgatgaagcagtagatggacgtgttcggggtgcggcgacacgacggcgccgcccttgccgttgctggccgtcacattatgcttcttacggagttataaacatgtcagacatttcagcactaagctacttgaaggtgttcatggatgctcactgccaacttggtgacttggttgatgctgttgttcccttcatgggtgaatccataaccgatggaacccttgccaccttcttaaagaaacctggtgatagagttgaagctgatgaacccatagctcagatcgaaactgataaggttacgatggatgttgctagtccagaagctgggataattgaaaagttcgttgcgagtgaaggtggcattgttactccaggtgtcaaagttgctatcatatctaagtctgctgctcaaggcaagacacatacacaatcatctgaagatacctcccagaagcatagcacaaaaccaccttctacaaaggaaaacaaggttgaggctaaaccaccaaaagtagagtccagcacaacacacgaatcaaaactaacttcctcttcagaaccacaactccctcctaaggaaagagagagacgggtgccaatgccaaggcttaggaagcgtatcgcaaatcgtttgaaggattctcagaacacttttgcaatgctaattacattcaatgaagttgacatgactaacctaatgaagctactttccgattataaagatcagtttgttgagaagcatggtgtcaaattgggcttaatgtcttgctttgtgaaggctgctgtttctgcgcttcaaaaccaaccaattgttaatgctgtcattgatggtgatgacatcatctacagggagtacattgacatcagtgttgctgttggaacttccaagggtcttgtggtgcttgttatccacgatatagatgcaatgaattttgctgacatagagaagggtataaacaaccttgcaaagaaggcaactgagggggcacagtccatcaacaatatggcaggagggacctttaccatctcaaatggtggtgtttatggaagccttatcagtacacctatcattaattctccacagtcatcaatcctcggaatgcattccattgttcaacgtcttgtggttgtgaatggcagtgtccttgcaaggccaatgatgtaccttgcactaatgtatgaccataggctgatcgatggtagggaagctgttctcttcttgcgccgtatcaaggatgtggttgaagatccacgaaggttgctccttgacatatag

SEQ ID NO: 3722 - DNA, 1326 bp, Oryza sativa
atggccgccgcggtggcggcctcctcctcctcctcctccagcagctgcgccgccgtcggcgtagccaccgcctcccacccccaccgccaccgccaggcccgcttcgtcgtctcccctcccgcgccggcctcccccgcggcgctgctctggcggcggccgcggcgggtggctccgaccacgttctgctccgcgccgtcgctcggccgcgtcgggtggccgcggcgggagggtgccgcctggctgctgtcgttccgcgccggcccggtttcttccccgtcgtcggcggcggcgggcgatccttcccaggcgctctccgcgctgctcccgctcgtcgtcgccgccaccgccgtcgccgcgctcggcaaccccgctaccttctcatgggtctccaaggagtactacgcgcctgcacttggcggcatcatgctctccattggcatcaaattatccatcgacgacttcgcgttggcattcaagaggccggtgcctctgacgatcggctatatggcgcagtacattgtgaagccgctgatgggcgtgctgatcgcgagggccttcgggatgccgtcggcgttctttgcaggctttgttcttacttgctgcgtctccggcgcgcagctgtcgagctatgctagcttcctgagcaaaggggatgttgcattgagcattctgttgacaagctgctcgacgatatcttcggtggttgtgacacctgttctcactggactgctgattggttctgtggttcctgttgatgggatcgcgatggcgaaatccattttgcaggtaatgatatgcgttcttgcttggctgcttagtgatgaaaccattcattttgtggtggttcttgttcctgtcacactaggtcttcttctgaatacatatgcaaaagcagtcgttaatgtcattcaaccagtaatgccatttgttgctatgttgtgcacatcgctttgtattggaagccctcttgctatcaacaggagcaagatcttatcttcagaaggattcctgttacttctccccatagtgactttccacattgctgccttcattgtgggttactggatttccaagttgcctatgttgaggcaagaagagcccgtttgcagaactatttctgtatgtaccggcatgcagagctccaccctcgctggacttcttgctacacaatttcttggaagtagccaggcagttcctgcagcatgctcagttgttatcatggccatatttggtttgactctagcatcatactggggaaatggtttgcgaatcagagatatcggttcgagatttgttccacaagcttccgcaggtgtgagctcatga

SEQ ID NO: 3723 - DNA, 1293 bp, Oryza sativa
atggtcatgtttttgttgattcccggaggccacctcttgtttctgatttccttttggtttgtgtcattggttcatcaggtagcggtagacactgaacatgatgattcaattggtgtgacggatgagtctggttggccatgcatagaattagacaggcggatgcgtaggatgaacggcagaaacccagaaaagaacataaaaatggaacatgaaaatgatagttcacttgcttgggtgtttcacgcaccatatcgtgaacacgaaaatgaatttcctgacatcccagaggagaaagaaggaaatggttttgctcccaaaagtgatgatcccacaaaagcacctcctcccattgaagtaccagaattatcatttgatgaactgaaagagaaaactgataattttggttcaaaggctttagttggtgaaggatcatatggaagagtgtattatgctactctagacaacggaaagcaagttgctgttaaaaagcttgatgcttcaacagaacctgaggttgataatgattttttgacacaggtgtccattgtgtcaagattaagacatgaaaattttgtggaaatgcttggttactgtgtggaaggaaatcagcgcctagtggcctacgaatttgctacgatgggttctctgcatgatattttgcatggaagaaagggtgtccctggtgcacaacctggcccagcacttgactggatgcagcgagtgagaattgctattgatgctgctaaagggctagaatatcttcatgagaaggtccaaccttctatagtccatcgggacatacgctctagcaatgttcttctatttgaggactacaaagcaaaaattgcagatttcaatccttcaaatcagtctcctgatatggctgctcgtttgcactcaactcgtgtccttggaaccttcggctatcatgctcccgagtatgccatgactggccagttgactcagaaaagtgatgtatatagttttggagttgttcttctagagcttctaacaggaaggaaaccagtagatcacacaatgcctaggggtcagcagagtctggttacatgggcaacacctcgtttgacagaggacactgtgaaacaatgcgttgacccgagactgaagggcgagtatcccccaaaaggggttgccaagctcgcagcggtggcggcactctgtgtgcaatacgagtctgagtttagaccaagcatgagcattgtggtcaaggcactctcccctcttctccagcataaaccgccaccgccaccagccgttgctcctgagacctga

SEQ ID NO: 3724 - DNA, 513 bp, Oryza sativa
atggatcggtcgatggagacggtggaggaggaggtggaggagtacagctggagggaggtgctgctgccgcggctcgtcccggtggtgtcggacgcggcgccggagctggagcgggagacgggggagcgccgccggggcagggagctcctcgtcgccgtcgacttcgggcccaactccaagcacgccttcgactgggcgctcgtgcacttcgcccgcatggccgacacgctccacctcgtccacgccgtctccagtgtcaataatgatctagtatatgagaaaagtcaggaactcatggaggatttagccattgaggcattgaagacatcactggtccggaccaaggcaaggattgttgaaggggatgctggaaaggttatttgccgagaggcagagcggctaaagcctgcagcagtcattctgggcactcgtggaagaggtctaattcagagaataaccactgacattaatggaagaggtatttcaactctagggagcataataatcaattga

SEQ ID NO: 3725 - DNA, 486 bp, Oryza sativa
atgtcgctgatccgccgcagcaacgtgttcgaccccttctccctcgacctctgggaccccttcgacggcttccccttcggctccggcggcagcagcagcggcagcatcttcccgtccttcccgcgcggcgcctcctccgagaccgcggccttcgccggcgcgcggatcgactggaaggagacgcccgaggcgcacgtgttcaaggcggacgtgccggggctgaagaaggaggaggtcaaggtggaggtggacgacggcaacatcctgcagatcagcggcgagcgcaacaaggagcaggaggagaagacggaccagtggcaccgcgtggagcgcagcagcggcaagttcctccgcaggttccgcctccccgacaacgccaagccggagcagatcaaggcgtccatggagaacggcgtgctcaccgtcacggttcccaaggaggaggccaagaagcccgacgtcaagtccatccagatctccggctag

SEQ ID NO: 3726 - DNA, 537 bp, Oryza sativa
atgtctgcttcttctcctgttgcctacgacgccaatgtcctcctggccgcggtcaccgcgctctcggcggccatcgcgttcgtcgccgcgctccacctctacgcccggtgtctcctgcggcggcgcgtcgccggcgccggcgccggcgccgccggcaaccctyamgcgctgcgccgcccggtgaccccgggcggcaactacgagctcgaggtgatcagcgtcgcggcgtgcgcgctgragggcggcggcctggacgccaagcagctgggcgcgctgccggtgttcacgtgggggtcttcttctccggcgacggcggcggcggacgccgccgtgcagtgcgcggtgtgcctcggggagatggaggacggcgagctggggaggctgctcccggcgtgccgccacgtgttccacgccgagtgcatcgacacgtggctcgccgtgagctcgacgtgcccggtgtgcagggcggcggtgggggcggcggaggatgatgagccagcggcggctccggtcgctggcgtgtcgccggcgagctag

SEQ ID NO: 3727 - DNA, 2553 bp, Oryza sativa
atggccggagcgggagccgtgggggggagcaactgggaggagatggtgaggaggatgctcccaccggggaccaccatcccggaggcgccggccaacctcgactattcgattgcgctcgagtacgacggccctccggtgtcctacgagctccccaggatcgatcccgtcgacctgccggcgattcccaccgcgcagcccgtctccggcccgctggtgcccgggaggagcaacggcgtggtggctccggtcgtcaggccggtgtttatgccgccggtgcaccggaagcaggatgctcaccgtgccgagccaccgccggttgcggcacagggtaggaggaggagaagctcggaatcggtcgattcggcgccgcagaatgaggggttctctgatgatgatgactcatgctcggtgtcgcaagaatccgcgcacaatttccatgggcagagaggtggtaggacagctgctcaggagggaagaagagctcaggttgtcacatttggggtcactgaggacagcaggtatgagagcaaagagtttgatgatgtgtcggaacagtacgtggcggtgaccaagaaggagaagagagggaggacctgcagccgttgcggtaaaaggaagtgggagagcaaggaatcatgcattgtttgcgacgcgaggttttgcagctactgcgtgctcagggccatgggctcgatgccagaagggcgcaagtgcatcacttgcattggccagccaatcgatgagagcaagcggtcgaagctcgggaagggttcgaggatactatcacgtctgctcagcccgttggaagtaaggcaaatactgaaagctgagaaggaatgccaagcaaaccagctccggcctgagcaactcatcataaatggttttcctcttaatccagatgagatggccagcttgcttagttgccaacggcctcctcaaaagctcaagcctggaagatattggtacgacaaggagtcaggcttgtggggaaaggaaggagaaaagccagacagggttgtcagcactaacctaacctttaatggaaagcttcagcccaatgccagtaatggcaacactcagattgcacaagttcagtgcccccgtgacactcacttttgggtttaccatgatggtggctatgaggaagaaggccaaaacaatatcaaagggaagatatgggaatcgcctgtgacacgttttgcatgtgccttgttttcactaccggttcctccagcaaactctgacgaaccaaaggacgaagctccttattcagcaagaactgttcctgattacttagatcagaaaagaatccaaaagcttcttattcttggatcgcctggagctggtacaagcaccatattcaagcaggcaaagttattatacgacactaggtttacccaagaagaacttgatagtatcaaacttatgatccaaagtaatatgttcaagtaccttgggatccttcttgagggccgtgagcgttttgaggaagaggctttggctggatcgaataacccaagctcagaggatgagaatacgcagcatgatggaaataaatcgaatggttcagattcttgcatatactcgataaatgcaaagctgaagaagttctcggattggcttttggatataatagcaatgggagacctcgatgcattcttccctgcagctacgcgtgaatatgctccaattgttgaggaaatgtggaaggatcctgccatacaagcaacatataaaagaaaagacgaattgcattttctccctgatgttgccgaatatttcttgagcagggccattgaagtatcaagtaatgagtatgaaccttcagagaaagatataatatatgctgaaggagtaacacaagggaatggattagccttcattgagtttactctggatgaccgtagccctatgtcagaaatgtacactgacaatcatgagcctcactctcagacactaaacaaatatcagctgattagagtaagtgccaagggaatgaatgagggatgcaagtgggtggaaatgtttgaggatgtcagcatggtaatattctcggtagcactcagtgactatgaccagctgggggccccttcaagtggtggcaacagtccccttgtgaataagatgatccaaagcagggacttgtttgaggctacaatcaggcaaccatgtttccgcgacatgccatttgttcttgtgctcaacaagttcgacctcttcgaggagaaaatcgggcgcgtcccgctctccacctgcgagtggttcagcgacttctgccctctccggactcaccacaacaatcagtcgctggctcaccaggcgttctactatgtcgcgatgaagttcaaggagttgtacgccgcctgcacggatcgcaagctgttcgtgtggcaggcgcgagcccgcgacaggctgaccgtcgacgaggccttcaagttcatcagggaggtgctcaaatgggaggatgagaaggatgggggtgggtactacccagatgagtccttctacagcaccacagagctcagctcctcacgtctgatcagacaagaatga

SEQ ID NO: 3728 - DNA, 2802 bp, Oryza sativa
atggagagaaccctactgaacccgccgccgtctctccgatcgccggcatgccgtaccaccaccgccaccaggatcaggccctcctcctccatggctactatgatcccaacgcctccgccgatgcggcacgcccgcctcgtcaaggcatcggccgcgggccggcgagagctccacgctcccccgatcgcgccgccaatattactcggcctccgttcacccgcggcggcgtcgtacgggcgtgcgagcggcggcggcggaaggaggaggggggcgcgggtggtggcgaggatggggaggaggcgcggcggctggggcaccacgccgccggcagcgagcagctcctcctcggcgtcatcggggaagggcaccggcatcggcgccaaggtgctcaggggcgccgggctcagcctcaaggcggcgcgcgccgaggtggagaagatggccgggaggggccccggcatggtccccatggagatcaagttcacccccgccgccaagaacgtcctccaggcctcccaagaagaagcgcaccagctagggcataactatgttggatctgaacacctcctacttgggttgctccgtgagcatggtgccgcgcttgttgtgctgaagaactttcaggctgatcccagcaacatccgcagtgaggttatccgaatgatcagtgacacctctgaagatcatcaacctgttagtgctgcagttgggggaggaagcagtacaactaagatacccacacttttagagtatggtactaatctgacaaaactagcagaggaggggaagctggatcctgttgtcggaaggcaaaaccaggcggaccagaacaacccctgcctgattggagagcctggagtagggaaaacagcgatcgcggaagggctcgcgcagcgcattgctgcaggaaatgtgcctgaaacaatcgatgggaaaacgaatttacaatttgagcactatgagattgcgaagagttacctttctagattaccagaaaggaagcatggaaatcctttccaggttatcacccttgatatgggtctacttgttgctggtacaaaataccgtggtgagtttgaggagagattgaagaagctgatggacgaagtgaagcagaatggtgagataattctcttccttgatgaagttcacaccctggtgggtgctggagcagctgaaggggccatcgacgctgccaacatcctgaagccagcgctagcaagaggtgaactacagtgtattggagccactaccattgatgaatacagaaagcacattgagaaagacccagcactggagaggcgttttcagcctgtcaaggtccctgagccaactgttgatgagaccataggaattctcaaaggtctccgggagcgatatgagatccatcataaggtccagtatactgatgagtcgttgatcgcagctgctcggctctcataccagtacatcagtgatcgtttcctcccggataaagcaattgacttggttgatgaagcaggttctcttgtcaggctgcgaaatgcccagctacctgatgaagctaaagaactcgagaagaagctcaagaagatcatggcagagaagagcgaagccatccgaagccaagacttcgagaaggcgggagcgcttcgcggcgaggaggtggagctcaagtcggagatcatgtcgctggtcgacaagagcaaggagatgagcaaggcggcggtggactccggcgagtcgccggggccgacggtgacggaggcggacgtccagcacatcgtctccagctkgaccggcgtccccgtggagaaggtcaccgtcgacgagtcgagccgtctcctcgccatggagtcgtcgctgcaccggcgcatcgtcggccaggacgaggccgtgacggcgatcagccgcgccatccgccgcgcccgcgtcgggctccgcgacccgcgccgcccgatcgcgagcttcatcttcgccgggccgacgggggtcggcaagtcggagctcgccaaggcgctggcggcgtactactacggctcgccggaggccatggtgcggctcgacatgagcgagttcatggagaagcacacggtggcgaagctggtgggctcgccgccggggtacgtcggctacgccgagggcggccagctgacggaggcgatccggcggcgcccctacgccgtcgtgctgttcgacgaggtcgagaaggcgcaccccgacgtgttcaacatgatgctccagatcctcgacgatggccggctcacggacagcaaggggaggacggtggatttcaagaactcgctcatcatcatgacatccaacgtcggcagcggcgtcatcgagaagggcgggaggcagctcgggttcgccggcgatggcagcggcgacggcgggtacggggtgatcaagaacatggtggaggaggagatgaagcgctacttcaggccggagttcctgaaccggctggacgagatgatcgtgttccggcagctgacgaagctggaggtgaaggagatcgccgggatcatgctcgccgaggtcaccgggcggatcggcgggaaggggatcgggctgcaggtgacggagaggttcaaggagctcgtcgtcgagcaaggcttcgacccgagctacggcgcgcggccgctgcgccgggccatcatgcggctgctggaggacacgctcacggacaagatgctcgccggggagatctgcgccggcgactcggtgatcgtcgacgccgacggtgacgggaacgtcgtcgtggtcggccggcgcagcgccggcttgccggacctgaaatcgccggcgtttactgtctag

SEQ ID NO: 3729 - DNA, 1650 bp, Oryza sativa
atgttcttctcaagggtcaagactgacaacagacagatcacactgagatttccaaatccggtgccgctgtaccccgtctccgctagcgccacagggattttgggcaaaggtgggggtgaatttgcacgagggttttggttgatggcgaacattcgggctcttctcatcgggttgaattattcaattgttgctggtcttcgtgtgaacaccaaattcgatgctaggctttgcattgcacattttttgacagaatgtttatcttccaggccttcatatctagcgtcactgggcagacattacaaggttcccatggaaattcgttggttatcctcaacagctattgggcctgctcggctgctgtggcagcagcttattgggctgcagcagcaggccatgggcactgtttctgcatgtagcagctggatacgtcccacagcacggtttcctcctcatctggtggttgggatgcctgcattatcccctactatgaatcaaggtaacattgcaaaatggagaaaacaagaaggtgaaaagatagaagttggtgatgtgatctgtgagatagaaactgacaaagctacgcttgagtttgagagccttgaagaggggtatctggccaagatcttagcacctgaaggttcaaaagatgttcaggttggacagcccattgctgtcacggttgaagatcttgaggatattaaaaatatacctgctgatgcttcctttggaggtgaacagaaagagcagtcaattgcaagtgaagcacaaaaggttgaaacggatgctgcaaaagagagctcgataataacccgtataagcccggcagcaaaattgcttatcaaggagcatcgtctagatcagtctgtactgaatgcatcgggtccccgtggcactcttctgaaaggggacgttcttgctgcattgaagttgggtgcctcctcaagttcaaccaagcaaaagaatgctccagctgcaccatcatctcagccaactcatgatttccaagctcaatcagtcaccattccacaacaaaatgatgcatacgaagatatccccaacagtcagatacgcaaggtgattgcaaaaaggttgcttgaatcaaagcagaccactccacatttatatttatcacaagatgttatactggatcccttgctcgctttcaggaatgaactgaaagagcaacatggggttaaagtttcagtaaatgacattgtcataaaggctgttgcacttgccttacggaatgtaccagaagcaaatgcatactggaacaatgacaaggaacaagcccagaagtgtgtttcagttgatatatctatcgcagttgctacagagaagggcctgatgactcctattataagaaatgcagatcaaaagactatatcagcaatatcctcagaggttaagcagttggctgaaaaggcacgtgctgggaagcttgctcctaatgaatttcagggagggactttcaggcattctggaattcttgctgttgggcgtggtaataagattatcgagcctgtggtggacagtgatggaaccgagaaggctacagtggttacaaaaatgagcttgacattgtccgctgaccatcgtgtatttgatggtcaagtaggaggtactgatatccttagacctgtagtttaa

SEQ ID NO: 3730 - DNA, 882 bp, Oryza sativa
atggcggggaagcacggccgcaacggcttcgaggacgacgacgtcaatcccttcgcgggaggaagtgttcctcctgccaacaattctcgactcccacctctctcccatgagccagctgatttttacaatgtggacattcctcttgactcgtctaaggatttgaagaaaaaggagaaagaactccaggcaatggaagctgaactaaacaaaagagaaagggaactgaaaaggaaggaagaggctgcagcccaagctggcattgtcattgaagataaaaattggccaccctttttccctctcattcaccataatatttcaaatgagatacctattcatctacaaagaatgcagtaccttgcattttcatcgtttttgggattggcagcctgcctattttggaatatcatagcaaccacaaccgcatgggtaaaaggggaaggtgttattatctggttgcttgctattatctacttcatatctggtgtacctggtgcttatgtgttatggtaccgccctctttataatgcaatgagaactgagagtgctttgaagtttgggtggttttttctgttttacctgattcatataatcttctgtgtgtgggcagctgtggctcctccttttcctttcaaaggaaaatctttggctgggattttgcctgccattgatgtcataggcaggagtgctatagtggggatattttactttgtcgggtttggattattctgccttgagtcactgctgagcattggtgtcattcagatcatgaccattgattgctcactcaacatgcagcaagtatacatgtacttccgtggaagtggaaaagccgcagagatgaaacgtgaggcggcacgtggtgctctgagctccgcattctga

SEQ ID NO: 3731 - DNA, 1596 bp, Oryza sativa
atggcggcgactccggcggcggacagccgcctcctcgtcatatacgcctcggagactgggaacgctatggacgccgccgaacgggtcggccgccaggccgagcgcggcggctgcccggccgtcgacgtcctccccatggacagcttcgaccccgggttttggaggtaccttcttaagaagaatttgggtgctaggtggcttgaaggggtcagatatgctgtgtttgggctcggagattcaggctatcagaagtacaattttgctgcaaaaaagctcgataaaaggcttttacaccttggtgcagaaccaatcatacaggtaggcttgggagatgatcaacacccttcaggatatgaaggagctctagatccctggttgctgtctttgtgggaatcactgaatcaaacaactccatcgctgttaccaagaatgtatgatatcattaatccagatttgagtgtcttaggagatgcaaaagtcgaagtcatctatcactcttctgacgaggctcaacaagattctaaccttttggatttcaagaatttaattcagagagcgcgctcaatgtccccttctctacagttctataataatgacaaagaaccacattacatgttacagatggtatcaaatcggtgtttgactaaggaaaattctgacagagacgtgcgccactttgaactggaaaatccatcttckggcatcacttatcaagttggcgacgcgctaraaattctaccaagtcaaagtccatcagctgttgactctttcattgaacgctgtaaattggatccarattgttacataacggtcatgagcttttttgcaacggctgaacatgaaaaggaaaagcttcagtattttgcatctccggaaggaagagatgacctttatcagtacaatcaaaaggagggccgaactattctagaagtattggatgattttccctctgtacaaatgccttttgaatggttggtgcaactaacgcctccattaaagaaaagagccttttccatatcatcatctccattagcaaaaccaaatcaaatacacttgactgttagcatagtgtcatggcgtactcctttcaaaaggatgcggcggggtctctgctcttcatggctggctgggctaaatccaaatgaaggaactggatgtgcaccattctgtgcatttgttgcggaaagggctgcacagagtacatcagaagcaacagcacccattctattcttctttggctgtagaaatcaagaaaatgattttctatacaaggacttctggtatgctcatgcccatgaccagggggtattgtcctcgaaaaatggcggtggtttctttgttgccttttctagagatcagcctcaaaaagtctatgtgcagcacaggataagggagcagagtgcaagagtgtggaatttactaaagtctggggctgcaatatacattgcaggctcgtctaccaaaatgccagctgatgttacagctgcactggaagaagttatctgtcaagaaaccggttgttcagaagaggaagcctcgatatggctcaggaaactagaaaggaacggcaaatttcacactgagacctggtcatag

SEQ ID NO: 3732 - DNA, 1467 bp, Oryza sativa
atggcggcgccaccaagcatggaggagcctcttcttggaggcggcaatggcgaggagaagaaaggagggagctcgaggctagcggtggtggccgaggtgaggaagcagctgtacctcgccgggccgctcatcgccgggtggctgctgcagaacgtggtgcagatgatctccgtcatgttcgtcggccacctcggcgagctcgagctctccagcgcctccatcgccacctccttcgccggcgtcaccggcttcagcctcctggctggcatggcgagcagcctggacacgctgtgcgggcaggcgttcggggcgaagcagcaccggctcgtgggcgtgtacaagcagcgcgccatggtggtgctcggcctcgccagcgtttgcgtcgccgcggtctgggcctacaccggcgagctcctcctgctgttcgggcaggacccggagatcgcggcggcggccgggagctacatccggtggatgatcccggcgctgctggcgtacgggcccctgcagtgccacgtccggttcctgcagacgcagaacgccgtgatgccggtgatgctcagsttcggsgccgccgcggcgtgccacctgccggtgtgctggctgctggtgtacggcgccgggctcggcagcaagggcgccgcgctcgccaacgccgtcgcctacctcgccaacgccgccgccctggccgcctacgtcaggctgtcgccagcgtgccggagcacgtggacggggttctcgtcggaggcgttccacgacttggtcggcttcatgaggctcgctgttccttctgctctcatggtctgcttggagtggtggtcgtttgagctccttgtgctgctctccggactactcccaaatccgaagctggaagcatcagtattgtccatttgcctgaactcgggttccttggcattcatgatccctttcggccttggttcagccataagcacccgggtctcgaatgagctcggcgccggtcgacccgaggcggcccgtctggccagccgtgtggtgatggcgctgggtctcgtcgtcggcgtcgcgatcgggctcgccatgatcctggtgcgccatctatggggttacgcgtacagcaacgaggaggaggtggtccagtacgtcgcgaagatgatgcccattcttgccgtctcgttcctcttcgatgacctgcagtgtgttctgtcagtgagggattcttcaggtgttgcaagaggctgtgggtggcaaaagattggtgccattgttaaccttggagcgtactacctcgtcggaattccagcggcgctgtgtttcgccttcgtctaccatcttggtggcatgggactgtggttagggataatgtgtgcactcatcgttcagatgctgttgcttctagccataacagtgtgcactaattgggagaaagaagctctgaaggccaaggagagagttttcagttcgtccttgcccgcagacatgacatga

SEQ ID NO: 3733 - DNA, 1692 bp, Oryza sativa
atggtcggcgtcgtcgcctaccccaaggccaacaagaaggcctgcaagagcttcgacgatttcgacatctcctacaaggccaaacccgggtcactccccaccttcctcctcgtcgacaggggagattgctttttcacaaagaaggcatggaatgcacaaaacgcaggagcagcagccatccttgttgctgatgacaagactgaacccctgattacaatggacacgcctgaagagagtggaaatacagactatttagagaatatcaccattccttctgcgctgataaccaagagctttggggacaagctcaagaaagcaattgataatggtgacatggttaatgtgaatttggattggagggagtccctgcctcaccctgatgagcgtgttgagtacgaattttggactaacagtaatgatgagtgtggccctaaatgtgatagccagattgattttgtcaagagcttcaaaggagcagcacaggtacttgagaagaagggatacacacagttcactcctcattacattacctggtattgcccagattccttcattctaagcaagcartgcaagtcccagtgtatcaaccatgggagatattgtgcacctgacccggaacaggatttcagcaaagggtatgatgggaaagatgtggtagtccagaatttacgtcaagtctgtgtttataaagtygctaaggagcatggaaaaccttggctgtggtgggactacgtgacagattttgcaatccggtgcccaatgaaggaaaagaagtacaccaaggaatgcgctgatggagttatcaagtcacttggtcttgatcacaaagccatagataagtgcattgctgatccagatgctgataaagaaaatcctgtgctgaaagctgaacaggatgcacagattggcaagggctctcgtggtgatgttaccatcttaccgactcttgtaatcaacaatagacaatacagagggaaacttgataaaggagcggttcttaaggcaatttgtgctggttttcgagaaaccactgaaccagctgtttgcttgagtgaagatatacaaacaaatgagtgcttggagaacaatggtggctgttggcaagacaaggctgctaacatctctgcatgcaaggacacttttcgtggaagagtttgtgaatgtccagttgtgaaaggtgttaaatttgttggtgatggctacactcactgtgaagcttcgggatctggccattgtgaaattaacaatggagggtgctggaaggattccaggcatggccggacatattctgcctgcacgaatgatggttgtaaatgtccggatgggttcaaaggtgatggagtccacaaatgcgaagatattgatgaatgcaaggaaaggactgcatgccagtgcaaggaatgtaaatgcaagaacacatggggaagctatgagtgcggttgcagtggcggcttgctttatatgaaggagcatgatacatgcataagcaaaaatgcagcaacagaggtaggatggaacttcttgtgggtgatcttctttggcctagtggtagccggcattgcaggatacgcagtatacaagtacaggatccggaggtacatggattcagagatccgcgccatcatggcccagtacatgcccctggacaaccaaggagatgttcccaatcattctcaccatatcgagctatga

SEQ ID NO: 3734 - DNA, 3489 bp, Oryza sativa
  misc_feature (1)...(3489): n = A,T,C or G
atggtacccgatatctgtgatatctgttacccagcacctgtgatacctaaatctgatacctatgatactcgtggaagcagatatcagaggctcagagagatcgamgcgcgcgcgagaaaatcggaggtcgccggcgccggcgacgacgaccgaagacgatcagataatgccgaccaccaagtgcgccgttccgctggtaaccgcgccgccggcggcgggggatcggcggagctgacgcgtcagctgtcgtcgacgcaggcgagcccgcggttcagcttctcgagcggcgtgctgccgtcgctgggctccaggggcggcggcgagcgccacgcccggctccggcggttcatcgtgtccccctacgaccgccgctacgagctgtggaacaactacctcatcctcctcgtcgtctactccgcgtgggtgacccccttcgagttcggcttcgtcccggagcccgccggcgcgctcgcngcngccgacaacgccgtcaacgccttcttcgccgtcgacatcgtgctcaccttcttcgtcgcctacaccgaccccaagacgttcctcctccaagacgacccccgcaagatcgcgctccgctacattaccacctggttcgtcctcgacgtcgtcgccaccatccccaccgagctcgcccgccgcatcctcccaccggacctccgctcctacggcttcttccgggcatcctccgcctctggcgtctccaccgcgtcggcatcctctttgctcggtaacctaccttctactctcgagaaggacaggaagttcagctacttctgggttcgatgcgtgaagctcgtttgcgtgacgctgttcgcggtgcactgctcggcttgcttctactacctcctcgccgacaggtaccctgacccgacgaacacctggatcagcgcctacatgcccaacttccacaaggccagcatctggagccgctacgtcgcctccatgtactggtccatcaccaccctctccaccgtcggctacggcgacatgcacgccgagaacaccggcgagatggtcttcaccaccacctacatgctcttcaacctcggcctcaccgcctacatcatcggcaacatgaccaacctcgtcgttcacggcaccagccgcaccaggaaattcgtcagtagtcactcactttctttgatcgatccattgctgaccttgaagagtagcgattctttggtgttcttggttcaagggaccatgatccaagcggcgacgagcttcgcgcagcggcatcagctgccggcgaggctgcaggagcagatggtgtcacatctgagcctcaagttcaggacgaattcagaagggctccatcagcaggagacattcgaggcgttgcccaaggccatcaagtcaagcatctcacaccatctcttctttggccttgtccagaatgtctacctcttcgagggtgtctcaaacgatctcatctttcagctggtaattgatctcagtgtgattatgtttcagagaatgaatgctgagtactttggcgccgcgagaaggatattcatactgcagaatgaagcgcctgcggatttctacatcatagtctctggtagtatgctagcagggatggccaagtcaggagatgtcgtcggcgagatcggggtcctgtgctacaggcctcagctcttcacagcaagaacaagatcactgtgccagcttcttcgcttggaccgggccgcattcctcaggatcatccagtccaacattgcagatgggacaattgtcatgaacaatcttattcagtatctgagagagaagaaagaaattgcctccattgttgctgtcgcaaaggagatcgatgacatgttggccaggggccaaatggatttcccaatcacactctgctttgcagcttccaaaggggatagcttcttgttgcatcagcttctgaagcgtggattagaccctaatgaatctgatcattatggccgcacagctctgcatatagcagcttctaatgggaatgagcagtgtgtcaggcttctgttggagaatggagctgattcaaattcgagagatccagaagggagagtgccactgtgggaggcgctgtgcaggaggcaccagaccgtggtgcagctgctggtggacgccggcgccgacctgtccggcttctacgcggcgccgtacgcgcgcgtcgccgtcgagcagaacgacgccgcgctgctcggggagatcgtccggcacggcggggacgtgtccggcgcgtgctccggcgacggcaccaccgcgctgcaccgcgccgtcctcgacggcaacgtgcagatggcgaggctcctgctcgagcacggcgccgacgccgacgccgaggacgtcaacggcctcacccctcgcgccgtcgccgagcagggcggccacgcggacatgcagctcgcgttcgcgtcggcgacgcgccacgagccgcgcaaggctcggccgccacggccggcttcggcgatcgtgccggtgccgctccgcgacggcgtggactccttgccgtcgtcgtcgtctcggcgagggcgcacgtccttcaaccttcggcgccttcgggcgcagcacgccgcagcggatggccaacttccgcaaatccctcttcggcgtcatctcctcgtcacacgcgttccatcacgaaggcggatacaggggccgcsgccgaagccgcggcgccgccsccgagagggagaggtcgtcgagctcgccgccgctggtgagggtggccatctcctgcccggagtcgcgaggcgggaaggatcacagcagcaagctggtgttcatgccggagacgctgcgtggtctcctcgagctcggcgcggcgagatcaccggacgattttacggtgcaatcaatttacaccgcaaaacagtgacatggagcttcaacaaggcggtggcccgtggcggcggcggcgatggtcgccgtggtggcaatggtggcggcgccggcgtcggggcaggcggtggcggcgtcgtgcacggcgtcgctgatcaccagctttacgccgtgcttmaatttcatcaccagcagcagcggcggcggcggcggaacggsacggccsccggcggcggcgcgccgacggcggagtgctgccagtcggtggcggcgatgatcaacacgagcgccagctgcgcctgcctcgtcctcaccggcaacgtgcccctcggcatccccatcaaccggacgctagccgttacattgcctaaagcctgcaactccatgtctgttcccctccaatgcaaagatacatcagctcagattccagctgcaggagtacccgttgcagtttctccggccatgccaccactgccgccaagtccgccggagtcgacggccggtgccggatcgccgacggcgacggccacgccgccggcgacgagccagacgcagacgaggccgcaggtggtgcccagctctgcacggagggtcgccaccaatgccggttttcctgcgtttctgctgctgctagctgccatgctgttctga

SEQ ID NO: 3735 - DNA, 1910 bp, Oryza sativa
atgccgagcctggcgctgctcagggcggtcgccatggcgctgctgctgctgctcgcccgctcgatggagggggtggatggggcgggcgggggtgggaacgcgacgtgcccgctcgatctgagctacgtgacgacgttcccgtgggacgccgacctgtgcgccggcggggcggggaacatgacgaggtgctgcaatacgctgctgtccgtgctcgccatcggcctcgcggagcaggtccgcgccacgggccacttccgcatcccgtcggtgggggagtccgcggcctgcctcaaggactacggggcgaagctgtcggcggcgccgttttccctcccgggagcgtccctcgtgcagacctgcttcccttcgccggagcagttcgtctcctcgccgtccttctgcgccggcgtcaccaccgccgcggagtacagggcggtcgtcgggaacgactccgtggccgcgctggactccgcgtgcggcgacctctcctcgacgccgcactgcctccgctgcctcgacgcgggcatcgccgccacctcccgcctcaaagccgccgccaacatctccgccaacgccaccaccgacggcgccgcgacgacgcgcaactgcttctacctcaccgtcacgtacgccgccggcatctccaacgtcgccggccccaccaacccacctaccgccgcctgcaccctcggcctcgccctctccaaccctcccgccgcgccgcccaaatcccacgacacggtcatctacgccaccgccatccccgtcgcattcctcctgctcgcctcgctcctcgcgttcttggtctggaggaggcatgacaagaagaagaagaagaagaagatccacgagatctccaaggagggatcggcgaagcggcggtcgcatccgcggccgaacacgggctccatcctgtacgacattgccgagctctccaaggcgacggacgccttcgccgaccgcaacctcgtcggccgcggcgggttcggcgccgtctactgcggcgtgctcgcggacgggtccgtggtcgcggtgaagaagatgctcgacccggacgtggagggcggcgacgaggagttcaccaacgaggtggagatcatcagccacctccgccaccgcaacctggtgccgctccgcggctgctgcatcgtcgacgacgacgccgaggaagggaagcagaagttcctcgtctacgacttcatgcccaacggcgcgctcgaggacttcatcttccgggacggcaagcggccggcgctgacatgggcgcagcggcggagcataatcatggacgtggcgaaggggctggaccggcgatctacacagggacatcaaggcgaccaacatcctgctcgacggcgacatgcgcgcgcgggtggcggaacttcgggctggcsargcggagccgggaggggcagtccactcacgacgcgcgtcgccggcacgcacggctacctggcgccggagtacgcgctgtacgggcagctgacggagaagagcgacgtgtacagcttcggcgtgctggtgctcgaggtgctgagcgcgcggcgcgtcctggacatgtcggcgccgtcgggccccgtgctgatcaccgactgggcktgggcgcacgtcaaggccgggcaggccagggaggtgctcgacggcgcgctgtcgactgcggacagcccccggggcggcgccatggaraggttcgtgctcgtcgggatcctgtgcgcgcacgtcatggtggcgctcsggccgaccatcaccgaggcgktgaagatgctggagggggacatggacatcccggagctgccggaccggccgctgccgtacgggcacagcgccatgttcagcgaggccgggagcaacttcagcgcytcgccggcgttcagtggcccgttcattgacaatggcgacatgctcaggtg

SEQ ID NO: 3736 - DNA, 579 bp, Oryza sativa
atggcggcgccgccggctagggctcgggccgactacgattatctcatcaagctgctcctcattggcgacagcggtgtaggaaaaagttgtctcctcctacggttctcagatggctctttcacgactagtttcattaccacaattggtattgacttcaagataaggaccgttgagttggatggtaaacggattaaattgcaaatctgggatactgctggccaagaacgctttcgaactattaccactgacataagaaattggatcagaaacatcgaacaacatgcctctgataatgtgaacaaaattttggtggggaacaaagctgatatggatgaaagcaaaagggctgtacccacttcaaagggacaggctcttgctgatgaatacggaatcaagttctttgaaacgagtgcaaagacaaacctgaatgttgagcaggttttcttttctatagcaagagatatcaaacaaagactctcagagactgattccaagcctgaggaccgaaccatcaagatcaaatcggaaggggaagccgaggcagcggcggctcagaaatcagcttgctgtggatcttag

SEQ ID NO: 3737 - DNA, 1383 bp, Oryza sativa
atggcgctcctctcggctcccgtgcgccgccgccgctcgcgcgtgcgtgtcctgctagtgtgctgctgcttgctactggcgctcgcggcgccgtcggcggcggcggcggcggcggggcatgactacggcgacgcgctggccaagtcgatcctgttcttcgaggggcagcggtcggggcggctgccggcggcggggcagcgcgcggcgtggcraggggactcggcggtgtcggacggcggcgcggcgggcgtcgacctggagggcgggtactacgacgccggcgacaacgtgggcgacccaacgaaggaccacggktgctgggagcggccggaggacatggacacagcgaggacggtgtacaacatcagcgcggcraggccgggktcggacktggccggggaracggcggcggcgctggccgcggcgtcgatggtgttccgcgacgacgacccggcgtacgccgcgcggctgctcgccggcgccaggagcgcgttcgagttcgcggacgaacacaagggcgcgtacagcgacgacccggagctcagggccggcggctgcccgttctactgcgacttcgatggatatcaggtcagggatgagctgctgtggggagcagcatggctacggagagcctccaaggaaggcacctacctcgactacattcagaacaacggcaagacccttggagcagaggatagcaccaacgaattcggctgggacaacaagcatgccggcatcaatgtccttgtctccaaggagttcatagatggcgaggtgctatctctgcaatcctacaaggagtttgcagatggattcatctgcacactgattccggagtcgtcgtctccgcacatcacgtacacgcccgggggcatgatctacaagcctggaggcagcaacatgcagcatgttacatccatttcgttcctgctcctgacttatgccaagtacctctccaattcctcgcgcactgtcaactgtggaaatgtttcggttggtcctgccactcttcagcagctagccagaaagcaggctgattatatattaggagataacccgatgaaaatgtcatacatggtcgggtacggcgatcggtatcctcaacggatacaccatcgaggatcatcgttgccttcgatcaagagccatccccagcgcattgcgtgcaacgacggcacgccttactacaattcatctagcccgaacccaaacccgttaattggcgcagttgttggggggcctggggaggatgatgtttatgaggatgaccgtgccgatttcaggaaatctgaaccaactacctacatcaatgctccattggtaggagttcttgcttaccttgttggcaatcctgatccaggccaaggccatgtcaggcattga

SEQ ID NO: 3738 - DNA, 1212 bp, Oryza sativa
atggagtacggtgcagcaacgcgtggcgcgctcctcgcggccgccccgctctccggcgcccggcgtagctggttgcccctctcatcgccgccgtcgccgccctctattcagattcagaatcgactttattcgatatcgtcgcttccactaaaggctcgaggcgtgagaagatgcgaggcttctctagcaagtgactacacgaaggcatctgaggtagctgatttagattgggagaaccttggttttggaatcgtgcagaccgactacatgtatatcacaaaatgcggacaggacgggaatttttctgagggtgaaatgattccatttggacctatagcgctgaacccatcttctggaggattrtttgaaggtctaaaagcatatagaacaacagatgactctatcttattatttcgcccggaggaaaatgcactgagaatgagaacaggtgcagaaagaatgtgcatgcctgcgcctagtgttgagcagtttgtggatgcagtaaagcaaactgttttagcaaacaagagatgggtgcctcctaccggtaaaggttctttgtatattagaccgctactcatgggtagtggtgctgttcttggtcttgcacctgctcctgagtatacgttcattatatttgtctcgcctgtggggaactactttaaggaaggtttagctccaataaatttgatagttgaagataagtttcatcgtgcaacccctggtggaactggaagtgtgaagaccataggaaattatgcctcggtcttgatggcacaaaagattgcaaaagaaaagggctattctgatgttctctacttggatgctgttcacaaaaagtatcttgaagaagtttcttcatgtaatatttttgttgtcaagggcaatgtcatttcaactccagcagtaaaaggaacaatattgccaggcatcacaaggaaaagtatcattgatgttgctctgagcaagggtttccaggtcgaggagcgacttgtgtcagtagacgagctgcttgaagctgatgaggttttctgcacaggaactgctgtcgtagtgtctcctgtgggtagtattacctatcaagggaaaagggtcgaatatgctggcaacaaaggagttggtgtcgtgtctcagcagctatatacttcattgacaagcctgcagatgggccaggcagaagattggctaggctggactgtgcaactgagttag

SEQ ID NO: 3739 - DNA, 849 bp, Oryza sativa
atgcgtgaggtgctcctcctcggctcgttggtggttctcgccttgttgtcgctgttcccgtgctgctcctgtctctcgcagggagcggaggaggaggaggacgacggcgaggtgcgcttgatggggctcgccggagaggccgctggctcgcctggcagtggcggcgggttcagtgcaaatggtaaatttagctatggttatgcgagctctcctggaaaaagatcctccatggaggacttctatgacaccagaattgatggtgtcgatggagagaccgttggactgtttggtgtctttgatggtcatggtggagctcgagcagcagaattcgtcaagcagaacctcttcaccaatttaatcaagcacccaaagttattcagtgataccaagtctgcaattgccacaatcgagatgcagggttcgactgcctccactgcaattctcgtaggcgaccgtctgctcgttgcaaatgttggagattctagggctgtcatttgtagaggaggagatggaacatggcgcgtgggtggtgttcttgctgtctctcgagcatttggtgacaaactcctgaagcaatatgtggttgctgatccagagatcaaggaggaggtggtcgacagctctctcgagttcctcatccttgctagtgatggcctctgggacgtggtgaccaacgaggaagctgtggccatggtgaagccaattctggattcagagcaggctgcaaagaagctcctccaggaggcctcacagaggggaagcgcagacaacatcacctgcctcgtcgtccgtttcttggagcaggagaatcacctgccagagagaccgacgaatgatcaagcctcctaa

SEQ ID NO: 3740 - DNA, 1580 bp, Oryza sativa
atggctcgcggcagcggggccggaggaggcggcggcggtggtggcggggggctggagctgtcggtcggggtcggcggcggcggcggcgcgcgtggtgggggaggcggtgaggcggcggcggcggtggagacggcggcgccgatcagcctcgggaggctcatcctctccgggatggtcgccggcggcgtgcagtacgggtgggcgctccagctctccctcctcaccccctacgtccagacactcggactgtcgcatgctcttacttcattcatgtggctctgtggtcctattgctggcatggtggttcaaccatgcgtgggtctatacagtgataggtgcacctcaaaatggggaagacgaaggccatatattcttacaggatgtgtgttgatatgcttggctgtcgtagttattggattttcagctgacatgatacgccatggtgtctaccatggatcacggtggcatgctgctattgtatatgtcctgggattctggcttcttgatttttccaacaacactgtgcagggtccagcacgtgctctaatggctgatttatcaggacgtcatggacctggcacagctaactccatcttctgttcttggatggcaatgggaaacatcctaggatactcctctggttccacaaacaattggcacaagtggtttccattccttaaaacaagagcttgctgtgaagcttgtgcaaatttgaaaggtgcatttctggtggctgtgattttcctgtccctgtgcttggttataactctgatatttgccaaggaagttccattcaaaggaaatgcagccctcccaacaaaatcaaacgagccagctgagcctgaaggcactggtccactagcagtgttgaaaggcttcaggaacttacctactgggatgccttctgtgcttattgtgactggccttacctggttgtcttggttcccattcatcctctacgacactgactggatgggccgtgagatctaccacggtgacccaaagggaactgatcctcagatcgaggctttcaaccagggtgtcagggcaggtgcatttggcctgctactgaattcgattgtgctaggattcagctcattcttgattgaaccaatgtgccggaaagtcgggccaagggtggtgtgggtgacgagcaatttcctcgtctgcatcgccatggctgcaactgcactgatcagcttctggtcactcaaggacttccatggaactgttcagaaagccatcactgcagacaagagcatcaaggctgtctgcctcgtcctctttgcgtttcttggagtccctctcgccgttctgtacagtgttcccttcgcagtgacggcgcaattagcggccactagagggggtggccaagggctctgcaccggcgtcctcaacatctccatcgtcatccctcaggtggtcatcgcgctgggagccgggccgtgggacgagctgttcgggaaggggaacatcccggcgttcggcctcgcctcgggattcgcgctcatcggcggcgtcgccggaatattcctgctgcccaagatctccaagcgccagttccggtcgtgtgcttggta

SEQ ID NO: 3741 - DNA, 1250 bp, Oryza sativa
atggggaattgctgtgggtggggcgcgcggatcaaggatgggagcccgcaaccgggagcctctgggatgttctcaaggagtggtgctaaagatgggagtaggcttagtggctgcagtagtcgagcctcttcagcttccatgcctccaactgcgaaaactgaatgtgagatactgcagtcagccaatgtgaagatcttcagttttagtgatctcaggatagccacaaggaacttccgtcctgacagtgtacttggtgaaggagggtttggatctgtctataaaggatggattgatgagaatacattatctgcttgcaagcctggcactggaattgctgttgctgtgaaaagactcaaccaggagagtttgcaagggcaccgagaatggttggcagaagttaattacctaggtcagttttgccatcccaaccttgtgaagctatttgggtattgcttagaggatgagcatcgactgctagtgtatgagttcatgccacgtgggagcttggaaaatcatctgtttaggagaggttcgcatttccagcctctttcatggaacctaagaatgaaggttgcacttggagctgcaaaaggactagcttaccttcacagttcagaggcaaaagttatttatcgagatttcaagacttccaatattctgcttgacacagactattctgcaaagctatctgattttggattggcaaaggatggtcctgttggtgagaagagccatgtatccacgagggtgatgggaacatatggttatgctgctccagaatatctttcaacaggccatttaactgcgaagagtgatgtttatagctttggggtggtgctgctggagatgatgtcaggtcgtcgtgccattgacaagaaccggccccagggtgaacacaatcttgtggaatgggcccgaccatacctcacacataagcgcaagatattccgtgtcctggataccaggctagaaggtcaatactctcacgttggagcacaaacagttgccacccttgctcttgagtgcctgtcgtacgaagctaagatgaggccttctatggaagctgtggtcactattcttgaagagcttcaagaatccagccatgtggacaggaaaccagcagcagagaggcgtcaagaatccaccacaggtacaggcaaaaaagcccctactgcaaatgctagcaagaacagcgtcttttggcaacaagtcctttttgtgcattatcatgagcttcttaacttcagcta

SEQ ID NO: 3742 - DNA, 1257 bp, Oryza sativa
atggtgtatcgaaatgatccggattggggattcggtttgagctatttttggatttttgttcggattggatttggcttgttctgcgacgaatcgatggtttcggagagaaagcgatcagctacggttcttagtttgcaatatgctgcttttgattcgattggattttggggatcgctttggccacttgctgatgcggagggtgcaaagaggcatgctatgatcgagctactcaaggaacatggtggattgacatatgggaaaactggaagtcattttgaaccaaagacaattccaccacccctaacaaacaaggctgactgggagattaaccctcttgagttggatttctcaaaagctgttatcatcggaaaggatgatctttttagatgttatatgcaaatagagatagttgggtgttcaaaacttgccattatattagctggctcttttggtgaaattctgaaagccaactggcgaggaacacctattgctgtcaagcgcattcttccatctctatctgatgacaggctggtgattttttttggggtatgcagacaagatttcaagcatgaagtcaacttgctaataaagctgagacatccaaatattgtgcagttccttggagcagtcacagaaaccaagcctttaatgctcgttactgagtttttacgaggaggcgaccttcatcaatacctgaaggagaaaggtgcacttgccccagcaactgctgttaatttcgcactagacattgccaggggcatggcctatcttcataatgaacctaatgttgtaattcaccgggacttaaaaccaagaaacattcttctagtaaattctgctgccaatcacttgaaagttggagattttggtcttagcaagattatcaaagcccagcatgccaatgatgtgtacaagatgactggggagactggaagctaccggtacatggctcctgaagtattcaaacaccggaaatatgacaagaaagttgatgtcttctcgtttgctatgatactttacgagatgcttgaaggggatccacctttctctaactatgaaccttatgaagccgcaaagttaattgagctatgctggtccggggatatccatctgaggccatctttcctagagatcctcaagaggctcgagaagatcaaggagtacttagctgcgcacgatcaccattggcatttgttctcccagttccctgctctttttatgtttcttgagaatcagtacagtggatacaggaagtaa

SEQ ID NO: 3743 - DNA, 2985 bp, Oryza sativa
atgaagatcccgttcgtgaccaagtggtcgcaccggtcgcacgagcccgccgcgccgtcgaatccggcggcgcagcagcagccgcccccgccgtccccggcgggggtgtcatcggccgcggcggctgcggtggtggaggaggcggagatggagacgggaggggatgacttcatcacgcaggaggaggagtaccagatacagctggcaatggcgctgtcggcgtcggcgtcggtgtcggcaccgagcggcggcgggggctcgggggacacggagggggagcagatcaggaaggcgaagctgatgagcctcgggaggggcgacctgagcgccgccgccgatcgtggcgtgggcgactccgcggaggcgctctcccgccgataccgggactataactttcttgactacaatgagaaagttatagatgggttctatgacatatttggactttccggggagtcggccaggcagggaaagatgccatcgcttgcagaacttcagaccagcattggagatcttggctttgaagtgattgtggtcgaccataagtttgatagtgccttgcaggagatgatggaagtagcacaatgctgcatgttgggctgtcctgatactacagtattggtgcgacgaatagctgaagttgttgcaggacatatgggtggtcctgtgatagatgcaactgaaatgtttacgaaatggttgggcaaaagcattgagcagaggacatcacatcagacaagcctgctgcctataggccgcattgacataggcttgtctcggcatcgtgccttacttttcaagattcttgctgacagtgttggtattccatgcaagctggttaaagggagccattacactggtgttgaagatgatgctattaacattgtaaagatgaataacgaaagggaatttttggttgatgttatggctgccccaggaacactcattccagcagatgtctttatttcaaagggtactccattcaacttgactaaaccgttggtgcagaatcaggtggttgaattggcaagtaacattgaaaatgacccaagtgcagctcattctgagcatgtaggcaaccgattgcatatgtttggcaatggtaattcgttgtcagaaaatcaatcagggtgtgaaaaaaccatgatagctggaagtgaggttagtcaactctggacattggcacctcagatgcaatctgatcaacaatcaacttctgctggcgcacattcaatgcagaaagaggacttgaaattaactccagactctcaagaaaatgaagagtctaaaaagcaaatttcagagactgattctttcaggggtattgaactgggtaaaagttcattggcattcaagggattaaacaatagaaataatgaatatcaaaggcatagagagaatatagctccagcacctggaagatctcaacaaccattggtgatgaaaaactggtcagcttgtaatgacatttctaacaagcaatacaatattgctgagaggttagttcgtcggagaaacactagcgacaatgctgcatcgtcatctcagttggcctggtcaactgcaaagcattacaatcccaatggcagagagcgtaatgataggttatgtgcagcaccaggtcgtaattatgacaatagaaaagttggtgcctcaactacggcaacagcttctgccactggagaacgcctggatagaccaaacctggcacctgttcattactatgatgacaaaccgaatggtatttcttcagtgaatgcagcttctacatctggaatcgtgaaggttgcagaaaagggccctcatgatctggaaaaagttcccatctattctagatttgacagtcaaatctatagtagtatgcaagggtattctccagaagtgaaggagaacaaggaaaactatgataggcatgacaacatgaggttacatcctgatccaagaaggtcccctctagacagattcatggacacatcaaggcagaactcagaatctgtttctccaccccaagctgggtcaagcaccgttgacatggtgttgggcgaagtttctgaatgtgaaatcctctgggaggatcttctaattggtgaaaggattggcctaggttcgtatggagaagtataccatgccgattggaatggaactgaagtggctgtaaagaagtttttggatcaagagttctatggtgatgctttggctgaatttcgttgcgaggtgaggattatgcgccggcttcgtcatccaaatattgtactctttatgggtgcagtaacacggcctccacacttgtccattgtatcagaataccttcctaggggaagcttgtatacgattattcatcgccctgattgccaaattgatgagaagtgcaggattaaaatggcccttgatgtggccagaggcatgaattgtcttcatactagtgtaccgacaattgttcatcgggatctaaaatcaccaaacttgctggttgacaataattggaccgttaaggtatctatctgctttcgagaaccaaagcctgaaagcttgttgttagctaacaaattacatttacaggtctgtgattttggactttcacgtttgaagcacggtacatttttgtcatccaaatccactgcagggactcctgagtggatggcaccagaggtattaaggaatgagcagtcaaatgagaagtgtgatgtttacagctttggtgtcatcttatgggaactagcaacactacaaatgccatggagtggcatgaaccccatgcaagttgtgggtgcagttggtttccaggatagacggcttgatatccccatggaggttgatcctctagttgcatctattatacaggactgctggcagaaggatccaaacttgcgcccttcttttagccagctaactagctatctgaatacattgcaaaggctagtaatcccttgtcatcaggagacagcgggctcctatgtaccgcaagaaatatcgttataccggtga

SEQ ID NO: 3744 - DNA, 585 bp, Oryza sativa
atgtgtgggggagcgatcatcgccgacttcgtcccgcccgccggcgcccgccgcgccgctgcctccgacatctccgacaacgccgtcctctccgctgccggtgccggtgacgagtcgttcgcggcggccaaggcgccggcgccggggaggaagacggcgtaccgcggcatccggcgccggccgtggggacgctgggcggcggagatccgcgacccgaggaagggcgcccgcgtctggctcggcacctacgccaccgccgaggaggccgcccgsgcctacgacgtcgcggcgcgcgacatccgcggcgccaaggccaagctcaacttccccccgaccatyggggccgccgccgggcaacgscgcccaagaagcgacgcaaagccgccgccgcggcaaaccaccaccaccaccaccaccagcaggagagctcaggctcctcgtcggcgtcgtcgctgcttccaacccsgccgccggccgccgagcaccagctccgcgagtgcatgtccgggctggaggcgttcttgggcctcgaggaggaggaggacgacggcggcgccggtgagccatgggacgccgtcgacatga

SEQ ID NO: 3745 - DNA, 4494 bp, Oryza sativa
atggagtttctactatgggtatcctaccttaccatcacactcgccaccatcctcttatttcttagaaccctgatcttgaggcacaaccgccgggtgtacaacctccctcctgggcctaagccatggccaatcatcggcaacctcaacctcatgggctcactcccacaccgctccatccacagcctctccaagaagtacggtcccctgatgcacctcaggttcgggtccttccccgtcgtcgttggctcgtcggtggagatggccaagttcttcctcaagacccacgacgtggtgttcgccgaccggcccaagaccgccgccggcaagcacaccacctacaactacagcgacatgacgtggtcgccctacggcgcgtactggcgccaggcgcgcaaggtgtgcctcgccgagctcttcagcgccaagcggatcgagtcgtacgagcacatccgccgcgaggaggtgcgcgcgctgctccgcgatctgcacgcggcgtccgggcgcktggtggcgctcaaggactacctgtccgcggcgagcctgaacgtgatctcgcgcatggtgctcggcaagaagtacctggagcgcgaggtggtgcacgagggagaagtggtgacgacgcccgagcggttcaggtggatgatcgatgagctcttcctgcttaacggcgtgctcgacattggggattcgatcccgtggttgggctggctggacctgcaggggtacattcggaggatgaagaagctgagcaagatgtttgatcagttcctggaatatgtattggacgagcatgagaaccggatgtgtcgcgagggggagagcttcgtggcgaaggacatggtggatgtgctgctcaatgtcgccagcgatccttcgctggaggtcaagttcagccgtgacagcgtcaaggcattcacccaggacctcatcgctggcggcacggagagctcatcggccactgtggattgggccatcgcggagcttctcaggaagccggaggtgttcgccaaggtcaccgaggagctggaccgtgtcgtcggccgcggccgctgggtcacggagaaggacatcccgagcctcccctacatcgacgccatcatgaaggagacgatgcgaatgcacccggttgcgcccatgcttgcgcctcgcctgtcccgcgaagacacgtccgtcgacggctatgacatccccgctggcacgcgggtgctcgtcggcgtctggtccatcggccgcgaccccaagctgtgggacgcgccggaggagttcatgccggagaggttcatcggcagcaagatcgacgtgaaggggcaggatttcgagctgctgccgttcgggtcgggccggcggatgtgccccggctacagccttgggctgagggtgatccaggtgagcctcgccaacctgctgcacggcttcgcgtggaggctgcccgacggcatgacgaaggagcagctgagcatggaggagatcttcggtttgtcgacgccgcgcaagttcccgctcgagttgttactgcatctgtcgtcgctgcagtccgagcgattggaagaagaaatcgattctgcatctgaatctgaagagattgcatccgagtcatctgaagaagaggttgcatctgaaaagagcacccagatggcatctacatccaactccgctgcgagctccaatcccttgatcggagttcaggtcaccgagaagctttccaaggcgaatcatgggctctgggtggcgcaggtgctcacggcaattcggggcgccagacttgaggggcacatcaatgggaaaaacccagctcctcctgctgaaatcacgaagaccgtcgatggaaaggaagtcaagacctccaacccgaactatgatgaatggttcgctgctgatcagcagatcctcggcttcttgttctcctcgttgacgagagagacactctcacaaaagggcaactcgtcgatctctgaatatatcggcaagatgaagaccctcgcagatgaagttgcagcagccggcaaaccactggatgatgaagaactgatcgcctacatcctcaacggcctcgacgaagatttcgactccgtcgtctccacaattgttggcagggttgaacctgtcacggttgcggaagtctactcacaacttttaagctttgaaaacaggttagcaatgaggcaggcgcaggccacggcgaacatggcgaacagaggtggacgtggtggtggtggctcacggggtggtggcgcaaaccctgggcgaggacgcggcgcaactcgtgggcgcagcgccgcaccaggtcgtggacgcggcaacaaccagcagcagcgcagctatgacaatcgtccattgtgccaggtctgctataaacgcggacatgttgcagcggactgttggcatcgatttgatgaagatttcgtccccgacgacaagctagttgctgctgccatccacacccatgcacgggactccaactggtatgttgacaccggcgccaccgaccacatcacctcggaactggagaaactcaccgctcgagacgtctacaaaggacatgatcaaatccacacggcgagtggttcagccaccgccataaaggatacaaatgtctggacattgcttctggtagaatctatatatccagagatgtcatttttgatgagagtgtatttcctttttctaaattgcatgacaatgctggcgcacgtattcgtcatgagatctctcttttgccctctgatctcattattcacacgtctcatcaagggggagaacttgagaatgatcagaatgtttaattctcctaatgaaatgcctgatcaatctgttgagcatgcagaagatacaggaaatataggtgcagaggactgggtggatgaagcaaatacgcagcagctgtcacagcagcaaccatcatcgccgcagtcgccgggatctgtgacacccttgtgtgtgcgcaggtctggtagtgacacgcatgcagcaacttcaggcacgcgtgttgagaacgagccgagtgatcagtctccgtctgccacgacgatggcaggtaatgatgatgtctctgaatcctctgcatcgcatgaagaagccgcgagctctcctgtggctgagcagcatcaaccagaaatagttcggcctagaacccgcttacagagtggaatccgcaaagaaaaggtatacacagatggtacagttaaatatgcttgctttacagcttctggtgaaccagaaaatttacatgaggcattaaatgataaaaattggaaaaatgctatggatgctgaatatgaggcactaatgggtaataaaacctggcatttagttcctgcagaaaaagctaataatattatagattgcaagtgggtctataagattaaaagaaaggctgatggtagcttagacagatataaagctagattggttgcaaagggatttaaacagaggtatggaatagattatgaagatacctttagtcctgtggtaaaagcaattacaatcagaattattttgtctattgctatctctagaggttggagccttcgacagctagatgtcagtaatgcttttctccatgggatattggaagaggaggtttatatgaaacaacccccaagatatgaagataaatccttgattaatcatgtatgtaagttagacaaggctttatatggtcttaagcaggcaccaagggcatggtactcaaggctaagcacaaaactgcaagagctaggattcatgccttccaaggctgatacatctctgttcttctacagcaagggtgatgtcattatatttgttcttatatatgttgatgatataattgttgctagctctatgccagatgccaccacagctcttttgcaggacctgaataagtcttttgccttaaaggacttaggagagcttcattatttcctaggaatagaagcaacaaaggtatgtgatgttcattgggctgcagtcaagaggattctgagatatttgcaacaaacatctgggcttggtcttaagataagaaagtcttcttctttacttgtcagtggtttctctgatgctgattgggcaggttgcttagatgataggagatccactggtggctttgctgtttatttggggcctaatcttgtgtcttggagtgcacgtaaacaacctacagtgtcaagatcaagtacagaagcagaatataaggctttggctaatgtcacagctgagatcatgtgggtgcaaactctgttgaaagagatcaagatagaagtaccaaaaacagcaaaggtatggtgtgataacattggagcaaagtatctctctgctaatcctgtgtttcatgctcgtactaagcatatagaagtagactatcattttgttcgtgaaagagtatctaggaaattgttggaaatagagtatgttccttcacaagatcaagttgcagatggatttacaaaacccttgaatgagaaacagctagctgtatttagatacaatcttaacctttatggtttagattga

SEQ ID NO: 3746 - DNA, 1569 bp, Oryza sativa
atggaggtagcactctgtgcatcctttgttgccattctgctaaccaccatgctcttcctaaaagccatctcgacgaggtgccgccgtcgaaagtataacctcccgccgggtcccaagccatggccgatcatcggcaacctaaacctcgtcggtgcgctcccacaccgttccatccacgagctctcaaggcgctacggcccactcgtatacctccggttcgggtccttccccgtcgtcgtcggctcgtccgtcgagatggccaggttcttcctcaagacgcgcgacgcggcgttcatcgaccgccccaggacggccgccggcaagcacaccgcctacaactaccgcgacatcacgtggtcaccctgcgacgcgtactggcgccaggcgcgcagggttgtcctcaccgagctcttcagcgccaggcggatcgagtcgtacgagcacatccgccgcgaggaggttcacgcgctgctccgtgatctgcactacgcgtcgtcgtctggcggccgacgagctatcgtgattaaggactacctgtccacggcgagcctgaacatgatcactcgcatggtgatgggcaagaggtacgtgcagggcgaggtggtccatgaggagccgggatcggcgcggacgacgctggcgcagttcaaggagttgctcgaagagctcttctttctcaacggcgtcttcaatgtcggcgaccagatcccgtggctcgagtggttggacctacagggctacgtcaagaggatgaagaaggtgagcaaggcgttagaccagcttctcgaacacgtcgtggacgagcacagtgagcggaggcaacgtgaggggaacgggtttgtggcaggagacatggtggacgtgctccttcgactcgccgatgattctagcctcgaggtcaaacttagtcgggacagcatcaaggcatttactcaggacctcattgctggcggcacggagagttcatcggagacaatcgagtgggccatctcggagctcctcaggaagcccgagatgtttgcaaaggccacagaggaattggatcgcattgtcggccatagacgttgggtcaacgagaaggacattcttgatctcccctatattgaggctattgtaaaagagaccatgcgccttcaccctatcggacctttgcttgcgccacgcctttcccgtgaggatacgtctgtgggtgggtatgacatacctacgggcacgcgtgtattcgttaatgtgtgggccattgcccgtgaccctacgctatgggacgcatcggaggagttcatgccagagagattcttgggtaagaaaattgatgtgaaagggcaagactttgagctattaccatttgggtctggtcgacggatgtgcccaggctacaaccttgggcttaaggtgatccaattgagcatagccaatctccttcatggcttcacgtggaggctcccgaaggacatggtaaaagaggatttgagcatggaggagatattcgggttatccatgccacgcaagttcccactagaggttgctgttgagcccaagctctctagtcacctctacaaaggtgattga

SEQ ID NO: 3747 - DNA, 1377 bp, Oryza sativa
atgggccgcgcaatcttggaggtcttcatgtgctgcggcggcggcgctgccgtccacgacgacgacgactcggcgccgaggcggcggaggatcgcgcgcaggggggacagcccgaggtcgtcgtcgaggatgtcgttcacgagcctcagctcgtcggggacgctgtcgccggaggacctgtcgctgacgctgtccggctcgaacctgtacgccttcacctacgccgagctccgcgccgcgacgggcagcttctcccgcgccaactacctcggctgcggcgggttcggccccgtctacaagggcgccgtcgacgacggcctccgcccgggcctcgccgcgcaggacgtcgccgtcaagtacctcgacctggactgcggcacgcagggccacaaggagtggctggccgaggtgttcttccttgggcagctgaggcacaagaacctggtgaaattgattggttactgctatgaagccgagcatcggatgctggtgtacgagtacatgagcggcgagagcttggagaagcatctcttcaaaactgtcaatggttctcttccatggatgacaaggatgaagattgccctcggcgcggcaaaaggcctcgcattcctccatgatgccgatccgccggtgatctaccgcgatttcaaggcatccaacatcttacttgacctggattacaataccaagctgtccgactttggcctagctaaggatgggccccagggtgacgctacgcacgtaacgacacgtgtcatgggaacacatggatatgcagctcctgagtacatcatgacggggcatttaacagctaagagcgatgtgtatagttttggagtggtattgttggaacttctctcggggcgaaagtcagtggaccgctctcgacgcccgagagaacaaagcctggtggattgggctagaccatacctcaagtgggccgataaattgtacaaggttatggaccctgctctcgagtgccagtactcgtgccagggtgctgaggtggcggcattggtggcgtacaagtgtctgagtgagaaccctaagtccaggcccacaatgagggaggttgtcaaagccctggagcctgtgcttggcatggatgacttcttcccagttggcccatttgtcttcactgtcattgtggaggacgagaaggtggttaacatgaaggtggacatgaaggttgaggttgaggagaagaaaaacactcaccaaaaccatcaggacaggcatcgacagaagtacccagactcggcgattcacgctggcattgtgctgcatgaccgtgatggtgtcatcggaggagggtacaccggtgcgctgcgacgacaccggaggacggcgagctacaacaaggagaggggagcatag

SEQ ID NO: 3748 - DNA, 459 bp, Oryza sativa
atggaggtatgcaagcgccgtagcgatcgtgtcgaccatatgacctggaatgggataggctggcttagtagttctttcttaatggctttatcctgcgggcttaaggacttccgcgaatccctgggctgcaactacttgatcctgatcatgtgtgctgctataatcacaacaacatttcatcttgctatgattacaactcaaggcaacaacgtatatgggacaaatcaattgcatgagaagctcattgccagattgattcctttgaccacgagaggattgcccctgccaattcatggtaatggctcaaatgtcagaaactatttgtattgtgatgatgttgctgaagcttttgaggtggttcttcacaagggtcaggtcagccatgtgtatcatatcggtactgcgaaggaaagaagggtgattgatgaggctaaggacatatcgggacgtgaaagttga

SEQ ID NO: 3749 - DNA, 4173 bp, Oryza sativa
atgacggacgatgagctcgtcaagaagctacttgactcagtgcctgaaaagtttttgcacataattgcagcgatagagcaattctgcgatttggacaccatgccatttgaggaggctattggccgcctcaaagctttcgaggagaggatacggaagcacagtgacaatgatggggagcagcttcttctcaccacacgcaacactgatgatggtgctggtcgagcccgcggcaagaggtttgataaatccaagtttggctccagctcattggcgagatgccgacgtgccgtgcgatgcggtggtgcgagaatggagcaaacaacgttcatgaagaccaagctcaactgcatgtggagtgctgcgagaagtagccgaattgcaagcaagacaagaagatgtacctcggcattatggtacaacgacatcccccggcgcacggtggtgtgggtcgccgaccggggaactccggtcacaaacagcagttcgtctgcgccgacgctgtcgctgaccaactcctccaacctcgtcttgtccgacgcagatggcggcgttcgctggacgaccaacatcaccgacgatgcagcgggcggcggctccacggcggtgctcctgaacaccggcaacctcgtcgtccggtcaccgaacggcaccaccctgtggcagagcttcgagcacccgagtgactcgttcctgcccggcatgaagatgcgggtcatgtacaggacgcgcgccggcgagcgcctggtgtcgtggaagggccccgacgacccgtcgccggggagcttctcgttcggcggcgacccgggcacgttcctccaggtgttcctctggaacgggacgcgcccggtttcgagggacgggccatggacgggcgacatggtgtcgagccagtaccaggcgaacaccagcgacatcatctactccgccatcgtcgacaacgacgacgagagatacatgacgttcaccgtctccgacggctcgccgcacaccaggtacgtgctgacctacgccggcaagtaccagctccagagctgggacaacagctcgtcggcgtgggcggtgctcggcgagtggccgacctgggactgcaaccgctacggctactgcggcccgttcggctactgcgacaacacggcgagggcgcccgccgtcccgacgtgcaagtgcctcgccggcttcgagccggcgagcgcggcggagtggagcagcggcaggttctcgcgtggttgccggcgcacggaggcggtggagtgcggcgaccgtttcttggccgtgccggggatgaagtcgccggacaagttcgtgctcgtcccgaacaggacgctcgacgcgtgcgccgccgagtgcagcagcaactgctcgtgcgtggcgtacgcgtacgccaacctgagcagcagcgggtccaagggcgacatgacgaggtgcttggtgtggtcaggggagctggttgatacagagaaggaaggtgaagggctaagcagcgacacgatctacctcaggcttgctggtcttgaccttgacgcgggtggaaggaaaaagagtaatgcaatcaagatagtactgccagtgttaggctgtattctgattgtcctatgcattttctttgcatggttaaaaatcaaaggcaggaaaacaaaccaggaaaagcacagaaagctaatttttgatggcgaaggaagcactgtccaagattttgaactcccatttgtaagatttgaggacattgctctagcaaccaacaatttctcagaaacaaataagattgggcaaggaggtttcggaaaagtttacatggcaatgctaggtggtcaagaagttgctattaagcggttaagtaaggattctcgacaagggacaaaggaattcaggaatgaagttattcttatcgcgaaattgcaacacagaaatttggttcgccttcttggctgttgtgttgagggagatgaaaaactgctaatatatgagtacttgcctaacaaaggcttagatgctaccctttttgatggttcaagaaaaatgaaactagactggacaacacggtttaatataatcaaaggggtggcaaggggacttctttatctgcaccaagactctagattgaccataattcacagagatctcaaagctggcaatgttttgctagatgctgaaatgaaacccaagatagcagattttggcatggcaaggatctttggtgataatcaacaggatgcaaatacccagcgtgttgttggaacatatggctacatggctcctgagtatgcaatggaaggtatcttctctactaaatcagatgtctacagctttggtgtgttattgttggaaattgtgactggtataaggagaagctccactagcaatatcatgaactttccaaacctcatagtttattcatggaacatgtggaaggaagggaaaagcaaggatttggtagactcatcaattatggatagttgcttactacatgaagttttgctctgcatccatgtagcattgttatgtgttcaagaaagcccagatgacaggccacttatgtcatctattgtgttcaccctggagaatgggagtagtgttgcactgctcccagccccaagttgccctgggcactttacacaaaggagttctgagatagagccaatgaaagataatactcagaactcaatgaatacttttacgctaacaaacatagagggaagaattctgctgaagaaagttttgatggatcggtcagctgcggctttagcctgcatcaccagtgttcttctcctcctcctgccgccgccatgtgcatccgacgatcggcttgtcaccggcaagccgctctcccctggcgccaccatcgtctccgatggcggcgcmttcgccttgggcttcttctccccctccaactcaactccggagaagatgtacctcggcatatggtacaatgacatccccgggcgcacggtggtgtgggtcgccgaccgaggaactccggtcacaaacagtagttcgtctttgccgacgctgtcgctgaccaactcctccaaccttctcttgtccgacgccgacggccgcgttcgctggacgagcaacatcaccgacgatgcagcgggctccggctccaccgcagtgctcaagaacgacggcaacctcgtcgtccggtcaccgaacggcaccaccctgtggcagagcttcgagcacccgaccgactcgttcctccctgggatgaagcttggggtgacgttcaagacgcgcacatgcgagcgcttggtgtcgtggaagggccccgacgacccgtcgccggggagcttctcgttcggcggcgacccggacacgttcctgcaggtgttcatctggaacgggacgcgcccggtttcgagggacgggccatggacgggctacatggtgtcgagccagtatcaggcgaactccagcgacatcttctacttctccatcgtcaacaacgaggaaaagagatacataacgttcagcgtctccgagggctcgccgtacaccaggtatgtgattacctacgccggcaagtaccagttccagcgctggaacatcagctcgtcggcgtgggatgtcgcggagtggcctagatgggactgcaactattacaactactgcggcccgaacggctactgcgacaacacagcgagggcgcctgctgtcccgacgtgcaagtgcctcttcggcttcgagccagcgaacgcggcggagtggaacagcggccggttttcgcagggttgccggcgaaaggaggcggtgcagtgcggcgaccgtttcttggccgtgccggggatgatttcgccggacaagttcgtgctcttcccgaacaggacgctcgacgcgtgcgccgccgagtgcagcagcaactgctcctgcgtggcgtacgcctacgccaacctgagtagcagcatatctaagggcgacaagacgaggtgcttggtgtggtcaggggagctgattgacgcggagatggtaggcgaaaggcttggcagcgacacgatctacctcaggctcgccggtcttgacgcgggtaagcaccaatttaaattgagcaattttactgttcgtaaggagaagtacggattacaatttgaggtattttactgtttgaggtttatacttttagtccttgagttgagaaagtactaccagatacagcgaggtgctaatgaaatataa

SEQ ID NO: 3750 - DNA, 888 bp, Oryza sativa
atggcgggacgacgacgacgcccattcgctgctccggtcatcaactatctcctcctagccctgtggctcgccgcgtcgtcgtcgttcgccgtcgccgtcgccgtcgccggccatggccgcggtcgccgcagccatgtgtcgtcgatcgtgacggaggagatgtacaacaagtcgctgttcatccacaaggacgacgccgcctgcccggcgaggaacttctacacctacgccgccttcctccgcgccgccgaccagtacccgagcttcggcggcgccggcggccgcgacacgcgccggcgggaggtcgccgccttcctcgcgcaggtctcccacgagaccaccggcggctgggccacggcccccgatgggccctacacctggggcctctgcttcaaggaggagctcaagccggcgagcaactactgcgacgccgccgtcgccgcgcggtggccgtgcttccccggcaagtcgtaccatggccgcggccccatccagctgtcgtggaacttcaactacgggccggccggcgaggcggtggggttcgacgggctccgggagccggaggtggtcgccggcgacgccgtggtggcgttcaagacggcgctgtggttctggatgacgccgcggccgccgtcgaagccgtactcgtgccacgacgtgatgacggggaggtaccggccgtcgagggccgacgcggcggcgaaccggacggcggccgggttcgggctgacgacgaacatcatcaatggcggactcgagtgcaacaaccgcaccggcggcgatccccgggtggaggaccggatcggattcttccggcgatactgcggcgcgctcggcgtcgatgtcggtgacaacctcgactgcgcacaccagttgccctactcataa

SEQ ID NO: 3751 - DNA, 897 bp, Oryza sativa
atgacgtccggggcggcggcggcggggaggacgccgacgtggaaggagagggagaacaacaagaggcgggagcggcggcggcgtgccatcgccgccaagatcttcacggggctccgggcgctcgggaactacaacctccccaagcactgcgacaacaacgaggtgctcaaggcgctctgccgcgaggccggctgggttgtcgaggacgacggcaccacctaccgcaagggatktaagccgccgccatcgtcggctgggggagcgtcggtggggatgagcccctgctcgtcaacgcagctgctgagcgcgccgtcgtcgtcgttcccgagcccggtgccgtcgtaccacgcgagcccggcgtcgtcgagcttcccgagccccagccggatcgacaacccgagcgcctcctgcctcctcccgttcctccgggggctccccaaccttccggcgctccgcgtctccagcagcgcgcccgtcacgccgccgctctcgtcgccgacggcgtcgcggccgcccaagatcaggaagccggactgggacgtcgacccgttccggcaccccttcttcgcggtctccgcgccggcgagccccacccgcggccgccgcctcgagcacccggacacgataccggagtgcgacgagtccgacgtctccacggtggactccggccggtggatcagcttccagatggccacgacggcgccgacgtcgcccacctacaacctcgtcaacccgggcgcctccacctccaactccatggagatagaagggacggccggccgaggcggcgcggagttcgagttcgacaaggggagggtgacgccatgggagggcgagaggatccacgaggtcgccgccgaggagctcgagctcacgctcggcgtcggcgcgaaatga

SEQ ID NO: 3752 - DNA, 2817 bp, Oryza sativa
atggcgggcagcagcagctcgaaggagatagtcgacgcggtgagaagtgatggcgttcccactcggcggcggcggcgccacgccggcttggagatcgtcgccgaggatgcgcctagcggaagcagcggcgcccaccagcagcaggcgtggcgtccggtggcgccggcgacggcggggcgcgacagcggcggcacggggagcggcaagtcgtcggtggacggcggcttcgggcgcgcgtcgcacgactccctgccgcgggtgtcgcaggagctcaaggacgcgctgtcgagcctgcagcagacgttcgtggtgtccgacgcgacgcgcccggactgccccatcatctacgccagcgaggggttcttcaccatgaccggctactcccccagggaggtggtcggccgcaactgccgcttcctccagggccccgacaccgacgccgccgaggtggccaagatccgcgacgccgtcaagcacggccgcagcttctgcggccgcctgctcaactaccgcaaggacggcgccccgttctggaacctcctcaccgtcacccccatccgcgacgacaacggcaaggtcatcaagttcatcgggatgcaggtggaggtgagcaagtacacggaggggctcagcgacaagcggatgcggccgaacgagttgccggtgtcgctcatccgctacgacggtgagcaccgccgccgccgccgcggaatcctctgtttcctcgatgtttctctaattctcttgtcttaccaatgccgccattggcgtgtgtggagcgcagagaggcagaaggacaaggcgatgtcgtcgatgacggaggtggtgcagacggtgaagcagccgcgcggggcgcgcgcgccggccgacgcggcgctgctgacgccgcccaagatgagcgacgcggacaagatggccgccatgtcgccggtcgtggcacccggcactccctcgggcggaggaggaggagccgggtccttcaagtcgccgctctgggacctgaagaaggaggagtcccgcctgagccggctcgccagcggccgcaagtccggccgctcctccctcatggggttcaagatcgggaagaggagctcggtggggagcagggaggcgccggcggtggtggaggagccagcgccggcgcaaccgccggcgccggaggtggtggagaggacggacagctgggagcgggcggagcgggagaaggacatccggcaggggatcgacctggccaccacgctggagcgcatcgagaagaacttcgtcatcaccgaccccaggatcccggacaaccccatcatcttcgcgtcggatagcttcctggagctgacggagtacacgcgggaagagatcctgggaaggaattgcagattccttcaagggccggagaccgaccagggcacggtggacaagatcagggaggccatcagggagcagaaggagatcacggtccagctaatcaactacaccaagagcgggaagaagttctggaacttgttccaccttcaacccatgcgcgaccagaagggggagcttcaatacttcattggtgtgcaacttgatggaagtgatcatgttgaacccctcaggaaccgcctttcggagaatactgagatacagagtgccaaattggtcaaagctacagcagagaatgtggatgatgcagtcagggagcttcctgatgccaacttgagaccagaggatttgtgggcaattcactcaatgcgtgtttctccaaaacctcacaaacggaataacccttcttggatagctatagaaaaggctacaaatttaggggagaagattggcttgaaacacttcaagcctgtaaaacctctcggctgtggtgacactggcagtgtgcacttggttgagctacaaggaagtggtgaattatttgcaatgaaggccatggacaagtcagtgatgttgaaccgcaacaaggtacatcgagcttgtattgaaagagaaatatacgcactattggatcatccatttctcccaacattgtatacttcatttcagacgccaacacatgtttgtctcataacagacttttgtccgggaggagaactctttgcagtgcttgataggcaacccatgaaaattttcagggaagaatgtgcaaggttttatgctgcagaggttgtaattggtctcgagtaccttcattgcctaggtattatataccgtgatctgaagccagaaaacattttgctccaagcagatgggcacattgtactgactgattttgatctttcatttttgacgacttcaaaaccccacgtgataaaaaattccacatcattaaaacgaagaaggtcacaagaatttctccccccaacatttgtctcagaaccttccactccatcaaattcatttgttggtactgaagagtatatcgctccagaggttataacgggtgcagggcatacaagtgcaatcgattggtgggctctcggaattctattgtatgagatgctgtatgggcgtacacctttccgaggaaagaacaggaaaaagacattttataacatactgcacaaagaccttacatttcccagtagcattccggttagtcttgcagcaaagcaattaatccatggattacttcagagagatccttcaaatcgtataggttcaaatgctggtgcaaatgacatcaagcaacattccttttttcaagacatcaattggccactcatacgttgcatgagcccccctgaactagatgttcctctgaaactaattggcaaggaaactcaaccaaaagcgaagcctgatgaagatgttcccctaaatcttgatacattttaa

SEQ ID NO: 3753 - DNA, 2409 bp, Oryza sativa
atgtggttgctgccgctgatctgcttcgtcttggccttgctgctcgccgccggcgccagcggtggtggtggtgccgcggctggaggaggaaatggcggcggcggcragcgscktggggtatacgtggtgtacttgggcgccgtgccaccgcggacctcgcccaacatcctccagcagacccatctccgcctcatcggcgccgtgctcaaaagggggcagccagtggagagcgtggtggtgcagcagtacaagtacgccttctccggcttcgccgcgcggctgtcagcggcggaggccgccgcgctccgccggaagcccggcgtcgtctccgtcttcgccgaccctgtctaccacctccacaccaccaggtcatgggacttcctccagcagcagacgacggccgccgtcgacgtcaagactggcggctccgcccaccgccgccgccgctcgccccgcgcccgcgccgccgcagcatcagcgtcgacgtcgtcgtccccgacggccgacaccatcatcggcctcctcgactccggcgtctggcccgagtccccgagcttcgacgacgccggctttggccctgtccccgccaggtggaagggcgtctgcatggccggcgatgacttcaactcctccagctgcaaccggaagctgataggagcaaggtactacgatgtcggcggcgaggcgaagcggcagtcagcacggagcagcgggagctcgccgcgggacgaggccgggcacgggacgcacacctcgtcgacggcggccgggaacgcggtcaccggtgcgtcgtactacggcctcgcggcggggacggccaagggcgggtcggcgtcgtcgagggtggccatgtaccgcgtctgctccggggaagggtgcgccgggtcggccatcctcgccgggttcgacgacgccgtcgccgacggcgtcgacgtcatctccgtctccctcggcgcgtcgccctacttccgcccggacttctccgacgaccccatcgccatcggctcgttccacgccgtggccaagggcatcatggtcgtctgctccgccggcaacgcagggccggacgccgccaccgtcgtgaacgcggcgccgtggatccttaccgtcgcggcgagcacgatcgaccgctacttccaatcggacgtcgtgctcggcggcaacaacaccgctgtcaagggtggagctataaacttctccaacttgaacaaatcaccaaaatatccattgatcaccggtgaatcagccaagtccagctcagtttctgataccgagtcagcaagtcactgtgagccggggacgctggatgcgagcaagataaaagggaagatcgtgctgtgtcaccactcgcggaacagcgacacgcccaagacggagaaggtcggggagctcaagagcgccggcgcggttggcgccgtcctcgtcgacgaccttgagaaggccgtcgccaccgcctacatcgacttccctgtcacggagatcacctccaacgccgccgccgacattcacaagtatatctcctccaccagtgagcctgtcgtgaccatcacgccgacgatcaccgtgacggagtacaagccggcgccggtggtcgcctacttctcctcgagaggcccgtcgccgcagacgcccaacatcctcaagccggacgtggcggcgccgggggtgaacatcctggcgtcatggatcccgacgtcgacgctcccggccggcgaggagaagccgtcgcagttcaacctcgtgtcggggacgtccatggcctgcccgcacgtggccggggcggcggccgccgtcagggcgtggaacccggcgtggagccctgcggcgatccggtcggcgatcatgacgacggcggcccagctgaacaacgacggggcggccgtgacgaccgactcggggtcgccggcgacgccgtacgaccacggcgcgggccaggtgaacccggccgccgcgctggacgccgggctggtgtacgagctcggcgaggaggactacctccagttcctctgcgactacggctacgacgcgtcccagatcaagctggtcgccgcctccctccccggcggcttcagctgcggcgccggcggcaacgccagcgacagcaaggacctcatctccggcctcaactacccgtcgatcgccgtcacggggctcggcaaggccggcggcaccaggacggtgagccgcgtcgtcaccaacgtcggcgcgcagcaggaggcgacctacaccgtcgccgtcgcggcgccggccggcctggacgtgaaggtggtgcccggcaagctggagttcactaagagcgtgaagaagctgggtttccaggtgtccttctccggcaagaacgccgcggcggcggccaaaggggacctgtttgggtcaataacgtgtcgawtggaagcatacagttcgtag

SEQ ID NO: 3754 - DNA, 2964 bp, Oryza sativa
atggcgtggtcgaggattgcgaggggctcgcagctcacgcagccgctctcgaggattctcgccgagggcaacgcggccgccaccccggcggcgtacgcgctgcgcaatgcggcggccctgggccagcgcgcctcgtcggcgtcggcgtcgtcgtcgttccacagcctcgcgttggcggggcttgctgacaagtacgcggccggcgctgccgggcggctccagccgaacaggggggatcagcacgamgtcacctgsgctgsgccccgcggcggaggcggcggccagggtgtggagtgctcggacgccgccgacgaggcggcggcggcggcggcggtgccggacctcgggcccacgcggccgggggaraagccgcgcgtkgtggtgctcgggacggggtgggcggcgtgcaggttcctcaaggacgtggacacgcgcgcctacgacgtggtgtgcatctcgccgcggaaccacatggtgttcacgccgctgctggcgtcgacgtgcgtcggcacgctggagttccggtccgtcgtggagcccgtcagccgcatccagtcggcgctcgccacccgcccgggctcctacttcttcctcgcctcctgcaccggcatcgacacggggcggcacgaggtgcactgcacggcggcggacggcgacgggctccccgccaacccgtacaacttcaaggtgtcgtacgacaagctggtgatcgccagcggctccgagccgctcaccttcggcatcaagggcgtcgccgagaacgccatcttcctccgcgaggtcagccacgcgcaggagatccgccgcaagctgctcaccaacctcatgctctccgagaatccaggcttgtcggaggaagagaagaagcgcctcctgcactgcgtcgtcgtcggcgggggtccgaccggggtggagttcagcggcgagctcagcgacttcatcacccgcgacgtgcgggagaggtacgctcacgtcaaggactacgtcaaggtcaccctcatcgaggccaacgagatcctctcctccttcgacgtcgggctgcgccagtacgccacggaccacctctccaagtcccccggcgggaggatcggcgtcgacgagtggctccgcgtgccgtcggtggaggacgtgttcgcgctgggcgactgcgccgggttcctggaagggacggggcgggccgtgctgccggcgctggcgcaggtggcggagcgggaggggaggtacctggcgcgggtgatgtcgaggatcgcggcgcaggatggcggcagggcggggcgcgcggtggggagcgcggagctcggggagccgttcgtgtacaagcacatcgggagcatggcgtcggtggggaggtacaaggcgctggtggacctgagggagaacaaggacgccaggggggtgtccatggccgggttcgtcagctggctcatgtggcggtcggcgtacctgacgagggtggggaggtggcagatctgcggttgcgtgacctccatcttggatctcggtgagctggggggactgttcttggaagtggttcctgggagcatcctgataatgtgggttggttcgattggagatgctgaagagtggtgggtttctgttgggtttaatgccgcagctggtttattaaacatgtctatgcaaaattctgaaagttcatctgccaatagttctagtcatgagctgccttcacaaacacgtaagagagcaaaagtgtgggaacattttgagcaggagcttgtcatgatagatggtcttccaaaagcacaatgcaaatattgtggcttaatgttgtcagcgactagaaaatcaggaactagccatctcataaaccatatttgcgaatcttgtccactagttgatggtgaagttagaaataggtttatatcaacagttaggaaacaacccgtggaaaattttgtgtttgatcctaaaaagactgaagagttgatgataaaatatttcatccatgctgagataccattccataaaattgaggatccctacttggatgattggatggcatccatgcagccaacttttaaacttgtgggtcgtcaatcaatccgcgacaagatttacaactattacaataggctgaaacaagaattgcatgctgaattagagaatcttgattcgcgtgtatgcctaacatcggacatgtggacctcaaatcaaaacctaggatacatggttgtcacagcccactatgttgatgctgaattcaaaatgaaaaagaaaattataagtttgaagcctgtgaagtatccacacactagctttgcaattgaagaagccatgatgagcgatcttttaaaacgattggctgctcctatgcacaccaagtttgcaaaatattgggatgaaaaattggcaaacaacttcaatttggcacttgtcattaccactgtgttagatccaagaaggaaaagagactatttggatttcttttatgagaaggtgtctccccatggttctaatgttgaaagtaaagtggactctattatagaggagatgaaatcatactttcatgtatatgaaggaattgcaagaagaaggggtgtatcctacatgtcacagtctagtgagagagttagtgttgtaggctcacctgttttgggaaaaagaaagctagagcatgaattcaccctcttcaagtcaaaccggaaggttgcacgtactcagaagtcagagattgatacatatttagaagaagtatgtgaggatgatagtgaggattttgatgttttggcatggtggaagaaaaattccaaaaagtttcctgtgttggcaattatggctcgagactttcttgcaattccacttagcaccgtgccctcagagtccgctttcagcagtggaggaaggattcttggagacacaagaagctcattgacaccagagatgctcgaggcacttgtttgtgccaaagattggctacatagagccaaaaaccagggggattaa

SEQ ID NO: 3755 - DNA, 1164 bp, Oryza sativa
atggcttcctygacccagggccaggtcatcacctgcaaagcggcggtggcatgggaggccaacaggccgatgacgatcgaggacgtgcaggtggcgccgccgcaggccggcgaggtccgtgtcaagatcctcttcaccgcgctctgccacaccgaccactacacctggagcggcaaggatcctgagggtctatttccttgcattcttggtcatgaagctgctggaattgttgaaagtgttggggaaggagtaactgaggtgcagcctggggaccatgtcattccttgttaccaagcagaatgcagagaatgcaagttttgcaagagtggaaagaccaacctctgtggcaaagttcgtgctgccacaggggtcggtgtcatgatgaatgatcgcaagagccgtttctcaataaatggaaaacccatttatcatttcatgggaacatctacattcagccagtatactgttgtgcacgatgtcagtgtcgcaaagataaacccacaggcacctctagacaaagtttgcctgcttggctgcggtgtttctactggcctcggagcagtatggaataccgcaaaggttgaagcaggttccatcgttgctatttttggacttggcacagttggacttgcagttgctgagggggcaaaatcagctggtgcttctcggattattggcatcgacattgatagcaaaaagtttgatgtcggtccagagatcaaacttattattatttgtttatttccgcccatatgcaccacaaatgtgttcttacaaattggatgctttgtcatagttgaccttacagacggtggtgtggactacagctttgaatgcattggaaatgtttctgttatgaggtctgcattggagtgctgccacaagggctggggaacctctgtcatcgttggtgtagctgcttctgggcaagaaatctctacacgaccattccagctcgtcactggccgtgtctggaagggaacagctttcggcggtttcaagagccgaagccaagttccatggctcgttgagaagtacttgaacaaggaaatcaaggtggacgagtacgttactcacagcatgaacctgactgacatcaacaaggcgtttgacctgctgcatgaaggtggctgcctgcggtgtgttctggcaactgataaatga

SEQ ID NO: 3756 - DNA, 2559 bp, Oryza sativa
atgctgggagggctcaaggacaagctgacagggaaaaatggaaataagatcaaaggcttggctgtgctgatgagccgaaaattactggatccaagggacttcactgcctcgctcctcgacaacgtccatgaggtctttggaaacagcatcacctgccagcttgtcagcgccactgttgccgaccaaaacaatgagggcagggggatagttggatcagaggcgaatctggagcaggggttgacagatttaccatcggtatcacaaggggagtccaagctcacagtgaggttcaactgggagatggacaagcatggtgtgccaggggccatcatcatcaagaaccaccacagtaccaagttcttcctcaagaccatcaccctccatgatgtccctggctgtgacactattgtgtttgttgccaactcctggatctaccctgttggaaagtaccactacaatcgtatcttctttgcaaacaattcttaccttcccagccaaatgccagaagcactgaggccataccgtgaagacgagctgaggtacctcagaggggaggacaggcaagggccgtatcaagagcatgaccgcatctaccggtacgatgtttacaatgacctcggtgaaccagacagggacaacccacgccctgtcctaggtggctcgcagaagcacccctacccgcgtcgtggccgtactggccgaattccgaccaaaaaagacccaaactcggagagcagattatcactgctggaacaaatttacgtgccaagcgatgagcgcttcgcgcacctcaagatgtcagactttgctgggtactcgatcaaggcaattgttcagggcatcttgcctgccattcgcacatatgttgatctcacacctggtgaatttgactcgttcgaggacatcttgaagctctacaggggaggcctgaagcttcccagcatcccagcactagaggagctgcgcaagagcttccctgtccaacttatcaaggacctgcttccggttggaggcagctacctgctcaagttccccaaacctgatatcatcaaagagaacgaggttgcttggaggacagatgaggaatttgcacgagagattctgctggaattcccaccaaaaagtactcttgatcctagcaagtacggtgaccagactagcacaatcaccccagctcacattgagaagaacctcgaaggcctcagcgtgcaacaggcactggatagcaacaggctctacattctggatcatcatgatcatttcatgccattcctcattgacattaacagccttgatggtatcttcacctatgccacaaggaccctgttgttcttacgtgatgatgataccctgaagccactagcaattgaactgagcttgccacacatcgagggcaacctaacatctgcaaagagcaaggtccatacacctgcatcaagtggcattgagtcttgggtgtggcagctggccaaggcttatgttgctgttaatgactccggttggcaccagcttatcagccactggctcaacacacatgctgtgatggagcccttcgtgatcgctacaaaccgccagctcagtgtgacacaccctgtgtacaagctcctccagccacactatcgcgacacgatgacaatcaatgcattggcacgccagacactcatcaacggcggtggcattttcgaacaaactgtctttcctggcaaacatgctctggcaatgtcttcagcagtttacaagaactggaacttcacggaacagggccttccggatgatctaataaagagaggcattgccatcaaggacccatcaagcccatccaaggtgaagctactgatcaaggactacccttatgcaacagatggcctggcgatctggcaagcaatcgagcagtgggtcactgagtactgtgccatctactacccaaacgatggtgtcctccagggagatgtggagctgcaagcatggtggaaggaggtgcgggaagtcgggcatggtgatctcaaggacgcggactggtggcccaagatgcagagcttgcctgagctcaccaaggcctgcaccacaatcatctggattgcatcagcactccacgcagccgtcaatttcgggcagtacccatacgcgggctatcttccaaaccgtccgaccataagccggcggccgatgcccgagccgggttccaaggagtacacagagctggacgagaacccagagaagttcttcatccgcaccatcaccagccaattccaaaccattctcggtgtctcgctcattgagattctatcaaagcactcagcggatgagatctatcttgggcagcgtgacacgccagagtggacatcagaccccaaggcactggaagcattcaagaggttcagcaggcagctggtggagattgagagcaaagtgttgaacatgaacaaggaccccctgctcaagaaccgggtcggtccagccaatttcccctacacactgatgttccccaacacgtcagacaataagggggcggctgaggggatcactgccaggggcatccccaatagcatctcaatatga

SEQ ID NO: 3757 - DNA, 1437 bp, Oryza sativa
atggagcttctctggctgctgctgttgctgctcatggcttcctcaacatcgtcgcggtccgaaatgaaggcgggagaggtaatcaggagaagccaattccctgaggacttcttcttcggcacagcttcttcggcataccagtatgaaggtgctgtgagggaaggtggcagagggcccagcatctgggacaccttcacccacaatcatccagagaagatagcaaatggaagcaatggtgatatagcaatagattcctaccaccggtacaaggaggatgttggaatcatgaagggtttgggcttgaacgcgtatagattttcagtttcctggccgagaattcttcctagtgttgaaccgtttgtgaccctttttcactgggactctccacaagctttagaacaacagtacggtggattcttgagtaacctcattgtggaagacttcagggactatgcagacatctgctttagggagtttggtgacagggtaaaatactggattacattcaatgagccttggagtttcagtattggtggctattccaacggcatattagcacctggaagatgctcctctcagggaaagtcaggttgcagcaagggagactctgggagggagccttatattgtagctcacaatcaacttttggctcatgcagcagtagttcagatttacagagagaaataccaagggggacaaaargggaaaatcgggattgctattgttagcaattggatgattccctatgaagattctaaggaagacaagcatgctaccaaacgtgcattggatttcatgtatggatggttcatggatcctttaaccaagggagattatccagtcagcatgagaacattggttggtaacagattaccaagattcacaaaggagcagtcaaaagctataaatggatcattcgacttcatcggtctcaattactatacagcaagatatattcagggtactaaacaagatagtaacagtcacaaaagttacagcactgattcactgactaatgagagagtggaaagaaatggaacagatattggtccaaaggctggttcatcttggctctacatctatccaaaaggaatagaggaactattgctatacaccaagaggacatacaacaaccctactatctacatcacagaaaatggtgttgatgaggttaacaatgaaaatttatctcttaaggaggccttaattgacactaccagaatagagttctaccggcaacacctattccatgttcagagagccctaaggcaaggagttgatgtacgaggatactttgcatggtcactgttcgacaatttcgagtggatggatggttacagcgttcgattcggcattaactacatcgactacaaggatggactgaagagatatccaaagcgatccagccaatggctacagaatttccttcataactga

SEQ ID NO: 3758 - DNA, 2967 bp, Oryza sativa
atggcgaggcggtcctgcttcttcttcctcctcccgctcctggttgcggcgctcgcggggagcccggtggtcacggcccagcggaatgcgctgccggcggcggcggcggcggcggcgagcgtccgggtcggggtgatcctgaacttgacgtcggcggtcggggtgaggcggcgggtcggcatccagatggcggtggaggactactacgccgcgaaccccgggtcggcgacgagggtggagctccatttcagggactcggccggggacgtcctccccgccgcttccgccgcggtggacctgatcaagaatgtgcaggtgcaggccatgatcgggccaccgagctcggcagcgaccgagttcgtcgcccacatcggcagccactcccgcgtccccgtgctgtcctactccgccacctcgccgtcgctgtcccccgcgcagacgccgttcttcgtgcgcgccgccgtcaacgactccttccaggccgcgcccgtcgccgccgtcctcgacgccttccgctggcgcgccgcggccgtcgtgtacgaggactcgccgtacgggagcggcatcctcccggcgctcgccgacgcgctgcagggcgccggcgccaagatcatggaccgcacggcggtgcccgtcgacgccaccgacgaccgcctcgacgcgctgctgtaccgcctcagggcgatgccgacgcgcgtgttcgtcgtgcacatgctccacaacgtcgccgggaggctgttccgccgcgcgaagatgctcggcatgatgtccgacggctacatctgggtggccaccgacggcgtcgccacgttcatggacaggttctccccggaggaggtcgacgcgatgcagggcgtggtcagcctccggccgtacgtgcaggagaccgacgccgtcaagaacttctcggcgcggttcaaggcgaggctacgccgggatcaccccaccgtcgacgatgtccgtgagccgaccgtcctgaggttctgggcgtacgacacggcgtgggcgatcgccgcggcggcggagtcggccggtgtcgccggcccggcgttccagacaccgcagacgagcgcgccactgacggacctggaccggctcggcgtgtcggccaccggcacggcgctcctcaacgccgtcctgagcacgacgttcgacgggctcgccggcaagttcaggctcgtcgacgggcagctccagccgccggcgtacgaggtcgtgaacatcatcggcaagggcgccaggacggtcgggttctggacgccggagttcgggatcacgcaagacctgaacgccggcagcgccaagacgctgaggcaaatcctctggcccggcgagccgcgcgacacgccgagaggctggaccgtgtcgccgagcgggctgccgctccgtgtcagcgtgccgacgaagcggggcttcacgcagttcgtcgacgtcggcaacgtcacggcgaccgggcggcgaaacatcaccggctactgcatcgacgtgttcgacgaggtcatgaagattatgccctatccggtgagctacgtgtacgacccttaccccgatagcccggaatcttacgagaagctcgtcgaccaggtgtcgtcacagaaggcagatgcggtggtgggggatgtgacgatcacggcgagcaggatggaggaggtggacttcacgatgccgttcacggagtcggggtggtcgatggtggtggcggtgcagaaggagacgagcacgagcatgtggatcttcctgcagccgctcaccaccagcctctggctcgccagcctcgccttcttctgcttcaccggcttcgtcgtctgggtgatcgagcaccgcatcaacgaggagttccgcggcacgccatggcagcagttcggcctcatcttctacttctccttctccaccctcgtcttctcccacaaggagaagctggagagcaacctgtcgaggttcgtggtgatcatatgggtgttcgtggtgctgatactgacgtcgagctacacggcgagcctgacgtcgatgctgaccgtccagaagctgcagccgacggtgaccgacgtgagggagctcctgaggcgaggcgactacatcgggttccaggaggggaccttcatcgtgccggtgctcgagaagatgggcttcgaggggaggatgaggagctacagcacggtggaccagtacgccgacgcgctgtccaaaggctcggcgaacggcggcgtcgccgccatcttcgacgagatcccctacctcaagctcttcctctcgcagtactgcaacggctacaccatggtcggaccaatctacaagaccgacggcttcgggttcgtgttcccgagagggtcgccgatggtggcggacgtgtcgcgggcgatcctgacgctggcggagggggagaagatggcgcagatcgagaagaagtggttcggcgagcccggcgcgtgccagagccagggcagcgccgtcggctcgtcgaacctcagcttccggagcttcggtgggctgttcctcatcaccggcgtggtcaccagcgccatgctcctcatctacctcgccgtcttcttctaccgcgagcgcgacgagctccgtgcggcggaggcggccgccgccgcttcggctccggctccggctccgggaaccggttccttcgggggcttccccccttgggcgcggcactacgaccagaaggacctcaagtccccgacgttcaagaggaggtggagcgacgagtccgtgaggaatggcagcgagtacgccgcgagccggacgccgaggtggggcgacgagagcccgtgcaacgtcgccggcgccgccgacgccgacgccggacggatcccggaggaagtcgtcggcggcatgagcccgttcagcatctccacgagctcggaggagaggaacggcgccgtgtctccggcggcggcggagttcgataactcgtccgatcgggcagcggtggtggcgggaacatctcaaccgcggtag

SEQ ID NO: 3759 - DNA, 1332 bp, Oryza sativa
atggagcgagcggaggagacgccgagggcgccgtcgacggcgccgtcggcgagggtgtcgatctgggagtcggtgcgcgcgtgcggggtgtgggggaaggaggtggacaaggccgagctgcggagscaggtcgtcatgccgctgtacgcgcggcgtgcggtcgcggccgccgtgaaggccaaggacgaggccgtcggcgtggcggcggcggcggagaggggcgaggagggggaggtggaggtggaggtggaggcggccgtgacgccggtggtggtgttcgtcaactcgcggagcggcggtaggcacgggcccgagctcaaggtgcggctccacgagctcatcagcgaggagcaggtctttgatctctctgtcgtgaagccttctgatttcattaactacgggttgggttgtttggagaaattggccgaacaaggtgacaattgtgcggagaccattcgaaaaaaattgaggattatggttgctggtggtgatggcacagttggttgggtacttggctgtctcacagatctttataggttgaaaagagaaccagttccacccacagtgttaactaagcttttgagggaagctgtgaagcgttatctcagcaaggcagctacagctcccacctgcagtcttgacagttggcaagctgtagttatgatgccagatggagagataaaagagttgccatatgcacttaagaaaacggaacctgcagactgcttggaactttgccaggagaatggcactgagttacctgagaaagcttcttgctataaaggagtattctacaactaccttagcattgggatggatgcccaagttgcttatggcttccaccatcttcgtgatgaaaagccatatcttgctcaagggcctgttgcaaataagttgatatatgctggttatagctgcacacaggggtggttctgcacaccttgtacagcaagccctcagttaagtgttagatccctggtggtcttaaatttatacaactacggcagtggaaggcatccatggggtgatcttaaacctgattaccttgaaaagaaaggttttgtcgaagctcattccgatgatggattgcttgaaatattcggtctgaaagaaggttggcatgcttcattcgttatggctgagctaattaaagcaaagcacattgctcaggctgcagccatcaagtttgaaatgaggggtggccaatggaatcgtgcgtatgttcagatggatggagagccatggaaacaaccactcctacaggagcagtcaaccattatcgagataaacaaagttccttacccttctctgatgataaatggggagcaatga

SEQ ID NO: 3760 - DNA, 5259 bp, Oryza sativa
atggcggaatcaggccaatcgattgcgagtgatgtgactgcactgatcggcaatactcccctggtgtacctgaacaaggtggtggatggatgtgaggcccaaatcgctgccaagcttgagatcatggagccctgctccagtgtcaaggataggattggttatagcatgattacagatgcagaagagaagggtctcattactccaggaaagagtgttttgattgagcctactagtggaaatactggtattggccttgctttcatggctgctgccaagggttataagctaatcctgacaatgccagcatccatgagcatggaaaggaggatcattcttaaggccttcggtgccgagttggtccttaccgatccacttctgggcatgaaaggtgcaatccagaaggcagatgagctggcagcaaagatgcctaactcttacattctccagcagtttgagaaccctgcaaacccaaagatccactatgagacaactggacctgagatttggaaggccactgctgggaaagttgatatccttgtctctggcattggaaccggtggtacagtaaccggaacaggaaagtacctcaaggagcagaaccctgagatcaagatctatggtgttgaaccgacagaaagtgcaattttatctggaggaagacctggtccacacaaaatccaaggtataggtgctggttttgttcctggtgtacttgatgtcaatctcctggatgaagtggtccaagtctcaagtgatgaagccatcagcatggcgaagcagctagcgttgaaagaagggctgctggttgggatctcatctggtgctgctgcagtcgctgccatcagggtcgcgcagcggcccgagaacaaagggaagctcgtagttgtggtcttcccgagcttcggtgagcgctacctgtcgtctgtcctcttcgaatcgatcaagagggaggccgaaaacatggggacgccggtgaacatcatcgtcgggtcgcatgtctgggcggaggatcccgacgacgcgtggatcgacggggaggtcgtcgagatcaggggcggcgacgccaccatcgtcagcaccgatggcaaaacgattgtggcgagcctcgcaagcatttaccccaaggatacggaagcgccacctgcaggagttgacgacatgacgaagctggcttacctccatgaacctggagtcttgcataacctcgcttgtcggtacggtattaacgagatatatacatacaccggcaatatcttgattgcagtcaaccctttccggaggctgcctcatctgtatgacgtgcacatgatggagcagtacaaaggtgctgcatttggggagctcagccctcatctgtttgcgatcgcagatgcttgttacagggcaatgatcaatgaacaagggagccaatcgatattggtgagcggtgagagtggtgctggtaagacagagacgaccaagatgctcatgaggtatcttgcattcatgggaggaaggtctggaacagagggtcggactgttgaacagcaggttttagagtctaatccagtactggaagcatttggaaatgcgaagacggtgaagaacaacaactcgagtcgattcggtaagtttgttgaaatccaattcgacaaatatgggaagatatccggggctgctgttcgaacgtacctccttgaaagatcgcgagtatgtcaggtctctgatcctgaaaggaactaccattgcttttacatgctatgttctgcaccaccagaggatgtgaaaaagtttaaggtgggagacccaagatcattccattatttgaaccaaacaaactgctatgaagtagctaatgtggatgacgcaagagaatacctagaaacaagaaatgctatggatgttgttggcattggtcaagaagagcaggatgcaatctttagagtagtagctgcaatccttcatctgggaaacatcaatttctcgaaggggcaagaaattgattcatcgaagctgagggatgagaaatcagtctatcacctgaaaatagtagcagaacttctaatgtgtgatgaaaaggctcttcaagattcgctttgtgagcgtgttattgtaacacctgatggaaatatcacaaagccacttgatccagattctgcagcactgagtcgtgacgccttagcaaagactgtgtattcacgactgtttgactgcttcgaacaactatgtatcaacttgacaaacgagaagttgcagcagcactttaaccagcatgtattcaagatggagcaagaagactatacaagggaggaaatagattggagctatgtggaatttgtggacaatcaagatgtgctggacttaattgagaaaaaacctggaggaataattgcactactggatgaagcatgcatgtttccaaagtccacacatgaaacatttgcccaaaagatgtatcaaacatacaaggcacataagcgcttcagcaaacccaaacttgctcggacagcctttacaatcaaccactatgcaggagatgtcacatatcaagctgatcagtttcttgacaagaacaaagactatgtggtggcagaacatcaggctctacttaattcctcaaggtgcccttttgttgcaaatctctttcctccattacctgaggaaacctctaaacagtccaaattctcttccatcggtactcgctttaagcaacaactacaagctctcatggaaacactgagtacgacagaaccacactacattagatgtgtgaaacccaatgctgtacttaaaccaggaatctttgagaatttcaatgtccttaaccaattgagatgcgggggtgttctggaagcaatccggatcagttgtgctggctatccaacaaaaaggacatttgatgagttcattgatcggtttggaatgcttgcagcagagcttgtcgacagctctgatgagaaggctgcctgtgcagcaatatgtgataaaatgggtttgaagggatatcagataggaaaaacaaaggtattcctaagagctggtcagatggcagagctggatgctcgaagagcagaagtattggccaatgctgcacggcttatccagagacgtataaagacacatcttacaagaaaggaattcatcaacttaagaaaagcctcaattcagtctcagaagttttggagggcacgcctagctagaatatttttcgagcatatgagaagaaatgctgcttcaatcaggatacagaagcatgcacgtactcattcagccaggaaatcttaccttcaaatgtatgagtcagccatagtaatacagacaggattacgtgcaatggcggcttgcaatgaacacagattcagacgagagaccaaagcttccataataatccagactcgatggcgccaacacaaagcttatgttgattacaaaaagcmaaaaagagctactttgattcttcagtgcctgtggagagcacgtattgcaagaaaggaacttcgaaagctcaaaatggaagcaagagagactggcgcactgaaagaagcaaaagacaaacttgaaaaaagagttgaggaactcacatggcgattagatgttgagaaacacttgaggattgaccttgaagaagccaaggggcaagagatttcaaacttgaaatctgtgttgcaagaaatgcaagaaaagctttcggaagcacatgcagcaatagaaaaggagaaagaagatgcaaaactagcaattgaacaggcaccaccaaagatagtagaggtgccggtggtggacaatgcaaaagttgagctgctgactagacaaaataaggaacttgaggatgaacttgttacatttagaacaaaggctgaagatctagaaaagagacttctagaggttcaaaaggagtccgatgaattgtcgagggaaattctagaaaaggactccaaacttaatcaacttcaggagatgatagaaaggcttgaaacaaatttatccagcttggaatctgaaaaccaggtcctacgtcaacagtcactacttgcatctgcagatgacgataaatcaaagcaaatagagagtctggaaagcaagattgccatcttggagtcagaaaaccagttgctccgcagtaaatcttctgtagctgttcaagcagtaattactcctgaagtgattcagccatcagcaatggaggaggaggtggttgttcctcctataaagaatttaagcaaacaaaagtcgctcacggatcgacaacaagaaaatcatgatgtcctgatcaaaagtctggctgaagacaggagatttgacaacggcagaccagctgcagcatgcatcgtgtacaaatcactcctgcactggcactcatttgaagcagagaagactaacatatttgaccgaatcatccatacaattagcacgctgaaagttctacagaactggcttattggctgtcgactacatcaactcttctctacctattacaaaatactcttaagtctagcagttcagcagaatgctcgatcgtcgtcattaggatcaggcatatcaagtggatatagtggaatggttggaaggcctgacactgcatcaaaggtatgcaccccagacatttccatgccaatcgtgaatataaggcgatacaatttcgttaacaatttgtcaatttcacaggctccaagggctgttcgtgtacctccaatgataatcaggaaaacattcaatcaagcatttgcctttatgaacgttcaactcttcaatagtttgctactccgtcgagaatgctgctcctttagcaatggggaattcttaaaggctggtttacaagaattagagcagtggtgctctgtaacaactgaagagtatgcaggaacgtcttgggatgaatttcagcacatcagacaggcagttggatttctggttttgcatcagaagacacataaaaccttggaggaaatcactgatgagctttgcccagttttgagcatcactcaaatatatcgcattggaacaatgttctgggatgataaatacggtgcacaaggtctatctcaggaggtcattggaaagatgagaacaatggccactgatgactcaataactactccaaatagttcgttcttgttagatgacgactcaagcatacctatatcgttggatgatatagcacgactgatgcttgacatagacctatctgacgtggaaccaacaccactgctcaggcagaactctcagttccactttctactgcagcaccacgccacacagactgatggcattgtttgttaa

SEQ ID NO: 3761 - DNA, 1092 bp, Oryza sativa
atggcgtcctctgacgacggcgtcgtggccctctacggcggcggcaaggtctcctgcaagccccccgccgccaccttctccgtcaaggtgggccttgcccagatgctgcgcggcggcgtcatcatggatgtggtcacccccgagcaggcacgcctcgccgaggaggccggcgcctgcgcggtcatggcgctggagcgcgtccccgccgacatccgcgcccagggcggcgtcgcgcgcatgtccgacccggcgctcatccgcgacatcaagcgcgccgtcaccatcccggtcatggccaaggcccgcataggccacttcgtggaggcccagatcctggaggccatcggcgtggactacgtggacgagagcgaggtgctcacccccgccgacgacgcccaccacatcaacaagcacaacttccgcgtccccttcgtctgcggctgccgcgacctcggcgaggccctccgccgcatccgcgagggcgccgccatgatccgcaccaagggcgaggccggcacgggcaacgtcgtcgaggccgtccgccacgtgcgctccgtgatgggcgaaatccgcgcgctccgcaacatggacgacgacgaggtcttctcctacgccaagcgcattgccgcgccctacgacctggtcatgcagaccaagcagctgggccgcctycccgtcgtgcagttcgcggccggcggcgtcgcmacccccgccgacgccgccctcatgatgcagctcggctgcgacggcgtcttcgtcggctcgggcatcttcaagagcggcgaccccgcgcgccgcgcccgcgccatcgtgcaggccgtcacccactacagcgatccggagatcctcgccgacgtcagcgctggcctcggggacgccatgtcggcatcaacctcaacgaccaaaatgtcgagcgctacgccgcccgctcccactgagcagctcctgctcctgctcctgctccctctctcctcttctctctcagctccgcaccggtggatggtgaatgtgaatcaacaatcgtcttctctcactaattttctcctcacaatggactggagaatggatgattgttgctgccattattattag

SEQ ID NO: 3762 - DNA, 720 bp, Oryza sativa
atggcggcgttggatcgaatgcggcagggaggaggaggggagtgcgacggggcggagaaccagcggtggccgccatggctgaagccgctgctggcgacgagcttcttcggccaatgcaagctgcacgcggactcgcacaagagcgagtgcaacatgtactgcctcgactgcatgaacggcgcgctctgctcgcagtgcctctcctaccaccgcgaccaccacgccatccagatacggaggtcctcctaccacgacgtgatccgggtgtcggagatacagaaagtgctggacatcaccggcgtgcagacgtacatcatcaacagcgcgcgcgtcgtgttcctcaacgagcgcccccagccgaggcccggcaagggcgtcaccaacacctgcgaggtctgcgagcgcagcctgctcgacaccttccgcttctgctccctcggctgcaagatcgtcggcacctccggcgactaccgcggccggaagaggcacgccggcggcggcatcaagaagacgaagaagctgcacaagggcgcggcggcggtgccgtcggactcggacgactcctccacgaccacaagcggcgggagcgacaagagcagcgtggtgcagagcttcaccccgtccacgcctccggcgaccgccaacagctaccgcaccggcaagcgtcgcaagggcgtcccgcaccggtcgccgttcggcagcctcatggtggagttttaa

SEQ ID NO: 3763 - DNA, 597 bp, Oryza sativa
atggcttcgtcgctggccctggtagctctgctcctcgtgagctgcgccgtggtggcggcggcggcgaccaagtacaccgtcggcgacacgtccggctgggcgatgggggcggattacaccacctgggccagcgacaagaaattcaaaatgggcgataccctcgtgttcaactacgccggtggggcgcactcggtggatgaggtgagcgcagcggactacgctgcgtgcaccgctagcaacgcgctccagagcgacagcagcggcacgaccaccgtcaccctcaagaccgccggcaagcactacttcatctgcggcatcgccggccactgcagcaacggcatgaagctcgtcgtggacgttgccgcggcctctccagccccagccccaaaagccccgtccaccacaccgacgactccatctacgacaccagcgacaccggcgtcccctggcacaagctccggtctgacgcccacaaccccagcaacggtgctcgcgccgcccgccaagcagtccgccggtgcagctgggctcagggccaggtcatgggctatgctgggcctggcaggacttgccgccgtgcaactgggcctcttctag

SEQ ID NO: 3764 - DNA, 1530 bp, Oryza sativa
atggacgagctcttctaccagtcgctgctgctgtcggtggcggccgtgacggtgctgcagctgctgaagctgctcctggtgcggcatcgccgtccccggacgccgccggggccgtggcggctgccggtgatcggcagcatgcaccacctggtgaacgtgctcccgcaccgcaagctgcgggagctcgcggcggtgcacggcccgctgatgatgctgcagctcggggagacgccgctggtggtggccacctccaaggagacggcgcgcgcggtgctcaagacccacgacaccaacttcgcgacgcggccccggctgctcgccggcgagatcgtcggctacgagtgggtcgacatcctcttctccccctccggcgactactggcgcaagctccgccagctctgcgccgccgagatcctcagccccaagcgcgtcctctccttccgtcacatcagggaagacgaggtgatgatgcgtgtaaacgagatccgcgcggcggggccgacgacgccggtgaacctgagcgtgatgttccacagcgtcaccaacagcatcgtgtcgcgggcggcgttcgggaagaagaggaagaacgcggcggagttcctggcggccatcaagtccggcgtcggcctcgccagcggcttcaacatccccgacctcttcccgacatggacggggatcctcgccacggtcaccggcatgaagcgcagcctccgggccatctacacgacggtggacggcatcctcgaggagatcatcgccgagaggaagggcatccgcgacgagaagatcagcggcggcgcggagaacgtcgacgagaacctcgtggacgtgctcatcggcctccaggggaaaggtggcttcggattccaccttgacaacagtaaaatcaaggctatcatcctggacatgtttgccggaggaacggggacatcggcgtcggccatggagtgggggatgtcggagctgatgcggaacccctccgtgatgaaaaaactacaagcagaaatccgcgaagtgctccgagggaaggcgacggtgaccgaggccgacatgcaagcaggcaacctccgttacctgaagatggtgatcagggaggcgctacggctgcacccaccggcgcctcttctagtgccgagggagagcatcgacgtgtgcgagctcgacgggtacacgatccctgccaaatcacgcgttatcatcaacgcgtgggcgataggacgcgaccccaagtactgggataatcctgaggagttcaggccagaacggttcgaggatggaaccctcgacttcacgggaagcaactatgagttcatccctttcggctctggccggaggatgtgccccggtttcaactatggcctcgcaagcatggagctcatgtttacgggtcttctctaccacttcgactggtcgctaccggagggtgtaaatgaggtggacatggcggaggcgccaggcctcggggttcgccgccgctcgccactgatgctgtgcgccaccccgtttgtccctgtggtctctgccaattag

SEQ ID NO: 3765 - DNA, 1095 bp, Oryza sativa
atgggagtttaccttagtacccccaaaaccgagaagctatctgaagatggcgaaaatgataagcttaaatttggactctcatctatgcaaggatggcgtgcaactatggaggatgctcattcagctttgctagatatcgataatgacacatcattctttggtgttttcgatggacatggaggaagagtggttgctaaattctgtgcaaaatatctgcacagagaagttctcagaagtgaggcctattcagcaggtgacctgggcaatgcagcccataaagctttctttagaatggatgagatgatgcgaggtcaaagaggctggcgagaactacaagcacttggagataagataaaccagattagtggcatgatagaaggcttgatctggtctccaagaggcagtgattcaaatgatcaacacgatgattgggcttttgaagagacatatggggccaacactctgactttgctgggcccaacctgtgggagcacagcttgtgttgcaatagtaagaaatagccaacttgttgtcgcaaatgctggtgattcccgctgtgttatctcaaggaatggtcaggcatacaatttatcaagagaccacaaaccagagcttgaagcagagagagaaagaatactaaaagcaggagggtacatacagatgggacgagtaaatggaactataaacttgtcaagggcaattggtgacattgaatttaaacagaacaagttcttgtctcctgataagcaaatgttaactgcaaaccctgacatcaacacagtggagctttgtgatgatgatgactttcttgttttagcatgtgatggcatctgggactgcatgtctagccaacagctggttgatttcatccacgaacacataaacacagagagcagcctttctgcggtatgcgaaagagtgctagatagatgcctggctccatcaactttgggtggagaaggatgcgacaacatgacaatgatcctagtgcagttcaagaagccaattagtcagaacaagaatgtcagtcctgcggaacaatcagctgccgacaaacaaccaactggagacacacattggtctgagattcagtga

SEQ ID NO: 3766 - DNA, 687 bp, Oryza sativa
atggcggatccgttcccggcggcggcgcgcggcggcggarcagggtggtggcaccgcggggcagctggtgtcgacgccgtccaggaggaggaggatgaggcggcggcggcggcgagggatgcggtcgtgcggtgtgacgggctcagcgcgtcggccagctcgtcgttcccgtcgtcggtgacgggggtcaccggcgatgggagcgtgtccaacgcccgcgcggtgctcccggcggcaggcgacggcgacaagccgccaccaatgcagtctgcttcagattatgcttctgatggccgcctcaaacgcagcagcgacgacgacggcgagcgctgccactgctccaagaaaaaacggaaggcgtcgtggagggcgaggcggcgcatccgcgtgccggcgatcagctcacggaacgccgacatcccggcggacgactattcgtggcgcaagtacggccagaagcccatcaaaggctcgccttatccacgcgggtactacaagtgcagcacggtgcgcgggtgcccggcgccgaagcacgtggagcgcgaccccggcgagccggccatgctcatcgtcacctacgacggcgaccaccgccacgggaacccggccatcgacgtcccgatgaggcggcaacgacgacggagcacaggacgactgaccaaactactggaagattgctctagatag

SEQ ID NO: 3767 - DNA, 540 bp, Oryza sativa
atggcgaccttggcgcgcgtctccctcccctctgtcctcctcacgctgcggcatggcgcaaccacccagggcttcgcggcggcraggccggcggcggtagtggcaaagaggttgctcggatccgtcagtgtgacggcgcagcagagtgtcccaagatgcggcggcgccgccraggccttgggcscggacatggcggtkccgcgktcggtgccggtgcgcgtcgcccacgagctgcagcaggccggacaccgctatctcgacgtcagaaccgagggtgagtttgcaggtgggcatccagttggagctgtaaacatcccatatatgtacaaaaccggctcaggactgacaaaaaacacacattttcttgagaaagtgtcgactacctttgggaaggaggatgagatcatcgttggatgccaaagtggcaagagatccctcatggcagcatctgaactctgctctgctggttttactgctgtcaccgacatcgccggtggattttctgcctggaaggagaatgaactcccaaccaacaagtga

SEQ ID NO: 3768 - DNA, 1494 bp, Oryza sativa
atggaccacggcggtcaggtctctcccgtgccggcgacggcgacggcgccgcggaaggtcaggagagaacacatgaggctgggggtgtaccacgacgtgctgcagcggctcagggacgccggcgcgcccgaggccctcgcgccggacttcgccgagaagctctggacgcacttccaccgcttcaacgccagttatgccatggatgtcaatgttgagagggcagaagacgttctgatgcacatgaagctgcttgagaaggctatccatcctgaaaatcagcctgccttctcagtgagaattgttcaggttcctctagatattgatgcgagtgaagccgattcacagtcaaacatcactgaagatgacaactgtcctacgccaagaacaccagctgaacaccctgcacctatttttggctctaccacagcccttaaggctcttgttcgtcaagcaagcagcaagaacctcctggatgacaaccaagacatagatgctattctcagacccatgcatgagatcacctttgcatctgatgacaaaccaaagggccttactcaactgtcttcacttctaggcaatctcaatcttgatatcaaagaagtacatgcactttcaacaaatgatggttacttcttagatattttcatcgtaatcggatgggatcacaaggaaacccaacttctcgaagaagcgttggagaaggaaattcacaattacgaaccacagatgccctcaaaatcttcttgctggcctcctgaattagcaggcaagcagtctttgattaactcgcaagtcaaccatgttcagatacctaaagataacacagatgaatgggaaattaacttcgacgtattggatattcaagagaaagtggcatctggaacgtatggtgatctctatcgcggtacatattttggtgaagatgtcgcaattaaggtgctcaagtcagatcgtcttaatgagaacatgcaggaggaatttaacgaagaagtattcatcatgaggaagattcgtcataagaacattgttcgatttcttggggcatgcaccaaatccccaaccttatgtattgtcacagattttgcccatttatatgtgatgcttatcaaggttgctgattttggtgttgcacgtgtaaaagctgaatcagggattatgactgccgaaactggtacatatcgttggatggctcctgaggttattgagcataagccatatgattcaaaggctgatgtctttagctttggtgttgttttgtgggagctacttacgggaaagggtttaagaccagttattcccaaggccacagatcctaaactcgcgctgttacttgagagttgctggcagcaaaatgctgtcaacagaccagactttgtacaaattttgcaaaagcttgatgaaattgctggggagcatggcattgatcttacccatccccataaagagaaggagaaaggaggcttctttacttttgggaagctactttctcgatag

SEQ ID NO: 3769 - DNA, 1143 bp, Oryza sativa
atggggagacattcctgctgctacaagcagaagctgaggaaggggctctggtcacctgaggaggatgagaagctcatgaaccacataaccaagcatggccatggctgctggagcaccgttccaaaacttgcagggcttcagagatgtggcaaaagctgcaggctgagatggataaactacttgaggcctgacctaaagagaggtgcattctctcaggaggaagaggacctcatcgttgagctccatgctgttctgggaaacaggtggtctcaaattgcaacacggctgcctggaagaactgacaatgagatcaagaatctctggaattcatgcatcaagaagaagctgcggcagaaaggcattgacccaaacacccacaagccccttgccgaggttgatcgaagcaaagcaactcccaccatcagcaatgacaggacctctgaatccagcgatgttgacccatctagtggcgttgctcttcacaacttgagccatcttctgagcgagacggcgcaatcatcagagctgctgccagtgaagcagctgttgtgctacaataatgattttaacagcatggacgttggaaacaggaattcactctggtataaccagaatgagtccagtagcagcacaatttccactgtgatgcccccagtttcaccatcaactctctcgacatcaacaggccttaatccatcaccagacaatgcaaactctcgaggcactggcatccacaattcccaattctattgggacaccaacaatcctagcagcagtagcagtacagggagtagtggtaacaacgggttgggattcgagctgcaaagcacaagctcccttttggagaccaacatattcccatggtcagatttagcaccagaaaaggatagccaagcacaactagaggaagaactcaagtggcctgacttgctccatggaacgttctcagagatgccagcgcccatgcagaaccttagccagtcactgtatgaagacgttgtcaaagcagagagccaattcaacatggaggggctctgtgcagcttggtctcaaaacctgctgccacagcaacatcttccagtagtatcagatatgtatgacaaggatttgcaaaggatgtccttgtcttttgagaatatctag

SEQ ID NO: 3770 - DNA, 426 bp, Oryza sativa
atggaggacgacaagagtaaggaggggaaatcgtcgtcgtcgtaccgcggcgtgcggaagcggccgtggggcaagttcgcggcggagatccgcgacccggagcgcsggggagcccgcgtgtggctcggcacgttcgacaccgcggaggaggccgcgcgggcgtacgaccgcgccgcattcgccatgaagggcgccacggccatgctcaacttcccgggagatcatcatcacggcgccgcaagcaggatgaccagcaccggctcttcttcgtcctccttcaccasgcctcttccggcgaactcctccgcggcggcgggccgcggcggctccgatcggacgacggacaaggtggagctggagtgcctcgacgacaaggtcctggaggacctcctcgcggagaccaactatcgtgataagaactactag

SEQ ID NO: 3771 - DNA, 4218 bp, Oryza sativa
atgagcttgtgtgggagcccaatttgctccgagcaagatgtggtctcatgtgctatgaaggaaacattggattcttcgacttgcgtgaatcatctggtggtgatttccattgttgcagtgctcactgttgcgcttgtacatcagttgctcatgaaaattccaaagagtagagcatctgcgcggcagcttgtcgcattcaattcactgctgcagttggctgctgtagtgttcactggctgcttgggtttgcttaatcttggcctaggactgtggatggtggggattagcttcaatcaggaaacctccatttaccggccgcattggtggcttgtgatcttggctcaaggattcagtttgatccttactagtttcagttttagcatcagacctcgatttcttggagctacatttgttcgattctggtcgcttttgcttaccatatgtgcagcattcatctgttgctgttcagttgtctacatggttggagagaaggagatcaccattaaagcttgtttagatgttcttttgctacctggagcccttatccttcttctttatgccattcggcacagccgtgatgaagagggttatgaaacaactgaaaatgctttatacatgccgctgaatacagagagggatcatgggacggctgattcagagagtcatgtaactccttttgctaaagctggatttttcagtgtgatgtcattttggtggttgaaccctttgatgaagatgggttacgcgaagcctctcgaagagaaagacatgccacttttaggctccactgatcgagcgcagaatcagtacttgatgttcttggagatgatgaatagaaagaagcagttgcagtcacatgccacaccatcagtattttggaccattgtttcttgccataagagtgggattctgatctcaggcttctttgcattgctcaaggttgttaccttatcctcaggcccattgcttctcaaggcactcatcaatgtatcgctgggggaagggaccttcaaatatgaaggaattgtgctagctgtgacaatgttcgtttgcaaattctgtgaatctttggctcagagacagtggtatttccgcactcggaggttaggcctccaggtgaggtcattcctgtcagcagctatttacaagaagcaacagaagctatcaaactcagcaaaaatgaagcactcttctggagaaataatgaactatgtgactgtcgatgcctaccgcattggggaattcccgtattggttccaccaaatttggacaacaagtgtccagctctgcattgctctggcaatcctttacaatgcagttggacttgcgacggtatcgtcgttggttgtcatcattattactgtactctgcaatgctccactggcaaaactgcaacacaagtaccagagtaaacttatggaagcacaagatgtgagattgaaggccatgtctgagtctttagttcatatgaaggtcttgaaattatatgcttgggaaaatcatttcaagaaggtcattgagggtttgagggaggttgagtacaagtggctgtcagcattcaaccttaggaaggcatacaacagtttccctgttttggctaaagttgctttcacccgggttgtaaaatttcttgatgctcctgagctgaatgggcaatgcaggaagaaatatatagcgggtactgagtatcccattgcgctaaactcctgcagcttctcgtgggatgagaacccgtcgaaacatactctgaggaatataaatttagtggtcaaatctggggagaaagttgcaatctgtggcgaggtaggatcaggaaaatcaacacttttagcttcagtacttggagaggtcccaaagaccgaaggcacaattcaagtttgtgggaaaatagcatatgtttctcagaatgcatggatccaaacaggaactgtgcaagaaaatattctctttggatctttgatggatgagcaaagatacaaagaaacacttgagaagtgctctttggaaaaggaccttgcaatgttgccacatggagactctactcaaattggggagagaggagtaaatcttagtggtggtcagaagcaacgtgttcagcttgctcgtgcactataccaaaatgcagacatctatcttcttgatgatcctttcagtgctgttgatgcccatacagcatcaagtctgtttaatgaatatgtcatgggagctctgtcagacaagactgttcttctagtgacccaccaagtggatttcctacccgtatttgattctattctgttaatgtcagatggaaagattattcggtcagcaccttatcaagatctattggaatactgccaggaatttcaggacctagtaaatgcccacaaagatacaattggaatttcagatcttaacaatatgcccctccatagagaaaaggaaatatcaatggaggagacagatgatattcatggcagcagatatagagaatctgtgaagccatcgccggcagatcagctgataaagaaagaggagagagaaataggggatacaggtcttaagccttatatcctgtacctgcgccagaacaaaggctttttatatctctctatctgtgttatttcccacataattttcataagtgggcaaatatcacaaaattcatggatggctgctaatgtccaaaatcctagtgttagtacactgaagttaatagtcgtgtatattgctatcggagtttgcacattgttcttcttgctatctaggtctttatccatcgtagtccttgggatgcagacttcaagatccttattttcccagctacttaactcactgttccgtgcacctatgtcattttttgattctactcctctaggaagggtattgagccgggtttcttcagatctgagtattgttgaccttgacgttccattcttcttcatgtttagcattagcgccagcttaaatgcatacagcaatctgggggtattggctgttattacatggcaagttttgtttatttcggtgccaatgatagttttggtaatcaggttgcagaggtactatttagcttcggctaaggaattgatgcggatcaatggtactaccaaatcttctctagctaatcacttaggtgaatcgatttcaggggccataacaataagggcctttgaggaagaagatcgtttctttgctaaaaatttggagcttgtggacaagaatgctggcccatgcttctacaattttgctgcaactgaatggttgattcaacgcctggaactaatgagtgctgcagttctttccttttctgctcttgtcatggtgattcttcctccaggaacttttagccctgttttctctattcaaaaccaatgcaaccttgcgaatcaaatcatttctgtggaaagggttaaccagtacatggacattacaagtgaagcagcagaagttatcaaagaaaatcggccagcaccagattggccccaagttggcaaggtggagcttagagatttgaagattaagtacaggcaagatgctccccttgtactgcatggaattacttgcacatttgaaggtggacataagattggtatagttggtcggacaggaagtggcaagacaactttgattggtggtttgtttcgtcttgttgaacctgctggagggaaaataatcatagattctgtggacatcaccacaataggcttacatgacctgcgatcacggttgggcatcattccacaagatccaacacttttccagggtactttaagatacaatctagacccccttgggcaattctcagatcaacagatatgggaggttcttgacaaatgtcaacttcttgagactgtccaggagaaggaacagggattggattcacttgttgtggaagatgggtcgaattggagcatgggtcaaaggcagctcttctgtttaggacgagcacttttgagacgatgccgtatcttagttcttgatgaggcgacagcctctatagacaatgcaactgatgctatccttcagaaaacaatcagaacagagttcaaagattgcactgttattactgttgcacaccgtataccaacagttatggactgcacaatggtccttgcaatgagcgatggtaaagtggtggagtatgacaaacctacgaagctcatggaaacagaaggttctcttttccgagagctcgtcaaggagtactggtcatacgcatcgagtggaaatgtttag

SEQ ID NO: 3772 - DNA, 1560 bp, Oryza sativa
atggcgggcggcgcgatggtccagacggtgggtggcaagacgtacccggggaagatgaccgcgttcgtgttcttcacctgcctcgtcgcctcctccggcggcctcatcttcggctacgacatcggcatctccggcggcgtcacctccatggactccttcctcagcgagttcttcccgtcggtgtacgcgcaggcgaaggcgagcaaggacaccaaccagtactgcaagttcgacagccagctgctgacgctcttcacctcgtcgctgtacctggcggcgctggcgacgtcgttcgtggcggcgtgggtcacccgggtgttcggccggaagtggtccatgttctgcggcggcgtcaccttcctcgccggctcggcgctcaacggcgccgccaccgacgtcatgatgctcatcctcggccgcatcctcctcggcatcggcgtcggcttcgccaaccagtccgtgccgctctacctgtcggagatggcgccggcgaacctccgcgggatgctcaacatcggcttccagctcatgaccaccatcggcatcctctccgccaacctcatcaactacgcgacgtcgagcatcgagggcgggtgggggtggcgcatcggcctcggcctcgccggcgtgcccgcgctcatcatcacgctcggcgcgctcgtcctcccggacaccccaaactccctcatcgcccgcggctacgccggcgacgccaagcgcgtcctcgtcaagatccgcggcacggacgacgtccacgacgagtacgacgacatggtagcggcaagcgaagaagccgcctcgatcgagcacccatggcggaacatcctccatcgcaagtaccgcccgcagctcaccatcgccatcctcatcccgtgcttccaacagctcaccggcatcaacgtgatcatgttctacgcgccggtgctcttcctcaccatcggcttcgccggcgacgcgtcgctcatgtccgccgtgatcacgggcctcgtcaacatgttcgccaccgtcgtctcgatcatctccgtggaccgcctcggccgccgcgtgctgttcctccagggcggcacgcagatgttcatctcccaggtggtggtcgggacgctgatcgcgctccagttcggcgtcgcgggcgtcggcgagatgtcgcggtcgtacgccatcttgctcgtgctgttcatctgcatgtacgtggccgggttcgcgtggtcgtgggggcccctggggtggctggtgccgagcgaggtgttcgcgctggagatcaggtcggcggggcagagcatcgcggtgtgcgtcaacatgatgctgacgttcgtcatcgggcaggcgttcctcaccatgctgtgccacctcaagttcggcctcttctacttcttcgccgggtggatgctggtcatgaccaccttcgtcgcgctcttcctgccggagacgaagggggtgcccatcgaggagatgaaccacgtctggagccggcactggttctggggcagctacgtcaccgcccacgacgtcgccggcgccggcgccggaggaggaggaaaccgcagaagccacaacgtctag

SEQ ID NO: 3773 - DNA, 948 bp, Oryza sativa
atggccaagctgatcctcgccaccttcgccgtcgtgttcctggcgctcgccgccacctccctcgcaggcgaccccgacatgctccaggacgtctgcgtcgccgattacaagtccctccgaggcccgctgcggctgaacgggatcccgtgcaagaggctggagaacgtgacggcgaacgacttcttcttcgacgggctgacgaacgccgggaacacgacgaacgcggtggggtcgctggtgacggcggcgagcgtggagaggctgccggggctgaacacgatgggggtgtccatggcgcggatcgactacgcgccgtgggggctcagcccgccgcacacccacccgcgcgccaccgagatcatgttcgtcgccgagggcaccctcgacgtcggcttcgtcaccaccgccaacaagctcttcacccgcaccgtcagcaagggggargtgttcgtcttcccgcgcggcctcgtccacttccagaggaacagcggcaacacgtcggcgctcgccatcgccgccttcaacagccagctccccgggacgcagtccatcgccgacacgctcttcggcgccgcgccgccgctgccgtcggacacgctggccagggcgttccagaaaaatgcttgtacgttgcaacaggccagtgcaagaacagggaatgccaagagtgaggtcttgatggctttcggargggttaatgactgcaaggatgacccaaaagcaaccgacaattatggatactatgacagaggaggcaagaggaacaaagttggcgaaaggcttgtaggcaggattctgtcgggaagaggcctggacacaaggaagattgtgaaggcaatgaaagcaaggaggtgtaagataaacaccacttttgtgacactggatgtgaaaccactgcagcaaccacgactatcagggacaacaatattgccaaatgctggggagtaa

SEQ ID NO: 3774 - DNA, 2304 bp, Oryza sativa
atgccgtcggtgacgtggggcgtgatccaggggaggaaggagcggctcgtctcccgcgtgctcgcgctcgacttcctccgctccgccggcgtctccgaccccgccggcgagctcgaggccgtcgagctcccctcctccctcgaggtgctccaggagcggctcgacttcctcctccgcctcggcctctccaccgacgacctctccgcctacccgctcctcctcgcctgctccctccgcaagaacgccatccccgtcctctcctacctcgagaagctcggcgtcacgcgcgcgcgcctcgccgccttcgtccgcgcctacccggcctgcctccacgcctccgtcgccgtcgacctcacccccgtcgtcaagtccctccgcggcctcgacgtcgaccgccaggacctcccccgsgtcctcgagaggtaccctgacatcctcggcctcaagcccgatggcaccatcagcacctccgtcgcgtacctcgtcggcatcgtcggcgtggcgccgcgcgacatcggccccatggtgacgcacttccctttcttcctcggcatgcgcgtgggcaccaccatcaagcctctgtgcgagtacatcacttctctcgggctgccaatgcggatcctcgcgaggattctcgagaagcggccatacattcttggctatgatcttgaggagacggtcaagccaaatgtggaggcattgctcagctttggcattcgaaaggagatgttgccgctggtgattgcgcagtatccgcctattcttggattaccgctgaaaacgaagttagcagcccagcagtacttcttcaacttgaagctccaaattgaccctgatgcgtttgcctgtgctattgagaaattgccgcagcttgtaagtttgcatcagaatatcatactgaagctggtggagtttctccgtgggcgagggattagtaatgaggatgttgcgcggatggtggttcgatgccctcagattttgttgcttcggatggagctcatgaagaacagtctttacttcttcaagagcgagatgaagcgcccaataagtgaattgttagattaccctgagtattttacttacagtttggagtcaaggatcaagcctaggtacatgagagtttcaactaaggggattagatgcagcttggattggttcctaaactgcagtgatcagagatttgaggaaagaatgagaggggattttattgaaggcgatgcaccaggaccctcctttacaatgggagggaagcttcagatgccaggcagccagttagtgtcggatgatgataatgcggaaagtgacgatgagatttggtggaggataatcccaaagatctttcgtgatgtgctcctgacagcatcatgcacgcaagctataccatcattatcggtaaatagctgcctggttatttgcatttgcaaactgaaattcgctaaccacgcaggcatcctcaactgcaagatgaaaaaggctttggcgttaatggaacattctcacaccaacagaggtcattggagtgctggcctaagcaacagctcgaagggattaacaaagctaaatgtgagggagttgagctgtccttttgcacagaatgagctctgtgccagtgactgttcaagcattgtaggaaagcaacgatgcagacagcttcgttggcagaagttcgcacaaagcatcatagggctcttaggtattgtacagaacattgttgaagaaaaactccaacaactcacccagttaatccagtcatcagataggagcaagatcaagcatcatgtcaagatcagtcaatcaagtcatctaattagaacccaaatcacattagaaaaaagatcagaatcgtgtgctaaggacatggaaacgcttgggaggaggaggagagtggccgtccttgcatggtgcaatgccattgcaatggcgctagctctagcgacaccggtggcggctgtcgctgccaaccacggcgacacggcggcggcgaaggacaatgtggccgtcgtcccgaggattgccgcctcggcggcggcggcggcgtcgagcgtgaacgtcacggccatctgcatggcgacgccgtacccgagcgcgtgcgagacggcgctctcgtcggcggcggcgcggggcgcggccaacgacccgttcgcggcgtcggtgcagttcgcgatgacccgcgccgagtcggcgcgcgcgctggcgcgcaaacctgtccggcgtcgtcgtcgaggccyacgcgtgggccgaccgamccggcwcgggaacgaatggcgcccgaagctggctccgaacttccagcyttsgaactag

SEQ ID NO: 3775 - DNA, 936 bp, Oryza sativa
atgggaggaggaggaggagttgaggcggattgcgacaggatcagggggccgtggagccccgaggaggacgaggcgctgcggcggctggtggagcggcacggcgcgaggaactggacggcgatcgggcgggagatccccgggaggtcggggaagtcgtgccggctgcggtggtgcaaccagctctcgccgcaggtggagcggcggccgttcaccgccgaggaggacgccaccatcctccgcgcacacgcgcggctcgggaacaggtgggccgccatcgcgcgcctcctccagggccgcaccgacaacgccgtgaagaaccactggaactgctccctcaagcgcaagctcgccgtcgccaccaccaccaccaccaccaccaccggcgccgccgccgcgccgggagtggtcgccgatgccgccgagctcgtcgagcggccgtgcaagcggttcagccccacgccggacagcccgtcggggtctggttccgggtcggaccgcagcgacctcagccacggcggcgggttcgggcagattttccggccggtggcgaggaccggcgcgttcgagcccgtcgactgcgccatcagccggcggcaggaggaggatcccttcacctcgctctccctctcgctccctgggacggatcagcggttcaaccacgacagcgcccacagccacttccaagaactcccgtcctccccctcgccgccaccaccacctccccccgccgccgccgcctcgacgacacagtacccgttcaccccggagttcgccgccgcgatgcaggagatgatccgcgccgaggtgcacaagtacatggcaagcctcggcgtccgcgccgggtgcggcaacgccggcggtgccgacctccacatgccgcagctggtggagggcgtcatgcgcgccgccgcggagcgcgtcgggaggatgcactga

SEQ ID NO: 3776 - DNA, 780 bp, Oryza sativa
atggctgctgctacttcgaccatgtccctgcttcctcccatcacccagcagcagcggtggcacgccgccgactccctcgtcgtcctcgcctcccgctgccacaactctcgccgccgccgccgctgccgctacgtcgtgccgagggcgaggctgttcgggccggcgatcttcgaggcgtcgaagctgaaggtgctgttcctgggggtggacgaggagaagcaccagcacccggggaagctgccgcggacgtacacgctgacgcacagcgacgtgacggcgaggctgacgctggcggtgtcgcacaccatcaaccgggcgcagctgcaggggtggtacaacaagctgcagcgggacgaggtggtggcggagtggaagaaggtgcagggccacatgtcgctgcacgtccactgccacatctccggcggccacgtcctcctcgacctcatcgcggctccgctactacatcttccgcaaggagctcccgtggtacccggcacggagctgaygagccacgtgtgggtctacttccactccaacctcccacgcttcaaccgcgtcgagtgctggggcccgctccgcgacgccggagcgccgcccgaggaagacgacgccgtcgccgccgcggcggccgaggaggcggcggcggagcagatgcccgcggccggcgagtggccgcggcggtgcccggggcagtgcgactgctgcttcccgccatacagcctcatcccctggccgcaccagcacgacgtcgccgccgccgacggccagccgcagcagtga

SEQ ID NO: 3777 - DNA, 1578 bp, Oryza sativa
atggcgtcgtcccagctcgcgcgccgcgcggcgaggaggctgctttcgtctcagcatcgccgtcactgcgccgcgcccgcctgtccctggctcctgggctcggcgccgccggttcttgcgccgtctccggtggctgcggcggcggcgggagatcgtcggggattctgctccgtccggcgtttcaccggggagagcaacgccgccgccgccgtcgaggaggcggagaacgggttggtggccggtggtgatcagcatctctgtgcttactccctgggctgcaaagtaacggccaagccgtcaattcctcccctgagttttcatgaaaggaagagaaatttggttgaaagaaaacaggcaatagatttccctggaggaaaggtctcctttgttgctgaaatgaacttccttccagaatctcagagggataggatcaactgttaccgtgttcttgacgatgacggcagaacaatatctggaagcagattccaagaggtcagtaaggagctggctctgaaaatgtacaatgaaatggccaccctccaggtcatggatacaatcttctttgaagctcagaggcagggaagaatctcattctatctcacttcacatggtgaggaagcaatcaatatagcctctgctgctgcacttactattgatgacattgtactgcctcagtacagggaacctggtgttcttctatggcgcggcttcacactgcaagaatttgcaaatcagtgctttgggaataagctggattatggtaaagggaggcagatgccaatacactatggatcgaaccgtctgaattatttcacggtgtcatcgcctattgctacacagctccctcatgctgttggagctgcgtactccttgaagatggacaagaaagatgcatgtgccatcacgtattttggcgatggcggcacaagtgagggagacttccatgctgcactcaactttgcagcagttatggaagcgccggtgatcttcttctgccgcaacaatggctgggcaatcagcaccccaactagtgaacagttcagaagtgatctgtacaacaacttgaattctactgctattgcaggtgatggagctgttatccgtggtcaagcttatggaatgcgcagtatcagagtagatggaaatgatgctcttgctgtgtacagtgcagttcacacagccagggaaatggctatcaaggaaggaaggccaattttagttgaggcactgacttaccgggtcggccatcactcgacatccgatgattcaaccaaatacaggccggtcgatgagatcgagcactggcgaacagcgcgagatccgatttccaggtacagaaaatgggttcaggggaatggctggtggtgtgatgaagatgaatctgaactcaggaacaatgtgaggcaagagcttctgaaagccattcaggtggcagaaagaatgccgaaaccgccgctcgctgaactattcaccgatgtttatgatgaagttccttccaacctaagagagcaagagcgattgctgagggatacaatcaagaagcaccctgcagactacccagctgatgtgcatatttag

SEQ ID NO: 3778 - DNA, 1074 bp, Oryza sativa
atgggggaagaaatcaagaacggagaggagggaccagacatggctgcaccgggcgaggaggagcaggagcaggggaggaaaggcatcccgtctctgctctcctccagggaggagaacatcgcctckaacatcactcagctgattggatggacaccgcttgttgagatgaagaacatcgcgaagaacgaaggcgtacaggctcgattggttgggaagatggaagcataccagccactctgctctgtcaaggacaggagtgccctcagaatgattgaagatgcagaggagaaagggttgatcacacctggtgttaccacgctgattgagccaacgagtggtaatctcggtatcggtttggtgctggttgctgttcagaaaggctacaggtttattgctgtcatgcctgctaaatattcgcttgacaagcagatgctactgaggtttttgggtgctgaattgatattgacagatcctgcaattgggtttaatggtatgatggacaaggtggaagagctcatgaagagcataccaaattctcattgtctcaatcaagtaacaaacccagcaaatccagaggcacactttatgtggactggacctgaaatatggaaagacacagccggcaaagtggatgtgtttgtggcctctgttggttcaggtggcacattgacaggtgtagggaggtatctgaagatgaaaaatccatctataaatattgtgtgcgtggaaccttcagaaagccctgtaatttcaggtggttcaccagggccacacaagattcaaggcactggggcaggtttcatacctgaaattttggacaaatctgtcatcgatgaagtagtgacagtaaacacagaggaatccatggcaatggcgaggaggctggcgaaggaggaaggattgcttgttggcatatcttctggtgcaaatgtagctgcttgcatcaagattgcagacagagaggagaacaaggggaaaatgattgtgacaatgttcccgagcggcggtgaaagatacatgaactctgatctctttgcacctgttagagaggaatgtgataatatgaccttctga

SEQ ID NO: 3779 - DNA, 1332 bp, Oryza sativa
atggcggagcagagaggaaatatgttgatgaaaaagtatgagatggggaaattactcgggcaaggaacctttgccaaggtttaccatgcccgtaacaccgagacttctgagagtgttgctatcaagatgattgataaagagaaggttttgaaaggcgggctcatggatcagatcaaacgtgagatttctgtgatgaagttggtgaggcatccaaacattgtgcagttatatgaggtcatggctaccaagactaagatatattttgtgctggagcacgtcaaaggtggagagttgttcaacaaagttcagagaggaagactaaaggaagatgcagcaaggaagtacttccaacaactgatttgcgctgttgacttttgccacagcaggggtgtttatcaccgtgatttgaagccagaaaatcttcttcttgatgagaacagcaatctgaaggtttcagattttggcctaagtgctcttgctgattgcaaaagacaggatgggctgctccacacaacctgtggcacacctgcttatgttgctccagaagtgatcaacagaagaggctatgacggtgctaaggctgacatatggtcttgtggagtgatactctttgtgctattggccggctatctacctttccatgataagaacttgatggatatgtataagaagattgggaaagcagaattcaaatgtccaagttggtttaataccgatgttcgaaggctcttgctcaggatacttgatcctaacccaagtacaaggatctcaatggacaaaatcatggaaaatccttggtttaggaagggtctcgatgcaaagctgctcagatataatctacaaccaaaggatgcaattcctgttgatatgagcacagattttgactccttcaatagcgctccaacattggagaagaagccgtccaacttgaatgcttttgatataatttctttgtcaactggacttgacctctctggtatgtttgaggagtctgataagaaagagtccaaattcacatccaccagtacagcttcaacaatcatatctaagattgaggatattgccaagggcttgcggttgaagctcacaaagaaagatggtggactgttgaagatggaaggctccaagcctggaaggaaaggtgttatgggcattgatgcagagatattcgaggttaccccaaactttcatcttgtggagctaaagaagacaaatggtgatacacttgaataccgtaaggtcttgaaccaagagatgagaccagctttgaaggacatagtctgggcttggcagggtgagcaaccgaagcagcagcagcagccaacgtgctaa

SEQ ID NO: 3780 - DNA, 2415 bp, Oryza sativa
atggatcctgagttcgggagaggcatggcgcctcgaaagagagagccatggcggacgacgctgctgctggcgtaccagagcctcggggtggtgtacggcgacctgagcatctcgcccctgtacgtgtacaagagcaccttcgcggaggacatcacccactcggagtccaacgaggagatcttcggcgtcctctccttcgtcttctggaccctcaccctcatccccctcatcaagtacgtctccatcgtcctccgcgccgacgacaacggcgaaggagggacgtttgcgctctactctctgatctgcaggcacgccaatgtgagcctcctcccaaacaggcaggtcgccgacgaggagctctccacgtacaagctggagtacccgcctgaagtggctaacaggtctcgaatcaaggagtggcttgagaagcacaagactctgcagactgctctgctgatcatggtgatgattggaacctgtatggtcatcggggatggcgtcctcacgcccgcgatatctgtattctcagcggtttcagggcttgaactctccttgtccagggatcagcatgaatatgccgtcattccgataacatgtgtcatattagtgttcctgtttgcactccagcattacggtacccatcgtgtcggatttctctttgcaccaatagtcctagcctggttgatttgcatgagcatgcttggcttgtacaatatcatccactggaaccctcaagtttatcgcgctcttaatccctattacatgctcaaattcttgaggaagactaagaagtctgggtggatgtccctggggggaattttgctctgcatgacaggatctgaagcaatgtttgctgatcttggccatttctcctacagtgcaatccagcttgctttcactacattagtataccctgcactgattttgggatacatgggccaagctgcgtatttatcgaaacatcacactctgaactcaacctaccaaattggttactatatatcggttccagagagtgtaaggtggcctgtgcttgtgctggcaattttggcatcggtcgtcggaagccaagcaatcatcagtggaacattctccatcatcaaccagagccagtcactcagttgcttcccaagagtgaaagtggtgcacacatctgagaatatccatggccagatttacatccctgagatcaactggctgctcatggtcctctgcattgctgtgactgtcggttttcgcgataccaagcatatgggaaatgcatccggattggcagtgatcacggtgatgctggtgacgacatgcctgacatccttggtgatcatgctgtgttggcaccggagtccggcgctggcactcgtcttcttcctcttcttcggctccatcgaggtgctctacttctcggcgtcgctgatcaagttccgggagggggcgtggctgccgatcatgctggcgctcatcctcatggccgtcatgttcatctggcaccacaccaccatcaagaagtacgagttcgacctgcacaacaaggtgaccctggagtggctgctcgccctgggcgacaagctgggcatggtgcgcgtcccgggcatcggcctcgtctacaccgacctcacctccggcgtgccggccaacttctcccgcttcgtcaccaacctcccggcgttccaccgcgtgctggtgttcgtctgcgtcaagtccgtcccggtaccgcacgtgcttcccgccgagcgctacctcgtcggccgcgtcggccccggcggggcaccggtcgtaccggtgcatcgtgcggacgtggactcgttcgaggcggagctcgtcgagagcctygccaccttcatcaagctggacgcgctgtaccaccgctgcagcgacgccggcagcgggagcgagcagctcgacgacggccgctacgagcgcgagaacgcgctcacggtgatcgggacgaaccctctccggcgatgcctcagctacgaggcctcccacgacggcgtgtcctcggtggacgccgcgcgcagcccgaacgggatagtggaggtcccggcggcggcggcggcggcgccggtgacgaagaaggtgaggttcgtggtggaggcggcgagcccggaggtggagaagggcgtggtggaggagctgcaggagctgtgcgaggcgagggaggccggcacggcgttcatcctggggcactcgcacgtgcagaccaagccgggctcgtcgctgctgaagaagctcgccgtcggcgtcgggtacaacttcctccggcgaaactgccgcggcccggacgtggtgctgcgcgttccgccggcgttgctgctcgaagttcgccatggtctacgtcctatgacgtcaccacgagatctcatcgatcaataccctgtaaaaaaaattcaaaatcaaatctctctgcttgtataa

SEQ ID NO: 3781 - DNA, 1017 bp, Oryza sativa
atgtcgtcgtctccggcgcatgctcagcgcttctactgccaccagtgcgaccgcaccgtccccatcccgccgcccacctcccccgacgccgacgtcctctgcccgttctgcggtggaggcttcgtcgaggagcttggggaggacatcaaccccaaccccaaccccaaccctagccccttcctgccacaccaccccttcttccccttcgcctccccatccttcgacctccgcaaccctagcgacctcgcggccttcttcgggcccccctcccmttcccttwcccctccccagccgccaggcacttcgacccctccaacttcctccatgatcacttcaccggcctcctctytggcggcgcaaccatccagatcgtcctcgagggctcctccgcctccctycccctcggggggcgccgccgccgggcccggggggatcagcctcggcgactacttcgtcggctctggcctcgagcagctcatccagcagctcgccgagaacgaccccaaccgctacggcacccctcctgccgccaagtccgccgtcgccgcgctccctgacgtcgccgtctccgccgacatgatggccgccgatggaggggcccagtgcgccgtctgcatggacgacttccacctcggagctgccgccaagcagctcccctgcaaacacgtcttccacaaggattgcatcctcccctggctcgaccttcacagctcctgccccgtttgccgcttcgagcttcccaccgatgaccctcaccacgcccacccaacccttggatctcaccgccccgccgcacccgcctctgcctctgcctctccctctccagctccaccacctaggctggctgagagaaggttcaggatatcgctgccatggcctctccgtgctgcgtttggcggccaggcggagagcagcaatcctaccaatcaggatcctgttggtggttctactgatgcttccggttctggcaacaacaatgcaactggaggtcatcgtggctacgatgatcttgactga

SEQ ID NO: 3782 - DNA, 1605 bp, Oryza sativa
atgccaaggaggacggcgagctcgtcgacgtcggtgaagtcgatcaagtcgttctgccagccggtggactaccgggagacgtgcgagaccacgctggagcagacggcgggcaacgcgacgaacccgacggacctcgccaaggccatcttcaaggcgacgtcggagcggatcgagaaggcggtgagggagtccgccgtgctcaacgacctcaagaacgacccgcgcacgtccgacgcgctcaaggactgcgaggagctgctcgactacgccatcgacgacctcaagacgacgttcgacaagctcggcgggttccagacgagcaacttcaagcgcgccgtggacgacgtcaagacgtggctcagctcggcgctgacgtaccaggagacgtgcctcgacgggttcgagaactctacgtcgacggaggcgtcggagaagatgcgcaaggcgctcaagagctcgcaggagctgacggagaacatcctcgccatcgtggaccagttcgccgacacgctggcgaacctggacatcaccggattcagccgccggctgctcggcgacgacggcgtgcccgtgtggatgtccaacgcgaagcgccggctgctggaggcgaccccgggctccaaggagttcaagccggacgtgacggtggcggcggacggcagcggcgacttcaagaccatcaatgaggcgctggccaaggtgccggtcaagagcacggggacgtacgtgatgtacgtgaaggccgggacgtacaaggagtacgtgtcggtggcgcgcaacgtgacgaacctggtgatgatcggcgacggcgccaccaagaccatcatcacggggaacaagagcttcatgctcaacatcaccaccaaggacacggccaccatggaggcgatcggcaacgggttcttcatgcgcggcatcggcgtggagaacacggccgggtccaagaaccaccaggcggtggcgctccgcgtgcagagcgaccagtcggcgttctacgagtgccagttcgacgggcaccaggacacgctctacacccacaccagcaggcagtactaccgcgactgcaccatcaccggcaccatcgacttcatcttcggcaacgcgcaggtggtgctccagaactgccggatccaggtgcgccggtgcatggacaaccagcagaacatcgtgacggcgcaggggcgcaaggagaagcactccgcgggcggcacggtgatccacaactgcaccatcgagccgcacgaggacttcaaggccgacgccgccaagttcaagacgttcctcggccgcccgtggaaggagtactcgcggacgctctacatccagtccgacatcggcgggttcatcgacccgcaggggtggctgccgtggctcggcgacttcggcctcaacacctgctactacgccgaggtggagaaccgcggcgacggcgccgacatgagcaagcgcgccaagtggagaggggtcaagacggtcacgtaccagcaggcgcagcagaagtacaccgtcgagaggttcatccagggacagacgtggctcccaaagttcggcgtgccgttcatccccggcctgttgccgcaggagcagtcagggaggatacactga

SEQ ID NO: 3783 - DNA, 1116 bp, Oryza sativa
atggcggcggcgatggcgttcctcgcggtggtctgcgcggcggcgatggcggcggtgagcggagcggaggaggtgtacgagttcggctccggcgcgtcgttcatcttcggggactcgctcgtcgacgccggcaacaacaactacatcccctcgctgtccaaggccaacatgacgcccaacggcatcgacttcgccgcctccggcggcatgcccaccggccgcttcaccaacggccggaccatcgccgacatcatcggagaaatgttgggccagacggactactcgccgccgttcctcgccccgaacacgaccggcggcgcgctgctcaacggcgtcaactacgcgtcaggaggcgccgggattctcaacggcacaggaagaatctttgtgaacaggatcggaatggatcttcaggtggattacttcaacatcacgaggaagcagctggacgatctcctggggaaggcgaaggcgaaggagttcttgaagaagaaggccatcttctccatcaccgtcgggtccaacgacttcctcaacaactacctcatgcccgtcctctccgccgggacccgtgtcgccgagtcgcccgacggcttcatcaacgacctcatcatccacctccgggagcagctcacgaggctgtacacgctggacgcgaggaagttcgtggtggcgaacgtggggccgctggggtgcatcccgtaccagaagacgatcaaccgcgtcggcgagaacgagtgcgtgaagctgcccaaccagctcgcctcgcagtacaacggccgcctccgggagctcctcatccagctcaacggcgacctcgccggcgccaagttctgcctcgccaacgtctacgacctcgtcatggacgtcatcaccaactacgactcctacgggttcgagacggcgagcatggcgtgctgcgggaacggcgggacgtacgacgggatggtgccgtgcgggccggcgtcgagcatgtgcggcgaccggaagagccacgtgttctgggacccgtaccaccccagcgaggcggcgaacctggtgatggccaagtacatcgtcgacggcgacagcaagtacatctcgccgatgaacctccgcaagctgttctccctctag

SEQ ID NO: 3784 - DNA, 729 bp, Oryza sativa
atggccgatccggttaagctcatcggcgcttttggcagcccattcgtgcaccgcgtcgaggcggccctgcagctcaagggagttgcctacgagctcatccacgaggacttggagaacaagagcaacctgctgctcgctagcaaccctgtccacaagaaggtccccgtcctcctcgatggcggccgagctatctgcgaatcacttgtcatcgtcgagtacgtcgacgacgcattcgacggcccgcccatcctacctgccgacccctatgaccgcgccacggctcgtttctgggctcaattcatcgatcacaaggcaaatctcttcatgttgttgcatcattgcgttcattgcacgttgccgttgttgctggccctgtggctggacggtgaggagcagaaggggtttctgaaggagacgaaggagaacctgtcgctactggaggcacagctcgaggggaagaggttctttgccggcgacgccgtgggctacctcgacgtcgccgccggcggaatggctcactggatcggtgtgctcgaggaggtcaccggagtgagcgtgatcggcagtgaggacgacgacgagtatccttcgctgcagcggtggatcaaggagtacgccaacatcgacgccgtgaagctgagtctgccggatagagaagaactcgttgccttctacacgagaaacaaggataagtataagatgatgttcagggcgatggtgcatcagtga

SEQ ID NO: 3785 - DNA, 684 bp, Oryza sativa
atgggtgaaagggtgaagctcatcggtgctttcgccagtgcatacggccaccgcgcagaggtggcgcttcgcctgaaaggcgtgcgatacgagctcatcctggaagacctccgcaacaagagcgacctgctgctcaaccacaaccccgtccacaagctcgtccccgtcctcctccatggcgaccgctccttgagcgagtccctcgtcatcctcgagtacatcgacgagagcttccatggtccacccatcctcccaaccgatccgtacgatcgagccgtggcgcgtttctgggcgcagttcatcgatcagaagtttggtaggttcaatttctggatcccgttcgtgcaaatggagggcaacatgcaggattgtttcgtgagggaagcaaaggagaatctggcgcttcttgaagggcagctcaaggggaggagattcttcggaggcgacgccatcgggttcttggacatagcagcgtgcttgatagctcactggcttggtgcgttcgaggaggtatgtggggtgaccttggccacggatgaggagttccctgctttgtgcgagtggaggagacgctacgtcaacgatgaggccgtgaagccgtgcctgccgaatagggacgaactcgttgcgtattaccgtgaacgcaaggagatgatcaaagccgccggaaggcagcacaaatga

SEQ ID NO: 3786 - DNA, 720 bp, Oryza sativa
atgatgaattcatctgagccggtgaagctgatcggcgctttcggcagcccgttcgtccaccgtgtcgaggtcgccctgcgcctgaaaggagtgccctacgagctcatcctcgaggacatgggcaacaagagcgagctcctcctcgcgcacaaccccgtccacaagatggtccccgtgctcctccacggcgaccgctccgccatctgcgagtcgctggtcatcgtcgagtacgtcgacgaggcgttcgacgggccgcccctcctccccgccgaccccctccgccgcgccatggcccgcttctgggttcacttcctcgacgaaaattgcctgaagccgttgcggccggcgctgttcggggaaggcgaggagcagaagaaatccatggaggagacacgggagggcctgacggtggcggaggcggagctcaggggcaagcggttctccggaggcagctccatcggcctcgccgacatcgccggcggtggcgtgctggctcactgggtcggcgtgctccaagaggtcgccggagtgagcgtcctgagcgacggcgacggcgagtaccctgctctgcgccggtgggcgaaggattacgtcgctaatgaatccgtgatggagtgcttgccggatagagatcggctcctctcctacttcaccgggatcaagcagaagtgcgtttcggtggccaagtctacgctgccaaagtactcccttcttccctaa

SEQ ID NO: 3787 - DNA, 1362 bp, Oryza sativa
atggttcagatcgagccgctcgaggtgtcactggaggccggcaaccaggcggactcggcgttgctcgacgacgacgggcggccgcgccgcaccggcacgttctggacggcgagcgcgcacatcatcaccgccgtgatcgggtccggggtgctgtcgctgccgtgggcgacggcgcagctcgggtgggtcggcgggcccgccgtgatggtggtgttcggcggcgtcacctacttcaccgccacgctccaggccgagtgctaccgcaccggcgacgaggagaccggcgcccgcaactacacctacatcggcgccgtccgcgccatcctcggcggcgccaacgccaagctctgcggcatcatccagtacgccaacctcgtcggcaccgccgtsggctacaccatcgccgcctccatcagcatgcaggccatcaagagggcgggctgcttccacgccaatggccamaaggtcccgtgccacatctcgagcaccccgtacatgctcatcttcggcgccttcgagatcgtcttctcgcagatcccggacttccacgagatctggtggctgtccatcgtcgccgccgtcatgtccttcacctactccggcgtcggcctcggcctcggcatcgcccaraccgtcgccgacggcgggttccgcggcacgatcgccggcgccctgggcaacatcgccttcgcgttcgcyttttccaacgtgtacaccgagatccaggacacgatcaaggcgccgccgccgtcggaggcaaaggtgatgaagcaggcgtcgctgctgagmatcgtggcgacttcggtgttctacgcgctgtgcgggtggatgggctacgcggcgttcggcaacgcggcgccggacaacctccttaccggattcggcttcttcgagccgttctggctcgtcgacgccgcmaacgtcgcmatcgccgtgmacctmatcggcgcctaccaggtgtactgccagccggtcttcgccttcgtcgagcgcaaggcgtcgcgccggtggcccgacagcggcttcgtcaacagcgagctccgggtgtggcccttcgccatcagcgcgttccggctggcgtggcgctcggtgttcgtctgcttcaccaccgtggtcgccatggcgctgcccttcttcggcgtcatcgtcggcctcctcggtgccatctccttctggccgctcaccgtctacctccccacggagatgtacatcgcgcagcgcggcgtgcggcgcggcagcgcactgtggatcgggctcagggcgctcgccgtcgccggcttcgtcgtgtcggccgccgccaccacgggcgccgtcgccaacttcgtcggcgacttcatgaaattccgtcccttcagtggatag

SEQ ID NO: 3788 - DNA, 930 bp, Oryza sativa
atgctcggtcccagatcgaagatccaagaccggatggctgggctgttcaccaggcaggctgccgagtacgccgcggcgcggccggtctaccccaaggacctgttcgtcaagctcgcgtcgctcaccgcccaccaccgcgtcgcctgggacgtcggcaccggcaatggccaggccgccatcggcgtcgcggagcactacgacagcgtggtggcgacggacgtgagcgcggagcagctgcggcgcgccgtgccgcacccgaaggtccggtacctccacacccccgacgccggtgccgacgacgacgacctcgtcgcggcgctcggcggcgagggctgcgtcgacctcatcacggtggccgaggcggcgcactggttcgacctcccggcgttctacggcgccgcgcggcggctcctgcggaagcccggcggcgtgatcgcggtctgggggtacaactaccgcgtcagccccgtggaggacatgatgtcccgcttcctccacaccaccctgccctactgggactccagagctcggtacattaccatttgggcacagcacacattgcaattttacaatcttgcaattgcaagcaagcaccatccatggcgaaaagaaagcttgacatgctgctcttgcaggtacgtgatcgacgggtaccgggacctgccgttcccgttcgacggcgtcggcctcgggaaggagggcgagccggcgggcttcgacatggagcacgagatggcgttcccgggcctcgtccgaatgctgaggtcgtggtcggcggtggcgacggcgaggcagcggggcgtggacctgctggacgagcgcgtggtgaggcggctggaggaagagtggggtggcgcgtcgctggtccgcaaggtcaccttcaaggcgttcctgcttgccggcaccgtcagggccgacgaccctgcttga

SEQ ID NO: 3789 - DNA, 1989 bp, Oryza sativa
atgccgcgagccgtgtccgacgggggcgaggccatcgacgccgacatcgccagccggacgtcatcgcacagccacatggacggcggccatcatcatcatcatcacggccacaaggtcgagttcccaccgaagaagaagctcatcgacgagttcaccgacgccgtgaaggagacgttcttcgccgacgacccgttgcggcagtacaaggaccagccgatgtcaaagaaggtgttgatcagcctgcaaaacttcttcccggtgctggactggggccggcactacaccttccgcaagttcaggggcgacctcgtctccggcctcaccattgccagcctctgcataccccaggacatcggttatgcgaagcttgctggcctattaccaaattatggactgtacagcagcttcgtaccgcctttgatatacgcgatgatgggaagttccagggatatagccattggtccagtggccgtcgtttcgctgctgcttggcactctcctccagaatgagtttgatcccaagaagaatcaggaagagtacacccggctggccttcactgcaacgttcttcgctggggtcacccaggcagcgctcggattcctcaggctagggtttatcatagagttcttgtcccatgctgccatcgttggattcatggcgggagcggccatcaccattgcccttcagcagcttaaaggcttccttggaattgcaaacttcaccaagaagactgacatcatctcggtcatgaaatcagtctggggaaatgttcaccatgggtggaactggcagacgatattgatcggagcatccttcctggcattcctcctggttgcaaaatacattgcaaagaagaataagaaactcttttgggtggctgcaattgcaccactcacttcggtgatcatatccaccctttttgtctatatcactcgagcagacaagcatggtgtcgtgattgtcaagtacataaagaaaggcatcaatccaccttcagctagtctcatatacttcagtggcccaaacctgatgaaaggattcagaataggagtaatagctggcatgataggcctaacagaagcaattgcaataggaagaacattcgctggcctgaaggactacaagattgatggaaacaaggaaatggttgctctaggaacaatgaacattgttggttcaatgacttcttgctacgtagctacaggttctttctcgcggtcagcagtcaattacatggctggctgccaaacagcggtatccaatattgttatgtcaattgtagtactgctcacactggagctgattactccattgttcaagtatacgcccaatgccatcctttcttccatcatcatatcagcagtgcttggcttagtcgactaccacacagcataccttatctggaaggttgataaacttgactttctggcatgcttaggagcattctttggcgtcatattttcatcagtggagtatggtctgctaattgcggttgcgatctcactcgctaaaattcttctacaagttacacgacccagaacagttttgcttggtaaccttccaagaacaacattatataggaatatcgaccagtatccagaagctaccttggtaccaggagtggtaatagttagggtggactcagctatctacttcacaaactcgaactatgttaaagacagaatcctgaggtggctgagggacgaggaagaacgtcagcaggaacagaagctacagaaaactgagtttctgattgttgagctatctccggtaattgacattgatacaagtggaatccatgccttggaggatctatttagagcacttgaaaagcgcaaaatccagctgattctagccaatccggggccagctgtgatcctgaagctccgatcagcgaaattcacggatctcatcggtgaagacaagatattcctgactgtcggggacgcagtgaagaaatttgctcctaaggcagtggagaatgtctga

SEQ ID NO: 3790 - DNA, 2103 bp, Oryza sativa
atgaccgggatcgacctcaacaccgtcgaggaggacgaggaggaggcggcggaggaggtggcggcgaacggctcgtctccggctccggcgagggcgggcgcggtgtgcctcgagctgtggcacgcctgcgccgggcccgtggcgccgctgccgaggaaagggggcgtcgtcgtgtacctgccgcaggggcatctcgagcacctcggcgacgcgcccgcggcggcggcggccgcggccgccgtgccgccgcacgtcttctgccgcgtcgtcgacgtcaccctcctcgaggtkgcgaggcgggcggacgacggcgagggcgaggacsgggacggcatgaagcagcggttcgcgcggatgccgcacatgttctgcaagacgctcacggcgtccgacaccagcacgcacggcggcttctccgtgccgcgccgcgccgccgaggactgcttccctccactggattacagccagcagcggccgtcgcaggagcttgttgccaaggatttgcacagcactgaatggaggttccgccatatttaccgaggccagccacgtcggcaccttttaaccacaggttggagtgcatttgttaacaagaagaagcttgtttctggggatgccgtactatttttgcgaggtgatgatggggagctaagactgggagttcgccgtgcagctcagcttaaaaatgggtctgcttttccagcactttacaaccagtgttctaatcttggtacacttgccaatgttgcacatgcagtggctacagaaagtgtgttcaacatatactacaatcccaggttaagtcagtccgaattcattgtaccctactggaagttcatgaaaagcctcagccaaccattttctgttgggctgaggttcaaaatgagatatgaaagtgaagatgctactgaaagaaggtacaccgggataattactggaagtggtgatacagaccctatgtggcatggttcgaaatggaaatgtttgttggtgaggtgggatgacgacgctgagttccgtcgaccaaacagggtctctccttgggagattgagctgactagttcagtgtcaggatcccatttgtccacaccccattcaaagcgattgaaaccatgtcttccccatgttaatccagaatacatggttccacgtggaggtggttgtcctgattttgcggaatctgcccaattccacaaggtcttgcaaggtcaagaattattgggttttaaatctcatggtggtactgctgctgctacttctcagccatgtgaagcaaggcatttacagtacatcgatgagcggagttgctccagcgatgcgagtaacagtatcctaggggttccaagacttggtgatagagcaccacttggaaacccaggattttcctaccattgctcaggctttggggagtctcacagactccaaaaggtcttgcaaggtcaagaattatttcgtccctaccgaggaactttggttgatgcgtctatgggtagtaatgggtttcatcaacaagatagtcctcgtgcaccaggtgtggtgaataaatggcaggcacaacttcatggccgtgctgcttttcatggaccaccagcactggctcttccatctcaatcatcatctccgccatctgtcctaatgtttcagcaagctaattcaaagatgcccaggttggagtttgggcatggacagttggacaagcacgagaatgataggcgtgttaggtttggtccttctgaaggaattgaaagaagagagcaaagaataccactccagccttatcctacttctggagaagtgatagatggacaggttacagttgagaagtctcactcccctggtcgacatggaaaggatggtccagataacaaagctgttggcacaaatagttgcaaaatatttggcatctctttgactgagaaggttccagcaagagaagaactagatgatggcgacgccaactattcactccagtctttgaagcaagtgccaaaatccctgggcaatagttgtgctaccatggtggccgagtatcagggagatggagggactgatgattctgatatttttatcttagatgtaggcgttggagcacttatcatgtga

SEQ ID NO: 3791 - DNA, 1464 bp, Oryza sativa
atggcgtcctttcacatcgccacggcgctctcggcgactctgctgctctccttgctcgtcctgggccgctccgacgccaccctgccgccgccggccacgccggtgccgccgtccacggcgtgcaatgggacgacggaccccacgttctgccgctcaacaggacgtccagcamgctgctcgaacccgcaggcggaggacgtgcagacgcttgttttcggcgatcctgaccaaccagcagaacgtgcgccgacggccttccaggccgccgcctcggcgtggtccgtgcgcaacggcctcgccgtgccgatgagcaacagcaccaagctgtacagcgtttcgctctcgctcttcaccagggcttgggtgcgccccagcaccaagaagccgaggacggcgamgccgaagccgccttgcamggcggccgcggcagggcctgttcgacgccaccgacgacgagatgtgcsgargatggcgcttgacggcgccgcggcggccgtgtccacgttcggcgccgtgacggtcgaccagagcggcgccggcaacttcacgaccgtctcggacgccgtggcggcggcgccgacgaacctcgacggcaccaagggctacttcgtgatacacgtcaccgccggcgtgtacgcggagaatgtggtggtgcccaagaacaagaagtacgtgatgatggtcggcgacggcatcgggcagacggtgatcaccggcaaccggagcgtcgtcgacggctggacgaccttcaactccgccacgttcgctgtgctcgggcaaggattcgtggcggtgaacatgacgttcaggaacacggccgggccggcgaagcaccaggcggtggcgctccggtgcggcgccgacctgtcgacgttctaccagtgcagcttcgaggcgtaccaggacacgctgtacacgcactcgctccggcagttctaccgcgcctgcgacgtctacggcaccgtcgactacgtgttcggcaacgccgccgtggttttccaggactgcaccctctacaaccgcctccccatgcaggggcagagcaacaccgtcacggcgcaggggcgcaccgaccccaaccagaacaccggcaccaccatccagggctgcgccatcgtcgcggcgcccgacctcgccgccaacacggcgttcgccaccaccaactacctcggccgcccgtggaagctctactcgcgcacggtgatcatgcagtccgtcgtcggcgggctcatcgaccccgccgggtggatgccgtgggacggcgactaygcgctyagcacgytctactacgccgagtacaacaaytccggcgccggggcggacaccagcaggagggtgacctggccggggtaccacgtgctcaacagcaccgccgacgccggcaacttcaccgtcggcaacatggtgctcggcgacttctggctgccgcagaccggcgtgccgttcaccagcggcctcaactga

SEQ ID NO: 3792 - DNA, 1368 bp, Oryza sativa
atggattggctgtccgcgaacctgcaggtgaaccctcaggtgactgtccatggggactgggtgtcagcagtcatgccgctgatgaagctgctgtgcttgacggtcatcggccttgtgctgtccaacccgaggacgcagatcatccccaaggccaccttcaagctcctgagcaagctcgtctttgcgctgttcctgccatgcctgatctttgtccaccttggccagtcggtcacaattcagaacatcctcgactggtggttcatcccggtcaacgtgctcatcagcacggccatcgggtgcattcttgggtacatcgtcgcgctgatctgtcgcccgccgccgcagtttttcaggttcacggtgatcatgaccggatttggcaacacgggtaacctcccaatcgcgatcatcgggtcggtttgccataccacggatcacccctttggtcctggatgccaccgcaagggtgtcgcttatgtttcgtttgctcaatgggtcgctgttattcttgtctacaccttggtttaccatatgatggagccaccgatgcaattctacgagattgtaggcgaagggaacgagattgtggaagagcctgcacagatcagcaactacagtagatctctgcttcatgaagcggaatggccagggatggctgacaaagaaacggagcactcaaagacgccattcattgcacgggttttcatgagtatttcaggctcttcacagaatacatttcctgatattgattttgcagaagagggcacttctggtgctggacctagcagtccaaaatcgctaaggtgtttggcggagccaaaggttgtaaggaggatcagggttgtagctgagaagactccaattcagcatgttctccagccaccaaccatcgcctccttgctcgccattgtcatcggcatggttcctttgttcaaagattttgtgtttgtgcctgatgcaccactgtcgttctttacagacagtttggagattctagctcaagccgttgtaccctcggtgatgttaattctagggggcatgcttgcagaaggacccaaggataatgccttgggtatccggactatcactggtataattgttgcaaggctcctgattctcccgtgcattggcatcggtgtcgtcctgctggcagatcggttgcatctgcttgtcgaggaagaccacatgtaccgctttgtgctgtcgctacagtactccacccctagtgccatcctgcttggagcgattgcgagcctcagaggttatgctgtcaaggaagcatcggcacttctattctggcagcacatttgtgcggtgctatctctctccatctacctgatcgtatatttcaggttgcttaccatttga

SEQ ID NO: 3793 - DNA, 1542 bp, Oryza sativa
atggcgtggttggatgatgtgctgagcttgtgcaataataatactcgtatgtgcaatgcccttgtcctctctgtggtggtcgtctccttcctccagctcttgaaacatgtgctcctgacgccgtcgcgcctcccgctcccgccgggcccgcgcaacctccccgtcgtcgggagcgcgcaccggcttgtcaacacgctggcgcaccgcgtgctgagggacctggccgatgtgcacggcccgctcatgcacctccgcgtcggccaggtgccggtggtcgtcgtcacctccaaggagctcgcccgggacattctcaagacccacgacgccaacttcgccacgcggcccaagctcgtcgccggcggcatcgtcgcctacgactggacggacatcctcttctccccctccggcgactactggcgcaagctccgcaggctgtgcatccaggagatcctcagcgccaagcgcatcctctccttcgagcacatccgggaggacgaggtgcggatgctcgccgacgagatccgcgccgtcggtccatctgtggccgtcgacctcagcgccaggctgcaccggataaccaacaccatcgtgtccagggcggcgttcggcaacaagaggagtaacgccgccgacttcctcgtggccatcaagcagagcgtcatcatggcgtcggggttctacgtgccggacctcttcccgaggttcagcgtgctcctctgctggctcaccggcatgcggcgtacgctgcacggcatccgcgacaccattgatagcatcctcgaggagatcatcagtgagaaggaagaggccaagcagcagcaggataataatctggtggacgtcctgctcagcctcaaggacaagggggactttggcttccccatcacacgcgacaccatcaaggccatcgtgctggacatatttgctggtggatccggcacatccgctaatgccatggagtgggccatgtcagagctgatgatgaaccctagggtgatgaacaaggtgcaggcagagatcagggatgcgtttcatgggaagcaaagcatcggtgaggctgatcttcgggctcgtgacctcaaataccttaagctagtgatgaaggagacgctgaggctgcaccctccagctcccctgttggtgccacgagaaagtattgatgcatgcgagatcaatggatacatgatcccagcgaaggcgagagtcatagtgaactcatgggccatctcgagagacccgaggtactgggaggatgcggaggagttcaagccagagaggtttgccgagggtggcatcgacttctatggtagcaactatgagtacacgcaattcgggtcaggacggaggatgtgcccagggtacaactatgggttggccagcatggagctcacgctagcgcaactgcttcactccttcgactggagcatgccggatggagccaccgaagttgacatgactgaggctcccggactaggtgttcgtaggaagacaccgctgcttctgtgcgccgccccctatgttgccagccatatatatgcctag

SEQ ID NO: 3794 - DNA, 942 bp, Oryza sativa
atggcggccgtgcagcgactcctgcgggcgtccgcctccggtggcgcggcggcggcggcggcggcggcgaggaggcgcatgtccacggcggtggcgccggagcagacgcctgcggccgcggcgttcccgttcgcggcggcggcggggagggcgaggcagcgggtggcggaggagaggaacgtgcagtgggtgttcctcgggtgccccggcgtgggcaaggggacttatgccagccgcctctcccgcctcctcggcgtgccccacatcgccaccggggatctcgtccgcgacgagctcgcttcctccggccccctatctgtgcagctggctgaaattgttaatcaggggaaattattttctgatgaaattatcatcaatctgttatctaaacgtcttaagaaaggagaagagcagggggaatcgggatttattctggatggttttccacgtactgtaaaacaagcggaaattcttgatggagttactgacattgatatggtggtcaatctaaagttgagagaggatgtcctagttgagaagtgccttggcagacgtatttgtggccaatgtggaaagaacttcaatttggcctgcattgatgtgaagggtgaaaatgggctgccaccaatctacatggcaccactattgcccccaaataactgtatgtcaaagcttatcaccagagctgatgataccgaagaggtcgtgagaaatcgtcttcagatatataatgacatggtatttaacgtggttcttggaagatttaaatcctgcaccatgttgatttgctcagtagggagccaacctgttgagggtttctaccggcaacaggggaagcttttagaatttgatttgcctggaggaatccctgagtcttggccaaagctgctccatgttctaaatctcgaggaccaagaagagatgaagctggccactgcgtaa

SEQ ID NO: 3795 - DNA, 615 bp, Oryza sativa
atgacaagtgtctggaagaccaaggttctcactggactcaacaagctctttgacaaggatggaaagaaggctgctgctgctgagttcttgaaatcattcaacaaggaggagattggcaaggagattgatgacaagaagacagagctagagcccaaggttgtggaggttgttgagtcatctcctcctgagattaaggctttgttgaaggacaaaaaaacagccagcaaaatcaagaagaacggtcctgcagtcactaagttccttgaggaattggctaagattgatttccccggagccaagccggtgagcgacgcggtggccaagtccggcacgacgccgctctccccggcgatcgccttcatcctggagaaggtcgcgcctttcgttcccaaggaggagcccaagcccgagccggaggcggaggcggcggcggagaccacctcccgggaagtcgccgtggaggaggagaagaaggaggaggaggcggcccccgccgagcccgccgccgccgccgcggaggcggcggcgccgtcgacggaggtggtggaggagaagaaggaggaggagaagccagcggaggcggcggcgccggcggctgagccggagaagcagtag

SEQ ID NO: 3796 - DNA, 1227 bp, Oryza sativa
atgggcgggatcctcgactacggcatcgaggacgccgaggacggccccgcctgcgaccgcaacgccgccggattcctcgccgccatcgacgtcgccgccgcgctgcctcctggctcggcgagcgtgtgcatcaagatcacggcgctgtgcccggtcgcgttgctggagaaggcgagtgatctgctgcggtggcagcagaagcacccggcgacgaagctgccatggaaagtgcacgggttcccggtgctgtgcgtctccagcccgctgtacctgacggcggcggagccgccggcsctggaggcggaggaggagagggagctcgaratggcgcacgggcggctgctggcgatcggcgagcggtgcccggagtacgacatcccgctgctggtggacgccgagtacgccaccgtgcagccggcgatcgactacttcacgttcgccggcgcgctggcgttcaacggcggcgggaggcccatcgtgcacggcaccgtccaggcctacctccgcgacgcgcgcgaccggctggaggccatggcgcgagcggcgcagggcgagcgcgtgtgcctcgcgctcaagctggtccgcggcgcgtacctggcgcgcgaggcccgcctcgcggcctccctcggcgtgccgtcgccggtccaccgcagcatccaggacacccacgactgctacaacggctgcgccgcgttcctcctcgaccgcgtccgccgcggcgccgccgccgtgacgctcgccacgcacaacgtcgagtccgggcagctcgccgcggcgagggcgctggagctcggcatcggcggcggcggcgaccgcggcctgcagttcgcgcagctgatgggcatggcggatggcctctcgctcggcctccgcaacgccgggttccaggtgagcaagtacctgccgtacggtccagtggagcagatcatcccgtacctcatcagacgagcagaggagaacaggggattgctctcgtcttcctccttcgacagacagctgctccggaaggagcttgtgaggaggttcaaggctgcaatgctgggacgtgacacctgcactatgcgtggaagccgatcgaacatgtgtgttttgatcagagatgcgtggcattctgacctctttgatgagcgcaacaagttcaagatctatgcaggttctgctcgtgtacggcatgcagggcacgttcaagtatcaagggagctatctgattactccgtacacgtttag

SEQ ID NO: 3797 - DNA, 2208 bp, Oryza sativa
atgggatcgattgagcacgcgcggttccgaagcggcsmagcgmacagcgtccctgtcgatccagctgcgtctaccaagcattcgggaagtggaggtgaaggtggtgcggcaagcaacaatggcggtggtgggagtgcgcctccgcccggcaatttggcaggaagtggcactccacctgcaaagggaagcggcggcgacggcggcggcgctccggcgaataattccacaagtggcggcgccccggcgaacagcgcggtggagcagagtagcccggccggagatgggggtggatccccatccacagccagtagttctgccggaaaatcatcctccgcgaacaccggcgaggagagtgtagataagtccaataagcagtcaggaagtggaggtgaagctcccagcaatggcgatgccgtttctgacaagaagaacagcacggcgaaggccgataccgaagttgctgttaaagcatccagtgataattctactggaactggaagttcagcaaagggtgaatctaatgttggatctaatagcagtgcaggaagtggaaatggtgttgcaagtagtgtttcttctgctgctgtgaatagcactgcggtaaagacagatgcaaaagacgtagtcgttgctacgagtactgattctgccggaagtgtctcagatgtgaaggccgatttgagtaacagatcagatactccgccagcgagtggaagtggacattccaaccatacatcagatgtgactgttagtccggcgaagggaaatgctaaagatggcggagctgatacaaataaagcgagtgggaatgtggcttcaactagtaatcagactgctagtactgcaatggtcgcaaagaaagcgggtggatccccaagcaagaatcagacatctgtagcatcgacaaattcgaagaatcagaaccagactagtgctggagttgcttctggtggaagtagtggtacaacaagtaagcaggaggaaacaacttcgcagggtagtgttggttcatctaaggatcatcctgcccaagcaatcaactcaaaaactagcaactacagcgaagtgctggtgaaggggaatggatcatcaacaaaacaggcatcacaaaaacagcctgataaaaaggttgactggatcaaggagatggccagctgtgatatgttccatgggaattgggttcgggatgagtcgtaccctctctaccctgagggatcatgccctcacattgatgagcccttcgactgttatctcaatggccggccagatcgagcctaccagaagctccggtggcaacctagtagctgcaacatcccgagattgaatccaactgatatgttggagaggctgagggggaaaagactggttttcgttggtgattcacttaataggaacatgtgggaatccctggtctgcatcttaaggaactccgttaaggataagaggaaggtttttgaggcatctggtaggcatgagtttaagactgagggctcatactctttcctgttcacggactataactgcagtgtggagttttttcgctcccctttcctagtccaagaatgggagatgaaagtgagcaatggaaagaaaaaagaaactcttaggcttgatatagtcgagcaatcatcaccaaagtataaggatgcagattttctaattttcaatactggacactggtggacacatgagaagacttctctagggaaggattactatcaggaaggtaatcacgtgtatagtgagctcaatgttgtggatgcctttcacaaagctcttgtcacctggtccaggtggattgatgcgaatgtaaatcccaagaaaaccactgtgttgttcagaggctattcagcatcccatttcagtggtgggcaatggaattcaggtggtagctgtgacaaagagacagaaccaataagaaatgaacagtacctgtcaacctacccaccaaagatgagcattttagaggatgtgatccacaagatgaaaactccagttgtttacttgaatataacaaggatgactgactatagaaaggatgcacatccttcaatctatcgcaaacggaacctgactgaggacgagagaagatcaccagagagataccaggactgcagccactggtgccttcctggagtaccggattcctggaacgagctgctttatgcccaacttttgatcaaacagcatcaaatgctccaacaataa

SEQ ID NO: 3798 - DNA, 1998 bp, Oryza sativa
atgaggaaaggagctggtttgcgaaaattcattaaaaaatcccatgagtctgacagaagaagcaagaagaactggaatcgagatcgttccatctatcaattactcaagatggtgataaaccctgaagttgggaggaaaatcagactaaagtgtagaggtggtgacagccctcaagatcacttaagtcctccctatccggggcctaatactcgcacgcacgcattcccatgctgcccacaaaaaaacgattggaaagcacgcgcaaacgtttccatcccgtgggatgcttccaaccaacggcagcagcaagctgcagccgccaacccaacgtcccaacccacgcgacgcgacgcacgcaggcaggcaggtgggattgatttgggtgacatggtgcaacaccatagggccaccctcctgctgcaccagcagcagaggaaaggggatgcgacggcagaggaggggcagcagctggtggccgaggaaggagccggcaagatgaaggagctccggcgccggctcgtggactacgcgtgccaccaccggaagcacggccacgacgcgctgctgcggatgctcgcggggttcgcgcttgtctcctgcctgctgctgctgctgccagggagccctttctcagccgcggtcgacgacctgctgcagatggggaggacgcgcctggacgacgagacgccgccgccgccgccgtgcgcggccgtgtccaacggcaccatctgctgcgaccgcaccgccatgcgtacggacgtgtgcatcatgcgcggggacgtccggacggaggccgcttccaattctctcttcttgctcgtgccgccgccggacaattccaccgccgccgctggccgggacgagcgcatccgcccttacacccggaagtgggagtccagcatcatgagcaccatcgacgagctccggctccgtgccgtgcccgaggggggtgcggcgccggctagctgcgacgtccggcacgacgtcccagccgtcgtgttctccaccggcgggtacaccggcaatgtgtaccacgagttcaatgacggcataatcccgctctacatcaccgcgcgccagtacaacaagaaggtggtgttcgtcatgctcgagtaccacgactggtggatgaccaagtacggccacatcgtcgagcagctctccgattacgcgcctatcgacttcaccaacgaccgccgcacccactgcttcccggaggccgtcgttgggctgcgcatccacgacgagctcgccatcgacgccgcacgaatgccgggcaaccgtaccatccaggacttccgtcggatgctcgacgacgcataccgcggccgcatacagatgatcatcgaggaggaggagaaggccgcggcggtggccttggggacgccgacccaaggcagcatcaggaagaagagcgcgctcaaggacgacaagccacgactggtgatcgtgtcacggaacgggtcgcgcgcgatcgagaacgaggccgagctggtgcgtgcagctgctggcgccgggttccgcgtcgccgtgctccagcctcgtcaggatacggagctcgccaagatgtaccgtgctctgaacgcatcggacgtcatggtgggcgtgcacggcgcggccatgacgcacttcctcttcatgcggccgggctccgtcttcatccaggtcgttccgctcggcaccgactgggccgccgagacatactacggcgagccggcgcggcggctcgggctgcggtacatgccgtacaagatcaagccggcggagagctcgctgtaccggcagtacgccaaggatgacgcggtgctcaccgacccggacaccgtgaacgccaaggggtggcaggtcaccaagaaggtttacctcgatggccagaacgtgcggctggacatggtacggttccgtcgccggctgcgcgacgcgtacgaccactgggcggagctgaggaggcgccacaacgcggacagtactgagacggaacagcggaaaccatggtag

SEQ ID NO: 3799 - DNA, 1452 bp, Oryza sativa
atggcgcagggccacgccatccccatgaccgacatggcgcgcctgctggccgagcacggcgcggcgcgggtcagcctcgtcgtcacgccggtcaacgccgccaggatggccgggttygccgccggcgtggaggaggccggcctgccggtgcagctggtggagctccccttcccggccgccgagttcggcctgccggacggctgcgagaacgtcgacatgctcccgtccaaagacctcttcagcaacttcctcttggcctgcggcgcgctccgggagccgttcgcggcgaggctccggcagcaacggccgccggcgagctgcatcatctccgacatgatacactcgtgggccggtgacatcgccagggagctcggcgtcccatgggctcacgttcaacggctcctgcaccttctcctccctttgccagaacttggtccaagtttccaactatctcgcagggacatcatttatcgcaaaaatctattggagaacctcacggatgatgagatcgtcaaagtctcagggttccctacgccgctagagttgccaaaagctagatgccctggaacactgtgcgttccaggtctgaagcaaataagtgacaagatttacgaggctgagacgcgaagcgatggcaggatcatgaatagcttccaggagatggaatctctgtacatcgagtcgtttgagcgaaccataggtaagaagatctggacgatcggcccaatgtgcctttgtcacagagacagcaacgccatggctgctagaggaaacaaggcgtcaatggatgatgcgaaatgtttgcaatggcttgattcaaagaagcctggttcagtgatctttgtcagctttggcagcctctccagcaccgaccctcagcagcttgttgagctggggctgggacttgaagcttccaagaaaccattcatctgggtgatcaaagcaggaaaaaagtttccagaagtcgaggaatggcttgcagatgggttcgaggagcgcgtcaaagacagaggcatgatcataaggggctgggcgccacagatgatgatcctgtggcaccaggccattggagggttcatgacgcactgcgggtggaactcgacactagagggcatctccgcgggtgtgccgatgatcacatggccacactgttcagagcagtttgtgaatgagaaattggtggtggatcacctgaaaattggggtggaggttggagtgaaaggagtgacacagtggggaactgaacaaaaagaggttaaggtgacaaggactgctgtggagacagcggtatccatgttgatggatgaaggggaagttgcacaggagattaggatgagagcaaaagattttggcatgaaggcaagaagggctttggaagagggaggttcttcctataacaacataaaactattaattcaagaaatgggaaacaagcaaaatgcatctggttga

SEQ ID NO: 3800 - DNA, 1479 bp, Oryza sativa
atgtcttttgccagccaagccggcgccggcgccggcgaccagcagcacaggtgctgctccaggacggtgcacttcgtgctggtcccgatgatggcgcaggggcacaccatccccatgaccgacatggcccgcctgctggccgagcacggcgctcagatcagcctcgtcaccactccggtsaacgccggcaggatggcggggttcgtcgccgccgtggaggaggctggcctgccagtgcagctgctggagctccccttcccggctgctgatttcggcctgccagacgggtgcgagaacattgacatgctccagtgcaaagacgacatgaggaaattcctcgaggcctgtggcgcgctccgggagccactcatggcgaggctccggcagcacgacctgccgccgagctgcatcgtatccgacatgatgcactggtggaccagtgacatcgccagggagctcggtatcccctggcttacctttagtggcttctgtacctttgcctccctcgccagggacattgtttaccgtaacaatctattgcgggacctcactgatgaggaggaggtcgttaagctctcagggttccctacgccgctagagttgccaaaagctagattgcctggaagcttgtgcgttccaggtctggaggaaatccgtgagaagatctatgatgaggagatgcgaagcgacggcaaggtcatgaacagcttcgacgagctggagactttgtacatggagtcctataagcaggtgacagataaggtctggacratsggccctaatgtcrcctgtgacacggagacagaaacacaatggctgctagaggaaacaaggcgtcattggatgaaaagcccaggttccgtgatctttgtcagttttggcacccttgtcagcaccgsgcctcagcagcttgttgagctgggactggggcttgaagcttccaacaaaccgttcatatgggtgatcaaagcaggaaataagtttccagtagtcgagaaatggcttgcagatggattcgaggaacgtgtcatagacagagggatgatcataagaggttgggcaccacagatgatgatcctgtggcaccaggccattggagggttcatgacacattgtgggtggaactcgacaatagagggcatctgcgcgggtgtgcctatgatcacatggccacactttgcagagcaattcttgaatgaaaaactggtagtggatcacctgaaaattgggatggaggttggagtgaaaggagtgacacagtggggaagtgaacaaaaagaggctcaggtgacaaggaattctgtggagacagcagtgtccacattgatgaatgagggggaggctgcacaggggatgagaatgagagcaaaagattttggcataaaggcaaggagggctttggaagagggaggttcttcatataacaacataaggttattgattcaagaaatgggaaacgagcaaaatgcatctggttga

SEQ ID NO: 3801 - DNA, 1350 bp, Oryza sativa
atgtcctccgccggccacgccgtcgaccagcagcgcaaatccaccacgatgaaggcgcacttcgtgctggtcccgatgatggcgcagggacacatgatccccatgaccggcatggcccgcctgctggccgagcatggcgcgcaggtcagctttgtcaccactccggtgaacgccgccaggatggcaggattcgtcaccgctgtggaggcggctggcctggcagtgcagctggtgaagctccccttcccggccaccgagtttgggttgccggacgggtgcgaaaacctggatatgatccagtccagggatctcagccgaaacttcatggaggcctgcggagcgctccgggagccgctcacggcgaggctccgtcagctatgcccacctccaagctgcatcatatctgacatggtgcagtggtggaccggtgaaattgcaagggagctcggtatcccaaggctaacatttgatggcttctgtaccttcgcctcccttgccaggtatatcattttccgcgacaaactgttggacaatgtcgcagatgaggagatcgtcactttctcagggttccctatgctgcttgagttgccaaaggctagatgccctggaagcttgtgtgttccaggtatggaacaaattcgtgataagatgtatgaggaggagctgcaaagcgatggcaatgtaatgaacagcttccaggagctggagactctgtacatcgagtcctttgaacagataacaggtaagaaggtctggacaatcggcccaatgtgcctctgtgacagagacagcaacatgatggctgctagaggaaacaaggcatcagtggatgaggcaaagtgcttgcaatggcttgattcaaagaagcctggttcagtgatctttgtcagctttggcagcctcgccagcaccgcacctcagcagcttgttgagctgggactggggcttgaagcttccaaggagcctttcatctgggtgatcaaagcaggaaataagtttccagaagttgaggaatggcttgcagatgggttcgaggaacgcgttaaagacagaggcatgataataaggggctgggcaccacaggtgatgatcctatggcaccaggccattggagggttcatgacacaytgtgggtggaactcaacaatagagggcatttgcgcgggcgtgcccatgatcacatggccacatttcgcagagcagtttttgaatgagaaatttgtggtgaatctgctgaaaattgggctggagattggagtgaaaggagtggcacaatggggaagtgaacataaagaagttagggtgaccaaggaatgctgtggagacagcagtgtccacattgatgaatga

SEQ ID NO: 3802 - DNA, 890 bp, Oryza sativa
atggcagatgatggtttcaaatatcatgaggaatatgttacaaataaacgagggatgaagctctttgcatgccaatggagtcctttagaccatgaaccgaaagctctaatcttcctatgccatggatatgccatggaatgcagcatttcaatgagaggaacaggtgttcggttggcaaaggctggatttacagtgcacggattggactatcagggccatgggaagtccgaaggacttcaaggctatatcaatagttttgatgatgttgttgttgattgctcgaactactttgcaagtgtttgtgaaagaggagagtgcaaaggaaaaaagaagttccttcttggtgagtcaatgggaggcgctattgtgctgatgctacataggaaggaacctacaaattgggatggggctattttggttgcccccatgtgcaagattgtagaagatatgaagcctcgtcccattgtgataacaatcctaagcaagcttagcaacgtgatacctacatggaaaattattcctactgaagatgtcattgataaggcaattaaaagcgaggagtggcgtcaagaggtaagaaacaatccatattgctataaaggaaggcctaggttaaagactggttatgaactttttatggcaagcttggatattgaaagcactcttgacaaggttacactaccattcatcattgtccatggtggtgatgatgccgtcacagatccatcagtaagtgaagaactgtatacatcagctcagagcaaggacaaaacactgaaactgtacccagggatgtgtcacgccctgacatctggtgagcccgcaagcaacattgacattgtatttttggacatcattaagtggcttgatgagagggtatcagtttcata

SEQ ID NO: 3803 - DNA, 1623 bp, Oryza sativa
atggaactacaatcatcatgggctactttctttgccgtcgtgcttgccaccgtcgtcttcctcctccgggccgttctgctccgccgccgccgagcttacaagctgccaccaggaccaaagccatggccgatcatcggcaacctgaacctcatcagctcgctgccgcaccgctccatccacgagatatccaagcgccatggccccatcgtgcagctctggttcggctcctgccccgtcgtcgtcggctcctccgtcgagatggccaagctcttcctccagaccaacgacgcggtgttcgccgaccgccccaggaccgccgccggcaagtacaccgcctacgactgcaccgacatcacctggtcgccctacggcgcctactggcgccaggcgcgcaagatgtgcgccgccgagctcttcagcgccaggcggctcgagtcgctcgagcacatccgccacgaggaggtgcgcgcgctgctgcgcgagctgcacggctccggcgcggcggggaacgccgtgcagctcagagaccacctgtcaatggcggcgctcggcgtgatctcgcgcatggtgctcggaaagaagtacgtcgagaagcagccggcaggaggcggagcggcgatgacgacgccggaggagttcaagtggatgctggaggagctgttcctgatgaacggcgtgctcaacatcggcgacttcatcccatggctggattggctggacctgcaggggtacatcaggaggatgaagaatgtgaacaggttgatacaccggttcctggaccgtgtcctcgacgagcacgacgagcgacggcggctacagggggatggctttgtggccagggacatggtggacattctcttgcagctcgccgatgaccctaacctcgacgttcagcttaccaggaatggtatcaagggtattacccagaaaaacttgtctttgaaaccattagaacttaatgttccatacgtgatagagacatggctcaacgaccttgtcactggtggtgcggacaccagtacggtgaccgtggaatgggccatgtcggaggtcctgaagaatccggcgatcctcgccaaggccaccgaggagctagacaccatcgtcggcgtcggccgcttggtgacggagggtgacataccacacctcccctacatccacgccatcatgaaggagacgatgcgtatgcacccggtggtgccgctgctggtaccccggatgtcccgtgaggatgcctccgtcgccggctacgacgtccccgctggcacgcgcgtgctcgtcaacacgtggaccatcggccgcgacccgtcggtgtgggactcgcctgagcagttccggccggagcggttcgtggggagcggtatcgacgtcaaggggcgcgacttcgagctgttgccgttcagctcaggccggaggatgtgccccgggtacaacctcggtctcaaggtcatccagctcaccctcgccaacctgctgcacgccttctcctggtgcctccccgacggcgtcaccgccggcgagctgagcatggaggagatcttcgggctcaccatgccacggaagatccctctcctcgccgtcgtcaagcccaggctgccagaccatctctatgccgagccttaa

SEQ ID NO: 3804 - DNA, 2439 bp, Oryza sativa
atgaacgtgtctcgccgaccggccgacacagcgcgcatcctcggaggcggccgtccgcgcggttggttaagggggccacttgccggcggaaaagggaagaggcgaccagccgcgaagacgaccccagcgacgattacgaccgtgcagcgcgcggcggaggccgatcccgcgagcaggaagctcttcatccacggcctcggctggggcgccaragccgatgacctccgctccgcgttctcccgcttcgacttctttctcttccgsgtcctctcttccgkcggcttcgcgctcggcaaatcccgcgtgttcgtcctcctcctcctcctcctccttagtccaaccctcgtcgtccaatctccggctcttctcctaacgacgtcgcggtggaggagggcacggtgctgtgcattccaccgaggatgctgcacggcgcgtccatggagttgcttagtttgcgttctgtttggtcttaattttgtttatgtgcctaatcatacaaaggtcgacgatgaggactccaactacaactcctgctccgccgctgccgacgacaccgccaataccgtgggaccgagtattaatagtatagcagcaaaatactggagaactgtactactactaataaaactatcaagcattaaccaaacgaataatgaaggaaggaaaaggcaggatccgaagaatcagcaggaccatcccggttgctatagccagtgtgggggcagtggcagtggcaggagtaaatctatcggagtcctgccttcccagcaggagcagcagagtcgcggcgccagagcgacgctggctgcagcctgcatatccaagtacttcgccagcttccgcggcgcktcgcagcggcatgatgaggcggggtacgcgcccgttgccaccagcgccgccgccgccgccgccgccrataagccggccgggaagaargccccgcgcggttctacagcgrcggcggacgcgccgaaagccgcttccatgaascccggggccccggcgcccgcgaatctaacggccaacgtgctcgggcacccgaccccgagcctgagcgagcactacgcgctcgggcgcaagctcgggcaggggcagttcggcaccacctacctctgcaccgacctcgccaccggggtggactacgcctgcaagtccatagccaagcggaagctcatcaccaaggaggacgtcgaggacgtccgccgcgagatccagatcatgcaccacctcgcgggccaccggaacgtcgtcgccatcaagggcgcctacgaggacccgcagtacgttcacattgtgatggagctctgcgccgggggcgagctgttcgaccgcatcatcgagcgcgggcaattcagcgagcgcaaagcggccgagctcacgcgaatcatcgttggtgtcatcgaggcgtgccactcgctcggggttatccatagggatctcaagcccgagaacttcttgctggcgaataaagacgacgatttgtcgctcaaggccatcgatttcggcttgtctgtgttcttcaagcctggtcaagtttttactgatgttgttggaagcccatactacgtggccccagaagtgttgcgtaaatgctacggaccagaagctgatgtttggacagctggtgtgattctttacatactattaagtggtgtaccgccattttgggcagagacgcagcaagggatatttgatgcagtgttaaaaggtgtaattgattttgattccgatccctggcctgtgatttctgatagtgcaaaggatcttataagaagaatgttgaatcctcgccccaaggagcgcctaacagctcatgaagttttatgtcatccgtggatttgtgaccatggagtcgctcctgatcgacctcttgatcctgctgtactttctcgcattaagcagttttcagcaatgaataagttaaagaagatggctttgcgagtaattgctgaaagcctttcagaggaggagattgcaggattgaaggaaatgttcaaggcaatggacacagataatagtggtgcaattacatatgatgaactcaaagaaggcatgagaaaatatggctcaacactaaaggatactgagattcgtgatcttatggaggcggcggatgtggacaacagtggaaccattgattatatagaattcattgctgctactctgcatctcaataaactagagcgagaggaacatctagtggcagccttttcttatttcgacaaagatggcagtggttatattacggtggatgagcttcagcaagcttgcaaagagcataacatgccagatgcttttctcgatgacgtcattaaagaagctgatcaggataatgatggtcgcattgactacggggaattcgttgccatgatgacaaagggcaatatgggtgttgggaggagaacaatgagaaacagcttgaatataagcatgagatga

SEQ ID NO: 3805 - DNA, 2730 bp, Oryza sativa
atgttctcgtggttgttgaggattgcgtccgcgtgcttgggcccggcccggaggtacgcgcgtacgaggaaggatgaagatggcggcgataatggcggcggcgtcgccgacggcctgctgtggtcgcgggacctggggcgtcacgcggcgggtgagttctcctttgccgtcgtgcaggccaacgaggcgttggaagaccatagccaggtcgagacgggctccgccgccaccttcgtcggcgtctacgacggccacggcggtgccgatgctgctcgcttcatatctgatcacctcttcgcacacctgatacgacttgcccgagaaagtgaaacagtatcggaggaagttgttcgaggggcattttctgctaccgaagaaggtttcttgacacttgttcggagaacgcagtttttaaagcctatgatagctgcagttggatcttgttgtcttgttggtatcatatggagaggggtactatatgtggctaatttaggtgattctagggcagttgttggctatttgggtagaacaaacaagattactgctgagcaaattacaagggatcataatgcttgtaaggaggaagtgaggcaggaacttatttctcgtcatcccgatgattcacaaattgttgttctgaagcatggcgtttggcgcataaaaggcataatccaggtttcaaggactataggtgatgcatatttaaagaggcgtgaatttgctcttgatccatccataactcgcttccgcctttctgagcctcttcgccgacctgttctaacagcagagccatctatctgcacaagagttcyttctctgcaagatcawtttgttatatttgcatccgatggtctttgggagcacttaacaaaccaacaagctgttgacatcgtctacaaaaatccacgagcaggaattgcaaagaggctagtaaacacagctttgaaagaagctgcacggaagcgagaaatgaggtttgttgatcttaagaaagtcgaaaaaggggtgcggcgcttcttccatgacgacattacagtcgtcgttgtttacatcgaccatgagttacttcaggagaaaaatgtttctgttcctgaactttcagtccgtgggtttgtcgactcagctaatgatggtgttagtgtcaggtatcaccacgtgggcattctataccattatttatgtgaaccactactgaagagacttggattctatcaagtttcccagatggttgggatgagtgttgatagatttctaattggagcattagtagagagatggcggcctgagactaacacatttcacttaccagttgragagatgacagttagcctacaagatgtgagttgtctatggggcttaccaattcaaggtgagcctattataggcaagttagaggggccatgggttgatgaaattgagacattactaggagttactccaggaaaacaagtgatgaagcaaaaaaagcgaaaggcggayggtgacttggaaagcgggggaaakatgacatcttctaactactccatcagcttaaagaaattacgagatcagttcaaggagatgccagaaaatgcaacaaaagaacaaattgaacattacacyagggcattcattttggatattcttgggtcaatgattttcccggatacatcaggagatggagtgcctgcaatgtacctgcaattccttcaggatcttgataaaccaaaggagtacaactggggggcarcaactcttgccgtgctatatagayaattaagcttcggtgcagaacgagagagattggagatggctggtccattagtgcttctgcagcattggtgttggtcgcggttgagaccaggacgaccagtggatcaagataggaaccctattagttggggagagccagaccctgagagttgtcctacatttggagcaaaatggtgtggccaggaactttatcctctgccacataactcgggtgttgcgttttatcrgaacttgctggatcaagttcaagacaatgaggtctcttgggaaccatataatggactattgatgtccatgccaagaagagttagagctgaacgtgctttctggtatagtcgagtacctctcatccatttttggatcattgaatttcattatccagatagagtgatgagacaactagggagaaagcaaaccattccacctcctcccccacatgatgagagcaagcttcgtcaactccataaaataaatcatacagggaaaccacgtgattggaggaagctccacgcagaatatgttaaccaatacaatagaatttggcaaagcatggttgatgaggagcaacattttgaccaggcaagtttgccacaatatcgtcattggtttcaacagtatgggatgtacactgtttttttggatgctcggtccgctcaaggtttgtgggatcccatcccttatccactggataacttcgattggaccggttacatgcccagtggtccacctctctcccgattggatatcaatatggaggctaagttaagcagcatgctaagcgagtcaggtctacctttatgtgtagatgacattcgatctgatgatagtgcatcaccattttctacccctaaaccaattaaacctgaggagataaacatggatgtgatggatgactggttgtactcaaacaggggatttacaagataccttagtttaggtacagattctgatgtgctggaatctcaggataaacattga

SEQ ID NO: 3806 - DNA, 1110 bp, Oryza sativa
atggctctgatgaagagatgcttctgtggatcccaagaagatatcaaagagcttctgaacttgaaaaatgtccagctattctcctatagagagatcagagcagcaacaaacaacttcgacgatggcaacaagataggccgaggtggatttggaactgtgtacaagggaacttttgaagatggtactgcatttgctgcaaaggttctgtctgctgaatctgaacaagggatcaacgaattcctgaccgaaatcgagagcattactgaagctaagcacgcaaaccttgtcaggttgctgggctgctgtgttcagaggcaaaacaggatcctgatttacgagtacgtcgagaacaacagccttgacaatgcattgcagggttcagctgctggagtaactgacctcagctggagcacaagatcggacatctgtatgggagtggccaagggactgagctatcttcacgaagagcacgagccaagcattgtgcacagagacatcaaggctagcaacgttctccttgacagaaactacatcccaaaaatcggagactttggaattgccaagctgttcccggacaatgttagtcatgttagcacacgtgtgattgggacaactggctacatggcacctgaatacgtcgtgcacggacagctgacgaagaaggcagatgtctacagcttcggagtgctcattcttgagatcatcagtggaaggaggatgtcgcagaccattcgatcaggcatgtttctcgtgcggcaggcgtggatgctgcacgaacagggcagcctgctggacatggtggatccgagcatgaagggaggttacccggaggaggaggcgctcaagttcatcaaggtggcgctggcctgcacgcaggcgaagccgtgcagccggccgacgatgcggcaggtggtgaagctgctgtcgcggccggtgtgcttggaagagctggagatgctctgcccgggcttcgtcggtgacggccacacccacgacgctgcggcggcggacaccgtcggtagcccaggcgtgatggtcgtctcgccggctctctcgccgaaggtgaggtggccgacggggaccgcaacgaccactactaccgaacactag

SEQ ID NO: 3807 - DNA, 1455 bp, Oryza sativa
atggcgaggagtggtggggagttggtggtggtggaggaagacgatgagtacgccaagctggtcaggaggatgaacccacccagtgttgtgatagacaatgactcgtgcgacagtgcaactgtcatccgggttgatagggtcaagaagcatggcattttactggaggctgttcaagtacttgtggacctcaacctcgtcatcaccaaggcttacatttcttcagacggcaactggttcatggacgtgttcaatgtgaccgatcaggacggcaacaaggtgcagaacaaggaggtcactgactgcattaagaaatgcttggagtcggaggattacctcgtgctgccggcgagctcgccggccggcggcgctgcgccgtcggaggagaccacctgcatcgagctcaccggcaccgaccggccggggctcctctccgaggtgtgcgccgtgctggcttcgctgaggtgcaacatcgtgaacgccgaggtgtggacgcacgaccgccgcgccgccgccgtcatccagatcaccgacgaggccaccggcctccccgtccgcgacggcgggcggctgtcccagctgcaggagctcctcggcaacgtcatgcagggagacggcgacggcggcggtgacagcaggaagggcagcacggccgtgtcgctgggcgccgcgaacgccgagcggcgcctgcacaggctcatgctcgacgacggcgacgccggccgatgcggcgaggagcggggcggcgtggcggcggcgaaggcgaaggcgaaggtggtggtgatggactgcacggagcggcggtacacggtggtgatcctccggtgcagggaccggccgcggctgctgttcgacacgctgtgcgcgctcaccgacctgcactacgtcgtcttccacggcaccgtcgacgccgagggcggcagccccaaggaggcctaccaggagtactatgtccggcavgtcgacggccacccggtgcgctgcgacgccgagcgcctccgcctcgtccgctgcctcgaggccgccgtcgagcgccgcgcctccgacgtaacgtgcccgccatcagcattcacggcatcgtcattgccattgtcactgatcgtaggcaaggggctggagctggaggtgaagacggaggacagggcggggctcctgtcggagatcacgcgtgtgttccgggagaacagcctgtcgatcatccgggcggtgatcaccaccaaggacggcgaggccgacgataccttctacgtctccgacgcctacggcaaccccgtcgacggcaaggccatggaggcgctcggcgagcagctcggccacgccgtgctgcgcgtcaagagcaacggccgcgccgccatcaaccgcgccgaggacagcggcggcggcggcgcggcggccatcattggcaacctgctcaagggctcgttccaggggttcaggctcatcagatcctactcctga

SEQ ID NO: 3808 - DNA, 620 bp, Oryza sativa
atggacgcggccgagcctggcgccgaggcggactcgggcggcgagcggcgcgtcggcggcggcgggaagctgccgtcgtccaagtacaagggcgtggtgccgcaaccgaacgggcgcgkttccgcggaccgcgacgccgtcaccaacttccgcccgctcgccgagtccgacccggaggccgccgtcgaagctccgcttcctcgcgtcccgctcaaggccgaggtcgtcgacatgctccgcaagcacacctacctcgaggagctcacgcagaacaagcgcgccttcgccgccatctccccgccgccccccaagcaccccgcctcctctccgacgtcctcctccgccgcgcgcgagcacctgttcgacaagacggtgacgcccagcgacgtcgggaagctgaaccggctggtgatccccaagcagcacgccgagaagcacttcccgctccagctccctccccctaccacaacctcctccgtcgccgccgccgccgacgccgccgccggcggcggcaattgcaagggcgtcctcctcaacttcgaggacgccgccgggaaggtktggaaattccggtactcctactggaacagcagccagagctacgtgctcaccaagggktg

SEQ ID NO: 3809 - DNA, 1044 bp, Oryza sativa
atgacgacgagctcatggagcggcctgcttgtgatatcctgtatgttattgatgagctgggcggcggcggcggtggacatgtcgccggtgcggttcgacgccgcctacatgccgctcttcggaggggacaacctcgttccctcgcctcacgcccgcaccgtcctcctcaaactcgaccgcttcaccggttctggattcgtgtccaagtcggcgtaccaccatggattcttcagtgcttccatcaagcttcctcatgactacaccgccggcgtcgtcgtcgccttctacgtatgtcttataccaaccttcttcaattttctaaattatgatatcgctatctccaagttaattcatacgtaccctgtccaatggcgacgtgttcccggggcagcacgacgagctggacttcgagctgttgggcaaccggcgaggccacgcatggcacgtccagaccaacatgtacggcaacggcagcaccgggcgcggccgcragagcgctacctcctccccttcgaccccamcgccgccccgcactcgtacgccatcgcctggacccccgscgccgtcatcttctacatcgacgccatccccatccgcgagctcgttcgctgctcctccggcgactaccccgccaagcccatgtccgtctacgccaccatctgggacggctccgcctgggccaccgacggcggcaggcacaaggtcgactacgcctacgcgcccttyaccgccgtcttctccgacctcgtcgtcaccggtggtactgacgacgaccactgcgccgccatgggcctgatgacgtcggaggtggccgtgatgacgccggcgaagcgcggctccatgcggcggttccggtcgcggcacctgacgtacagcgcgtgctacgacacggtgcgctacaacggcaccggcgtcgtcttcccggagtgcgacgagtcggagcaagacaacttccacgcatggggcgagtccaagcgtgtcatcaacagcagatccagttccagcgccacatacgccactggttcaggcgtgcgcatcgactaa

SEQ ID NO: 3810 - DNA, 1310 bp, Oryza sativa
atgaagaacaccagcagcttgtgtttgctgctcctcgtggtgctctgcagcttgacctgtaactcgggtcaagcacaggtcctcttccagggtttcaactgggagtcgtggaagcagcagggtggctggtacaacatgttgaaaggccaagtcgacgacatcgccaaggccggggtcacccacgtctggctgccgccgccgtcgcactccgtggcgccgcaggggtacatgccggggcgtctctacgacctggacgcgtccaagtacggcacggcggcggagctcaagtcgctgatcgcggcgttccacgggaagggcgtccagtgcgtcgccgacgtcgtgatcaaccaccggtgcgccgagaagaaggacgcccgcggcgtgtactgcgtgttcgagggcgggacgcccgacgaccgcctcgactggggccccggcatgatctgcagcgacgacacgcagtactccgacggcacgggccaccgcgacaccggcgaggggttcggcgcggcgcccgacatcgaccacctcaacccgcgcgtccagcgggagctcaccgactggctcaactggctcaagtccgacgtcggcttcgacggctggcgcctcgacttcgccaagggatactccacggacatcgctaagatgtacgtcgagagctgcaagccgggcttcgtcgtcgccgagatatggaactcgctgagctacaacggcgacggcaagccggcggccaaccaggaccagggccggcaggagctggtgaactgggtgaacgccgtcggcgggccggcgatgacgttcgacttcaccaccaagggcctcctgcaggcgggcgtccagggcgagctgtggcggctgcgcgacggcaacggcaaggccgccggcatgatcgggtggctgccagagaaggccgtcacgttcgtcgacaaccacgacaccggctcgacgcagaagctttggccgttcccctccgacaaggtcatgcagggctacgcctacatcctcacccaccccggagtcccctgcatcttctacgaccacatgttcgactggaacctgaagcaggagataaccgcgctggcggcgatcagggagaggaacggcatcaacgccgggagcaagctccggatcgtcgtcgccgacgccgacgcatacgtcgccgtcgtcgacgagaaggtcatggtgaagatcgggacgaggtacgacgtgggcaacgcggtgccgtcggatttccatcagacggtgcacggcaaggactacagcgtctgggagaaggggtccctccgcgtcccggcggggcggcacctata

SEQ ID NO: 3811 - DNA, 1596 bp, Oryza sativa
atgggcaagcaccatgtcaccctgtgttgtgtcgtttttgctgtgctctgcctggcgtccagcttagcacaagcccaagttctcttccaggggtttaactgggagtcgtggaggaagcaaggcgggtggtacaactttctgcacgagaaggtggaggagatcgccagcacgggcgccacccacgtctggctcccgccgccgtcgcactctgtctcgccgcagggttacatgccggggcggctctacgacctggacgcgtccaagtacggcacggaggcggagctcaagtcgctgatcgaggcattccacgacaagaacgtcgagtgcctcgccgacatcgtcatcaaccaccgctgcgccgactacaaggacagccgcggcgtgtactgcgtgttcgagggcggcacgcccgacggccgcctcgactggggccccgacatgatctgcagcgacgacacgcagtactccaacggccgcggccaccgcgacaccggcgccgggttcggcgccgcgcccgacatcgaccacctcaacccgcgtgtccagcgggagctcaccgactggctcaactggctcaggaccgacctcggcttcgacggctggcgcctcgacttcgccaagggctactccgcgccgctggcgaggatctacgtcgacaacaccaacccgacgttcgtcgtcggcgagatctggagctcgctcatctacaacggcgacggcaagccgtcgaccaaccaggacgcggacaggcaggagctggtgaactgggtggagggcgtcggcaagccggcgacggcgttcgacttcaccaccaagggcatcctccaggccgccgtgcagggcgagctgtggaggctccacgacggcaacggcaaggcgcccggcctcatggggtggatgcccgatcaggccgtaaccttcgtcgacaaccacgacaccggctcgacccagtcgctctggccgttcccttccgacaaggtcatgcagggctacgcctacatcctcactcaccctggcatcccatgcatcttctacgaccatgtgttcgactggaacctgcagcacgagatcgcgacgctggctgaaatccggtcaaggaacgggatccatgcggagagcacgctggacatcctcaaggccgagggggacatctacgtcgccatgatcgacggcaaggtgatcaccaagctcgggccgaggtacgacgccggcgggatcatcccctccgacttccatgtcgtggcgcacggcaacgactactgcgtctgggagaaggaaggcctcaggaacttgatacagctctcggtcgaggagtccaggctcctacaagcaatggacaacgtcaacggggccataggcatggagagctggtttcagaggggcgcaccgtggggcggctcaacggtaaaggcacggagaaggaatgacacaatgtttgcaccggtgaccgaccaatgcgcacaaggtggtgagagcggagccacaagtggagaggtgacggaggccagtggagtgggaggacgggcacaggagaaaggagaagagaggaggaagaggaaagtgctaggcattaacatgtggggcccgcatgggtga

SEQ ID NO: 3812 - DNA, 783 bp, Oryza sativa
atgtcgcctgctgaggcatcgcgtgaggagaatgtgtacatggcaaagcttgccgagcaggctgagcgttacgaggaaatggtcgaattcatggagaaggtggcaaagaccactgatgttggtgagctcaccgttgaggagcggaacctgctttctgtggcttacaagaacgtgattggtgctcggagggcatcgtggaggatcatctcttctattgagcagaaggaggagagccgtgggaatgaggcatatgttgcatcaattaaggagtaccgtagcaggattgaaactgagctcagcaagatctgtgatggtatccttaagcttctggattcccaccttgtcccatctgccactgctgcagagtccaaggtgttctacctgaaaatgaagggtgactaccacaggtaccttgctgagtttaagtcaggagctgagaggaaggaagcagctgagaacactcttgtggcatacaagtctgcccaggatattgcactcgctgacctgcctacaactcacccgataaggcttggacttgcactgaacttctcagtgttctactatgagatactgaactcaccagaccgtgcttgcaaccttgcaaagcaggcgttcgacgatgctattgctgaactggacactcttggcgaggagtcttacaaggacagcaccttgatcatgcaacttcttcgtgacaatctgactctctggacctctgacaatgcggaggatggtggtgacgagatcaaggaagcagcgaagcctgaaggagagggccactaa

SEQ ID NO: 3813 - DNA, 708 bp, Oryza sativa
atggccggagcaggagatgagctgaagctgctgggcatgtggacgagcccgttcgctctgcgagtgaagcttgcgctcagcttcaagggcctgagctacgagtacgccgaggaggacctcagcaacaagagcgagctgctgctcagctccaacccggtgcacaagaaggtgcccgtgctcatccacaacggcaagcccatctgcgagtcgcaggtcatcgtgcagtacatcgacgaggcgttccccggcgccggcgtgcccttcttcccttcsgacccctacgagcgcgccgtcgctcgcttctgggccgcctacatcgacgacaagctgttgaagtcgtggctgcaggcgtcgatgggcaagacggaggaggagaaggcggaggcgttgaaggagacgttcacagcggtggcgaacctggaggcggccttcgaggagtgctccaaggggaagcccttcttcggcggcgacgccgtcgggtacctggacgtcacgctcggcgccctggtcagctgggtgcacgccggcgaggccctgtacgggatgaggctcttcgatgccaccaggagcccgctcctggacgcgtgggtggaccgcttcgccgcactggatgcggccatggcggtcttgccggacgccggcacattagccgagtacgccaagaagaggcaggcggagcgggcagccgccgcggctgcgaacaactga

SEQ ID NO: 3814 - DNA, 702 bp, Oryza sativa
atggccggtggaggagatgagctgaagctgctggggatgtgggcgagcccgttcgcgctgcgagcgaagctcgcgctcagcttcaagggcctgagctacgagtacgtcgaggaggatctcaagaacaagagcgagctgcttctcacctccaacccggtgcacaagaaggtacccgtgctcatccacaacggcaagcccgtctgcgagtcgcaggtcatcgtgcagtacatcgacgaggcgttccccgacgccggcgttcctctcctcccatccgacccctacgaccgtgccgtcgctcgcttctgggccgcctacatcgacgacaagctgttgaagtcatggctgcaggcgtcgatgtgcaagacggagcaggagaaggcggcggcgatgaaggagacgttcgcggcggtggcgaacctggaggcggcgttcaaggagtgctccaaggggaagcccttcttcggcggcgacgccgtcgggtacgtggacgtcacgctcggcgccgtgatcgggtttgtgcgcgtcggtgaagccgtgcacgggatgaggctgttcgatgcgagccggagcccgctccttgacgcgtggctggaccgcttcgccgcgctggacgctgccaaggcggtgttgccggacaccggtaggctggccgagtacgccaagatgaagcaggcagagtgggcagcagctgccaccaactga

SEQ ID NO: 3815 - DNA, 3530 bp, Oryza sativa
atggaggaagcggcggcggcggcggcggatttcgatggcggcttcggcggcgccggggaggacaacctgtccatgcccctcggcgacttcatggccttcctcgataacgaggactggaaggagcagcagcacgagtggcgatgggctataaatggccatcaggctgttgggattggagaaggtcaaacaggaagcagcttggtaatgaatggtcaagcattacaaacaaaaactcaaaacgacaagtattttgggacggagggcaatcaaggtttagagatgccagtggacagcacaagttctgaaaatgcatttcaaaaccatgaagattttttggaaaattcaaggaatggtaatcctgagatgcatttaccaatggatgcattaaaccatgctaaaactgttgatgaagaaattgtccctccatatgaagattatacaaatggtttatactatgattcgggatgtgatatgttcgcagagcaatctggtttaagtgaagttaaatgtgagggcacaggtcccatgcttggtaattctgagcaggagggtaaccatttcacgtcagtgcctatgtttgaccatagtgctgttatacctgatattccttacaccgagttgaacatcggtgatgtgcctggaagcatgcagaatggaaatggcagttgcctaactgtacaaggagaatatctgcagggggagtatcaggagtatcctcagccagattatggatcgtttgatatggctaatgaaatagtgctgcatgatttgccacaaaacaatcagtcatatgagctggaacaattaccacagaatatatgtgaaagcagttcaatgcaagtgggctctccagatcaatattgtgatgatacatctctgtcggattattacatggatgatgtatcttcgatagagtcgatgtccagcgagcagaaccgatcagaagatatctgtttccggagtgagtctagcactgactcttctccggtgccctcaagcagaaactccaccactgaggatgctgataaatactttggagatgcaccaaaacatttgcagaattccatgtttcctgtcagtacccaacaccaacactcattcatgaactcaagtgatccaatgcatccaacttttcataaaaagtatgacattcctagaaatggcagctcttctattctgggtaactcatcaaggaattgcttcagtttagatagcaatcgtgattctgatttatgtattcttgagggtagtagaagtcttgctagtggacatgtgttgccaccccaaggattgcagcataactttcaacaatctgtgtgtgccaatcctaatcttcctcggtttggagggagatacaggccgcatgaggaaagaatgactttgcggcttgcattacagccattacttgatgcacctcttgcatccagtttgcttgatatttctcagccaaagtctgaggctaatccacctgatggagttttagcagttcctttattgaggcaccagaaaattgccttgtcatggatggtacaaaaggagagaaatggttcgagttgctctggcggaattcttgcagatgatcagggcctgggtaaaacagtgtcgactatatcactgattttgacagaaaggtcaccagttccatcttcagctgttaagcaagaaccatgcgaagctgtaacccttgacgatgacgatgaggatgacgatgctgagcctcatttgaagaaaccggcactagcacatctagcagatacatgtaaacctgaagcgacaagtagtaccattaagacagaaaatcctattgcaaatgttaaggctagaccagctgctgggactttggttgtttgccccacgagtgttctacgtcagtgggcagatgaactgaggaataaagtcaccagtaaagctaacttgacctttttagtatatcatggtagcaaccgcacaaaggatcctaatgatcttactaaatacgatgtcgtgttaaccacatattctatagtaagcatggaagtaccaaaacaatcaagtcctgatagtgatgatgaagagaaagggaagcctgacaggttgctagggcatgctggggtctgcgagccaaaagaagatggtgcttgtcagggacacctatacagaatgctgttgaggatctctatagctatttccagatttctcagatatgatccatatgctgaatacaaaaaattttgcttcatgataaaaacaccaatcagcaggaacccaattactgggtacaagaagcttcaggttgttctgaagacagtaatgctgaggaggacaaaagcaacgatgcttgatggaaaaccaataatctcattacccccaaagaccgtctctcttaagacagtggacttcactagtgaagagcgtgctttctataacactctcgaagcagaatcacgagagcagttcaaggagtatgcagctgctggtactgtcaagcaaaactacgtcaatatcctgctgatgcttttacggctcagacaggcatgtgatcaccctcacttagttcgaggtcatgagtctacttctagttggatgtcttcattggagatggcaaagaagctgcctgtagaaaggcagcaatcgttgctggtttgcttgcaatcgtgttctgcgatatgtgctctctgcaatgatgcgccagaagatgccgttgttactatatgtggtcatgttttctgcaaccagtgcatactggagcaacttaccggtgatgacagtgtatgtccagtgtccaattgccgagtccgactaaattcaacttccttattctcccgaggcacccttgaatgtgctctgagtagatcaacctgtgagtttctgtctgatgattcctgtgaagacatggtgcaagggaagcaacctagatttgattcgtcttatgcatcttccaaagtgagagctgccctggatattcttctctcgttgcctaaactggatttaacccatatgagtgatgacaaaaataaaattgtgcatcctgacaaaattaacgggaatagtactccctctgaatatgctggcaccaaaataactgagaaggccatcgttttctctcaatggactagaatgctggatttggtagaggttcatttgaaatcttctcatctatcttatcggaggcttgatggaacaatgtccgtcgcagctcgggatagagctgtaaaagacttcaacacaaatccagaggtttctgttatgattatgtctctcaaagctgcaagtcttggtctgaatatggtggcggcctgtcatgtacttttgcttgatctttggtggaatcctactacagaagaccaagctgttgacagagcgcatcgtattggccaaactcgacctgtcacagtgtcacggttaaccataaaagataccgttgaagatcgtattttggctctccaggagaaaaaacgggagatggtggcttctgcatttggggaagacaaatctggtgcccatcaaactagattgacggtggaagacttgaactatttgtttatggttta

SEQ ID NO: 3816 - DNA, 666 bp, Oryza sativa
atggtgcaacagacagcagagaggaggttgctggcaaaggccctagaagatacggacaaccaactatttgttttgctttctgacagttgtgttcccctacacaattttgactatgtgtacgacttcttgatgggatcaagacacagttttcttgactgctttgatgatcctgggccacatggagtatttagatactcgaagcatatgttgccagaagttcgagagattgattttagaaagggctcgcagtggttcgcaatcaagaggcaacatgcaatggtggtggttgcggatagtctgtattacacaaaattcaggcgtttctgcaagtgtttttttctcctttcgcagccaggaatggaagagggtcgcaattgttatgcagatgagcattacttgccaacactattccttatgatggaccctgctggaattgctaattggtctgtgacttatgttgattggtctgagggaaagtggcatcccaggtctttccgagctaaggatgtaacttatgaactcctcaagaatatgacaaaagagctcttgcagaggccttgcttgtggaatggactaaagagaccatgctacttgtttgcaaggaagttctacccagaaactttgaacaatctcatgtacttattctctaactacaccattttctaa

SEQ ID NO: 3817 - DNA, 3027 bp, Oryza sativa
atgccatctcaggtcatggatcagaggcatcacatgtyccagtacagccaccccaccttggctgcatcctccttctcggaggagcttcgtctccccacagagaggcaagttggattttggaagcaggagtcattacctcatcacatgggaagcaagtctgttgcatcttcaccaattgaaaaacctcaacctattgggacaaggatggctggtcgactagaacttctacaaccatataaactaagagaccagggagctgcatttagccttgagcacaagctattcggtcaagagaggcatgctaacttgccaccatctccttggagacctgatcaagaaactggccgccaaactgattcatctttgaagtcggcagctttattttctgatgggaggattaatccgaatggtgcctataacgagaatgggcttttctcaagctctgtatcagatatttttgacaagaaattgagattaacatccaagaatggtcttgtcggtcagtcaattgaaaaggttgacctaaaccatgttgatgatgagccctttgagttgaccgaggaaattgaggcccaaataattggaaatcttcttcctgatgatgatgacctgttatcaggtgttgttgatgaagttgggtatccaaccaacgctaacaaccgggatgatgctgatgatgatatattctacactggaggcgggatggaactcgaaactgatgaaaataaaaaactgcaagaatttaatggcagtgctaatgatggaattggtttgttaaatggtgtgttgaatggtgaacatctataccgggaacagccttcgagaactctttttgttcgaaacattaatagtaatgttgaggactctgaattgaagctcctatttgagcatttcggagatatccgtgccctttatactgcctgtaaacatcgtggttttgtgatgatatcttactatgatataaggacatccttcggagaaagtattaaccagggaactattgtactttttaacgttgacctatctttaacaaatgatgatctacataagatctttggtgactatggtgaaataaaggagattcgtgacactccacagaagggtcatcacaaaataatagaattttatgatgtcagagcagctgaagctgcacttcgtgcattaaacaggaatgatattgcaggcaagaaaatcaaattggagaccagccgtctgggtgctgctaggcgacggcttgaggttaggaaagggacaaaagtccacctacctcactgtttgggggactcacatagcagtggtgcttgtcgcagcatatgtcttcagaattgtgtcaggaagagtttggtgtatgcaaactggggagtccaagcacaagtagccctccaattgcttcgtttggtgcattttctgacacggatggttatattgcaaggttctactaatttggcaacaataacttcaactggtcatgaaaatggaagtatccagggtatgcattctggacttcagacatcaataagccagttcagagaaacatcttttccaggcctatcttctaccataccacaaagtttgtccactccaattggaatttcatccggtgcaactcatagtaaccaggctgcccttggtgagatcagccaatctctaggtcggatgaatgggcatatgaactatagttttcagggcatgagtgctcttcatcctcattctctgcctgaagtccacaatggagtgaacaatggtgtcccttacaacttaaacagcatggcacaagttgtcaatggaaccaactcgaggacagctgaagctgtggacaacagacatctccataaagtgggttccggcaacctcaatggacattcatttgatcgtgcggaaggagctcttggattttcaagaagtggaagttcttctgtccgtggtcaccagttaatgtggaataattcaagtaacttccatcatcacccaaattctcctgttctatggccaagccctggatcatttgtaaacaatgttccatctcgctcccctgcacaaatgcatggagttccaagagcaccatcgtcgcacatgattgacaatgtgcttcccatgcaccatctccatgtaggatcggcaccagcgatcaacccatcactttgggataggcggcatggctatgcaggggaattgacagaagcaccaaatttccatcctggtagtgtgggaagcatgggatttcctggtagtcctcagcttcactcgatggagcttaataacatataccctcaaactggagggaattgcatggacccaactgtgtctcctgcacagattggtggtccatctcctcagcagagaggttcgatgttccatggaaggaatcctatggttccccttccatcctttgattcacctggtgaacggatgaggagccgaagaaatgattcaaatggtaatcagtctgataataaaaagcaatatgagcttgatgttgaccgcattgttcgtggtgatgactcccggactacgctgatgataaagaatatcccaaacaagtacacctcaaagatgcttctagctgctattgatgaaaatcataaagggacttatgattttatttacctaccaattgacttcaagaacaagtgcaatgtaggctatgctttcatcaatatgaccaatcctcagcatatcattccattttatcagacgttcaatggcaagaagtgggaaaagtttaacagtgagaaagtggcatcacttgcttatgctagaatccaagggaaatcagctcttattgctcacttccagaactccagtttgatgaatgaggacaagcgctgccgccccatactattccattcggatggtcctaatgcaggagatcaggaaccattccctatgggtacaaacatccgagccaggtcagggagatcgcgagcttcctctggcgaagaaagccaccaggacatctcaatcacctcggttaattgtgacacttctaccaatggagttgatactacagggcctgccaaggactga

SEQ ID NO: 3818 - DNA, 1995 bp, Oryza sativa
atgcctccgttccacgattacagagatggtggtgttcttgtgatggagccggcggcgtcggcggctctgttcggcggcgtcaggtcgcggaagcgggcgcgggtcaccgccgtgccgccctgcggcttcgtctccgccgccgcggaggcggtgraggtggtggaggaggaggggttgacggcggccaagaggcagaagcagcagcagcagcagcgggaggcgccgtcgctcgacgctctccccgacgagtgcctcttcgagatcctccgccgcgtgaagggcgcccgcgcccggtgcgcctccgcggccgtctcccgccgctggctcgctctcctcggcggcatccgctcgtcggagatcaagcgagagccggcggcggcggcggtgccggacctcaaccaggtgttcgtcgacgaggacgaggaggaggaggacgagttcgaggtcccccttggcggcggctgctcctccgagaggtgcctcgaggggcgcgaggccacggacgtcggcctcatggcggtggccgtcgccgacgcgctccggggaagcctcgagagcctcgtcatccgtgggagccacccgacgcgcggcgtcaccgacgccggcatctcggccgccgcgcgcggctgcccgtcgctcctctsgctcgccctgtggcatgtccctcaggtaaccgatgccggcctcgccgagatcgccgccggctgcccctcgctggcgaggcttgacatcaccggctgcccgctgatcaccgacaagggcctcgctgcaattgctcagggttgcccggacttgaaggtggtgaccgtcgaggcatgccccggtgttgctgacgagggcctcaaggcgattggccggtgctgcgcgaagctgcagtcggtgaacatcaagaattgcgcgcatgtcggtgaccagggtgtctccggccttgtctgctccgcggccgcatcgcttgccaaggttcgcctccagggattgagcatcaccgatgcttctctttcggtgattgggtactacgggaaggcgatcaccgatctcaccctcgctcgccttcccgcggttggcgagaggggtttttgggtgatggccaacgcccttggcctgcagaagctcaggttcatgagtgtcagctcctgcccgggagtcactgatcttgcgctcgcatcgattgccaagttctgcccgagcttgaagcagctcaacctcaagaaatgcggtcaggtctcggatggccgtctcaaggatttcgcggaatcggcaaaggtcttggagagtttgcagattgaggaatgcaacaaggttactctcatgggcattctggccttcctcctcaactgcagcccgaagtttaaggccctctcactggtcaagtgcaacgggatcaaggacatctgctctgctcccgcgcagcttcccctgtgcaagtctctccgatccctcaccatcaaggattgcccaggtttcaccgatgccagcttggccgtggtcggcatgatctgccctcagttggagaatgtcgacttgagtggtctcggtgcagttacagacaacgggctccttccattgatcaagagttccgaaagtgggctggtccatgtcgacttgaacggctgcgagaatctcacagatgctactgtttctgccttggtgaaggcacatggtagttcgcttgcacgcctcagtctcgaaggttgcagcaggatcactgatgcaagcctgtttgccatttctgagggctgtaccgatctcgccgaacttgatctctcaaactgcatggtcagcgactacggtgttgcagtgttggcgtcagcgaggcagctcaaacttcgtgtcctctcactttctggttgtttgaaggttacccagaagagtgttcctttcttaggcagcatgtcggcatcgttggagggcctcaatctccagttcaacttcattggcaaccacaacattgcatcgctggagaagcagctctggtggtgcgacatccttgcttag

SEQ ID NO: 3819 - DNA, 2934 bp, Oryza sativa
atgcgccggaacccctcctatgtcgagatcaaagtgcacgacgaaggcgagctggacgtctcatccggcggcgacggcgaggcacccgtggcgttcactgtcgccgcagatgatgagtcgttcaagggactcgtcaagaacaagcgggaggactgcttccgccttctgggcggcggcgccggcgtcgcggcggtgctggcgtccggcgcggagcgcggcatccgcggcgacgatgccgacgtggcgcgccgcaagaaggcgttcggatcgaacacctacccgaagcccaagcccaaggggttcttccgccacgtgtgggacgcgctcgccgacgtcttcctcatcgtgctcctcgtctgcgccgccgtctccctcgccttcggcatcaaggagcacggcatcaaggacggctggtacgacggcgtcagcatcttcctcgccgtgttcctcgtcgccgcggtctccgccgtcagcaaccacagccagggcaagcggttcgacaagctggcacgggagtccgagaacatcatggtcagcgtcgtccgcgccgcgcggcgccaggaggtgtccatattcgacgtcgtcgtcggcgacgtggtggtgctcaagatcggcgacgtcgtccccgccgacggcgtgttcctggacggccacgcgctgcaggtcgacgagtcgagcatgaccggcgagccgcaccccgtcgaggtcgacgccgtcaagagccccttcctcgcctccggcgtcaaggtggtcgacggctacggcaagatggtggtcaccgccgtcgggacggacacggcgtggggcgagatgatgcgcaccatcaccagggagaacaccgacccgacgccgctccaggagcgcctcgaggggctcacctccagcatcggcaaggtcggcatcgccgtcgcggtgctcgtcttcgccgtgctcacggcgaggcacttcaccggcagcaccagggacgagcagggcaacgcgctgttcgacaagaggaatgtcaccttcaacgccgtgttcagcggcctcgtcggcatcttccagcaagccgtcaccatcatcgtcgtcgccatccccgagggcctcccgctcgccgtgacattgacgctggccttctccatgaagaggatggtgagggagaacgcgctggtgcggcggctgtcggcgtgcgagacgatgggctcggtcaccgccatctgcaccgacaagaccgggacgctgacgctgaaccagatgaaggtgacggagttctgggtcggcgccgaccggccaagatccgccgcggcggtgaacggcggcgtcgtgaggttgctctgccagggcgccgggctgaacaccacgggcagcgtgtacaagccggacaacgtgtcgccgccggagatcaccggcagcccgacggagaaggcgctgctgtcgtgggcggtggaggagctccccatggacgccgacgcgctcaagaggaaatgcaaggtggtgcgcgtcgaggcgttcaactccgacaagaagcgcagcggcgtgatgctccgcgacgccgccaccggcgcggtgaccgcgcactggaaaggcgccgccgagatggtgctcgcgaggtgcaccgtgtacgtcggcgcagacggcgccgcgcgcgagctcggcgtggagcagaggaggaagctcgagcaggtgatcaacgacatggcggcggcgagcctccgctgcatcgcgttcgcctacaagcaagtcgtcgacggcggcgacagcgacaacgccaagatcgacgacgaggggctgacattgctgggcttcgtcggactgaaagacccgtgcagaccagaggtaaaatccgccatcgaagcttgcaccaaagcaggcatcgccgtcaagatggtcaccggcgacaacgtcctcacggctcgcgccatcgccaaggaatgcggcatcatctccggcaacgacgacgacgccgccggcgtcgtgatcgaggggcacgagttccgcgccatgtcggagcaggagcagctcgccatcgtcgacaacatccgcgtcatggcgcggtcgctgccactcgacaagctggtgctcgtccagcgcctgaagcagaagggccacgtggtggccgtcaccggcgacggcacgaacgacgcgccggcgctgaaagaagccgacgtgggcctctccatgggagtccagggcaccgaggtcgccaaggagagctccgacatcgtcatcctcaacgacaacttcgacacggtggtgacggcgacgcggtggggccgctgcgtgtacaacaacatccagaagttcatccagttccagctcaccgtcaacgtcgcggcgctcgtcatcaacttcgtgtcggcggtgaccacgggcaggatgccgctgaccacggtgcagctgctgtgggtgaacctgatcatggacaccatgggcgcgctggcgctcgccacggacacgccgacggcggggctgatgcgccgcccgcccatcggccgcgcggcgccgctgatcagcaacgccatgtggcgcaacctggcggcgcaggcggcgtaccaggtggccgtgctgctggcgctccagtaccgcggcttcggcggcgccggcgccggcgagagggcgaacgggacgatgatcttcaacgcgttcgtgctgtgccaggtgttcaacgagttcaacgcgagggagatcgagaggaggaacgtgttcgccggcgtgcaccggaacaggatgttcctgggcatcgtcgccgtcacggtggcgctgcaggtggtgatggtggagttgctgaccaagttcgccggaacggagaggctggggtgggggcagtggggcgcctgcgtcggcattgccgccgtgtcgtggcccatcgggtgggccgtcaagtgcatcccggtgccggagcggccgttccacgagatcatcacggcgaggaggaggaggagaagatcgacataa

SEQ ID NO: 3820 - DNA, 936 bp, Oryza sativa
atggcgccagggagagaagaagagaaaatggtggcgactactacgatagaggacctgcacgccgacgtgctggcgcgcgcgctgcggcggctggacgggcggtcgctggcggcggcgagctgcgccacggcggggctccgggcgctcgccgcggacccggagacgtggcgcgcgctctgcctcgcggattggccgtccatggcggggmacccgcggctgctgtccgtggtcccgccgcgccggytcttcgccgacgcgttcccgttcccgcgcccggacgccggggagctcggcggcggcggcggaggtcccctcccgtcggagctcgtctcggcggtggacgtctactacaggggggcgcccctgctctcccgtgtcgtggagacgcccgcgtcgtcgccgtggttcctcggctcgccgttccgggtggaggccgtggagtgcaagaagccggcggcggaggcggcgctgtctccggcggagctggagctgagctgggtggtcgtcgaccctgcccgcggccgagcggtgaacgtgtccagccggcgcgccgtggcggtggaccggcactggtacaccggcgagacgctggtgaggttcgcggtggtgctgggcgggtgcaagttcgagaccaccgtgacctgctccgagggggccggcaacatcagcgaggtcagcctcgccgtgcaggacgccgacggcgccgcggcgagcggcgagcgaagcctccgcctcctcgctgcggcaatggaggaacagaggataggcggggggagagaacgggacgaggcgaagaggaggtatgacgagttcgtgaagagcaggaaggggaggaaggagagcaaggcgcgacgcgaggcgctcatcgacctgtgctgctccgccgccagcgccatggccgtgctgagcttcgtcgccgccgtggtgctccggtga

SEQ ID NO: 3821 - DNA, 2436 bp, Oryza sativa
atggcgacggcggaggtcggcggcggcggcggtgagggggatgctgctgccgcggcggtggcgcgagcaggcggcggcggcggaggaggaggaggaggaggggaggacgcgctgttcacggagctgtggagcgcgtgcgcggggccgctggtgacggtgccgagggttggggagaaggtgttctacttcccgcaggggcacatcgagcaggtggaggcctcgaccaaccaggtaggcgagcagcggatgcagttgtacaatctcccatggaagatcctgtgtgaggttatgaacgttgagctgaaggccgagccagacaccgacgaggtttatgctcagctcactctgcttcctgaatcgaagcaacaagaagataacggctctactgaggaggaggtgccttctgctccagcagctgggcatgttaggccacgggtgcactcattctgcaagacattgaccgcctcggacacgagcacacatggcggcttctcggtgctgcgacgccacgcggacgaatgcctcccaccactggatatgagccgtcagcctccaacacaagagctggtggccaaggatctgcacggtgtggaatggcgctttcgtcacatattcagaggtcaaccacgaagacaccttttgcagagtggctggagtgtgtttgttagtgccaaacggcttgttgctggggatgcctttatctttctcagaggtgagaacggggaactgcgtgttggagtcaggcgtgcaatgaggcagcaaactaatgttccatcttcagtgatatcaagccacagcatgcatcttggggttcttgccacagcatggcatgctgttaacacagggaccatgttcactgtctactacaagcctaggacaagtccagccgagtttgtggtcccttacgatcgctatatggaatcactgaaacaaaattactccattgggatgagatttaagatgaggtttgaaggtgaagaggctccagagcaaagattcactgggactattgtcggaatgggggattctgatccagctggctggcctgaatcaaaatggcgctcccttaaggtgagatgggatgaagcttcttccatacctcgccctgaaagagtttctccctggcaaatagaacctgctgtaagccctcctcctgtcaacccactaccagttccaagaaccaagaggcttcgtccgaatgctaccgctttgccggctgactcttctgctatagcaaaagaagctgctacgaaagttgtggtcgagtctgaaccaaatggtacgcaaaggaccttccagacacaagagaatgcaaccccaaaaagtggtttcggcaatagcagcgagttagaaagtgctcagaaatcaatcatgcgtccatctggatttgatcgtgagaaaaataacactcccatacagtggaagctaggttcagatggtcggatgcagatgagcaagcctgagagttacagtgagatgctatctggatttcagccacctaaagatgtacaaatcccacagggtttctgttctttacctgagcagattactgcaggccattctaacttctggcacacagtaaatgctcagtatcaagatcaacagagcaatcacaatatgttccccagctcatggtccttcatgcctccaaatactcgccttggattaaacaaacagaactattcaatgattcaggaagctggtgtgttgtctcaaaggcctggaaatacaaagtttgggaatggagtttatgctgcactgccaggccgaggtactgagcaatactcagggggttggtttggccatatgatgccaaattcccacatggatgatacacagccacgcctgatcaagcctaaacctctggttgttgcccatggtgatgttcagaaagctaaaggtgcttcatgcaaactatttggaattcaccttgacagcccagcgaaatctgaacctttgaaatctccatcaagtgttgtatatgatgggacgccacaaacaccaggtgctactgaatggcgccgaccagatgtaactgaagtagagaaatgttctgatccttctaaggccatgaagccacttgatactccgcaaccagactctgttcctgagaagccttcttctcagcaagcttcacgaaacatgtcgtgcaaatcacaaggtgtatcaactagaagctgcaagaaggtccacaagcaaggcattgcacttggcaggtctgtggaccttacaaagtttaatggctatgaagagttgattgctgagctggatgacatgtttgatttcaatggtgaactgaagggtcctaagaaggagtggatggttgtctacactgacaacgaaggtgacatgatgctagttggggatgatccctggatttttgctccagtgcagccagatggaactggctacttatcatgctatcttgcaacctaa

SEQ ID NO: 3822 - DNA, 564 bp, Oryza sativa
atggcggaccagctytccgaagagcagattggagagttcagggaggccttcagcctcttcgacaaggacggcgacggttctatcaccaccaaggagctaggaaccgtgatgcgaagtctagggcagaacccaacggaggcggagctgcaggacatgatcagcgaggtggacacggacagcaacggcaacatcgaattcaaggagttcctgggcctgatggcgcgcaagctgagggacaaggactccgaggaggagctgaaggaggcattccgcgtcttcgacaaggaccagaacggtttcatctctgccaccgagctccgccacgtgatggccaacatcggggagcggctcaccgacgaggaggtcggcgagatgatcagcgaggccgacgtcgacggcgacgggcagatcaactacgaggagttcgtcaagtgcatgatggccaagaagaggaggaagaggatagaggagaagagggaccacgacggcggcagcaggacgaagagtgcagggccctccgccgcgccggcgagcaagcgtggccagaagtgcgtgatcctgtaa

SEQ ID NO: 3823 - DNA, 828 bp, Oryza sativa
atggagtgggcgtactacggcagtgggtactcctcgtcggggacgccgtcgccggtgggcggcgacggggacgaggactcgtacatgacggtgtcgtcggcgccgcccaagcggcgggccgggaggaccaagttcaaggagacgaggcacccggtgtacaagggcgtgcgcagcaggaaccccgggaggtgggtctgcgaggtgcgcgagccgcacggcaagcagaggatctggctcggcaccttcgagaccgccgagatggcggckcgcgcgcacgacgtcgcggcgattgcgctgcgcggccgcgccgcttgcctcaamttcgccgamtcgccgcgcaggytccgcgtgccgccgctgggggccgggcacgaggagatacgccgcgccgcgktcgaggccgccgagctgttccgcccgggcgcccgggcagcacaatgcggctgccgaggcggcggccgctgtcgctgcgcaggcaaccgcggcgagcgcggagctctttgccgacttcccttgctacccgatggacggactggaattcgaaatgcaggggtacctcgacatggcacagggaatgctcatcgagccgccgccattggcagggcaatcgacgtgggccgaggaggactacgactgcgaggctacaaatggtctcatttccagataaacgcggaagcaggaaggggagaggaaaagatcgctatcccagcatttggttgtgatgtcactgctccagaatctttactagtacgactatggacctatggtggattttgttgtttgtccgatggtcctggaatttgttttgagctaattgttgaattttaa

SEQ ID NO: 3824 - DNA, 920 bp, Oryza sativa
atggtgggcttcctccgggccttgaccgccgcctccgctgtgcccgcagcagccgccgtcgcagccgtcgcactctccaccaactcctcctcttcctccagactccggctcccctcgcccgcctcgctcccctccctctcctccgcgtacgccgctgccccggcctccggstccgcccgcaagccgaacgccgtgcctccgatggccgccgccgccgccacggccgatctctctgccgccgccgataagggcgccgcgcttccggagctcatggtggattgcagtgaaaaaccagttccccaccctgaaagactgcctattactacaggaattaaaaacattgaggtggaccttaataatcaagttgttagggttcttggatctctcccagtgaacacaatgctggatactctgcaccaaacaggccgagatgctcgtctaattgggcaagggaacccaaatgattttttagtatctgctgctgtagctgagttcaaagggcctgttatatttggtgttgttcgtctggctcaagttaatatggaattggctatagttgaagccacttttagtggtctatcacctggtaaacacggatggtcaataaatgaatttggggatttgacaagaggtgcagaaagtactggcaaagtctataacccatcggattatagatccaataagcctcttggtgacctgggaacactagaagctggagagaagggtgaagcccaattttcagcttcaaaagagaaactgaaagttgttgacttgattggccgctctattgcgttgtatgccactgaggacagatcagatcctggcattgcagctgccgtgattgcaagaagcgctggggttggcgagaactacaagaagctgtgcacctgtgatggtgtcaccatttgggagtcaagcta

SEQ ID NO: 3825 - DNA, 1068 bp, Oryza sativa
atgccgccgcatcacggcggcctcatggcgcctcggcctgacatggtagcagcggccgtcgcggctaacggcggcggcggtggcggcggcggcccgaccggcggcacggcggttcggccgggctcgatgacggaacgggctcggctggcgaagatcccgcagccggagccggggctcaagtgcccgcgctgcgagtccaccaacaccaagttctgctacttcaacaactactcgctctcgcagccgcgccacttctgcaagacgtgccgccgctactggacgcgcggcggagcgctccgcaamgtccccgtcggcggcgggtgccgccgcaacaagcgcaccaagtcgtccaagtcgtcctcgtcgacgtcggccgccggctsggcttcggcaaccggcggcacgtcgtcgtccacatcgtcgaccgccacsggtkgcagcagcagcgccgcggcggccgcggcgatgatgccgccgcaggcgcagctgccgttcctggcctcgttgcaccacccgctcggcggcggcgatcactacagctccggtgcgtccaggctagggtttcccggattgagctcgctggatcccgtcgactaccagsttggcggcggcgccgcagccgtagccgccatcgggctagagcagtggcgcctcccgcagatacagcaattccccttcttgagccgcaacgacgccatgccgccgccaatgtccggcatttacccgttcgacgcggaggccgccgcmgamgccgccggcttcgccggccagttgctggccggcaccaaggtgcccggctcgtcgggcctgatcacgcagctcgcatccgtcaagatggaggacagcaacgctcagtccgcggcgatgaacagctcgccgagggagttcttgggcctccccggcaacctccaattctggggcggtggcaacggcgcgggacccggcggcaatggagacggcgccaccggcggcagcggcgccggtgtcgctccgggaggcggcggcagcggcggcggatgggctgatctctccggattcaactcgtcgtcgtcggggaacatactgtga

SEQ ID NO: 3826 - DNA, 1629 bp, Oryza sativa
atggcggtacctggacccttgaagcagcagttcagaactgattgcactgagtattttctctggagatatccatttgatggaggtggaaggaaagagaggctagtcaatagccaaaagttatttatgcatcctaggagtgatccagctaacggagctggatcgtctggctatgtgggtaacacaatgagatcgaatgatcttccgtcttcaagttatgctggccaagcttatggtcagcagaatagagcccccatccatgcttcatattctggtcatgcacctgctggaagctctagtggtagctatgcaccatacaatactcaacatatgcctgcttcaagctatccacacggatccgaggataatttcattccaagttcccatgtggatggcagaagggttgcattgaagagaagaaatcccatcattcatcctacagatggattcggtgttggaaattattatgctggcagttcttccaatactcagttctctcggcccatgcctccaaatcctattccacctcctgaatcctgtgttcgaatgccctcacacttgggttcgaaccactggaatgatcaccgctatgttaatcatgaaggatctcagaggaatgtgaggggaagacatgatcatagtactatccatttggaacaaagtccagctgcagcttgcccgtcaagcagcatcaatgtgccaccataccatccaaatgcaaatggtccttttggaagtgcaccagtacaacgtgacagagctcctttatctgtgcatccaagaattcttcctccagggcctgatggtagtagcatagcattcagagagaggccatactatcctgctccacagagcaccaacataagtgcacctgtgccaacgcttcctatttcttgtgacagtgcaccatttgctcatggtgggtacgcccctagatcagctcatcgtaacaacttacgcacttatcctcctccagcttttgcatcttcttccaaccctggagcagtctcccatgagccagctattcctagctatccacctgctgcccctagctatccacctgcaacctctgcagcatcatcaagtgtccagccatttcatgctgaagctgctgcacatttgaggcatccaaggcatgtatctgtagggggcagtggtagtgcaaggagtagaaggatgagggattcctatcatggttttcatcatttgatgattgaagacaataacttgggaagatcagcagctgagcggtttatgatgctggatcagttagttatccatgaatcaagagaagcattcgatcctcactgggacatgagactggacattgatgacatgagctatgaggagctgctggctttggaagaacgcataggccatgtgaacactggcctcgctgatgagaaaatttctggctgtgtgatggaggtagcctgctgcagcagtagtcatttgcaggatgatcaggacaatgaaagatgtgtaatctgcctggaggaatacaagcatgaggacacacttgggaggctgaaatgcggccacgggtttcactgcaattgcatcaagaagtggctgcaggtgaagaacacctgcccagtttgcaaagctgctgccgcagatgaaggcagctga

SEQ ID NO: 3827 - DNA, 2397 bp, Oryza sativa
atggcatccaagctgagtttcaagcgaatggacagcattgccgagacaatgccagatgccctacgacaaagccggtaccagatgaagagatgcttccaaaggtacgtatcaaagggtaagaggctcttgaagaaccagcagctcatggaagagctggaaaagtcactagatgacaaagttgagaaggagaagcttgtcgaaggctttctcggttacatcatttgttcgacacaggaagcagtagtactcccaccgtttgtggcattcgctgtcagaatgaatcctggtatctgggagtacgtcaaagttcactctgatgatctttctgtcgaaggaatcacaccgtcggagtatctcaagttcaaggagaccttatacgatgaaaaatgggccaaggatgacaactcactggaagttgatttcggtgcccttgacctctcaacaccccatttgacactgccctcgtcaatagggaatgggcttcagtttgtctccaaattcatgtcctcaaagctgggtggcaaacctgaaagcatgaagcctctgttggactatttacttaccttgaattaccgtggcgagaagttgatgattaatgacaccatcgacactgtgagcaagcttcagacagcactgctacttgcagaggttttcgttagtgggctgccaaaatacacgccttacttgaagtttgaacaaagatttcaggagtgggggttagagaagggatggggtgacactgcggagaggtgcaaagaaacactaaattgtctgtctgaagtgctacaggcaccagatcctacaaacatggagaagttcttcagcagggttccatccatattcaacattgtcatcttctctattcatggttacttcggccaagaaaaggttcttggattgccggataccggtggtcaggttgtctacatattggatcaagtcagagccatggaagaggagctgcttcaaagaatcaagcagcagggtctgcacgtaacaccgaarattcttgtgcttacaagactgataccagatgccaaaggcacaaaatgcaatgtggagcttgaaccagttgaaaatacaaaatactcacatatactacgtgtgccattcaagactgaagatggcaaggatttgcgccagtgggtgtcccggtttgacatctatccttatctagagagatatgcgcagaactcttgtgccaaaattctcgacattttggagggcaaaccggacttgataattggcaactacaccgatggcaacttggtggcatccctcttgtctaacaaactatgtgtcactcagggaacaattgcacacgctctggagaagacaaagtacgaggattcagatgttaagtggagagagatggaccagaagtaccatttctcttgccaatttaccgccgatatgatttccatgaacaccagcgacttcatcatcactagcacttaccaagaaattgctgggagcaaagagaagcctggccaatatgagcaccactacgcattcacaatgccgggactatgccgctacgccacaggcattaatgtattcgacccaaagttcaacattgctgcacctggtgcagaccagtccatctacttccccttcacgcagaagcagaagcggctgacagatttacacccacagatagacgaactgctgtacagcaaggatgacactgatgaacacatagggtatctggcagacaggaacaaaccaatcatcttctcgatggcaaggcttgataaggtaaaaaacataactgggcttgtggagtggtatggccagaacaagaagctgagggacctcgtcaatctcgtcgtcgtcgcggggctcctggatgcttcgcagtccaaggatcgagaggagatcgaggagataaacaagatgcacaacctgatggacaggtaccagctcaaaggacagatccgctggatcaaggcacagactgaccgtgtccgcaacggtgagctgtaccgttgcattgcagatacaaagggtgcatttgttcagcctgcactgtatgaagcattcgggctaacggtcatcgaggcgatgaactgcgggttgccaaccttcgcaacgaaccagggcggaccagctgagataatcatcgacggtgtctctggtttccacgtaaaccccatcaacgrcagggaggcaggaatcaagattgcagatttcttccagaaatgcaaggaagacccaagttactggaacaaggtgtccactgctgggcttcagcggatctrcgagtggcaaaggctatggcaagagcaggggatcaacaggctcggcaaaccacaacaggcgtggcgcctaaaagccgcagactcggatgcaaaggatcttaaccaggttagccgggcagaagcctccagtttctga

SEQ ID NO: 3828 - DNA, 1590 bp, Oryza sativa
atggccgtctcgctcgtcgtcgtcgtcgtcgtcgtcatcgccatcgtcgtgccgctcctgtacctcgtgctgcttcctgcctggaagccggcgcggcgggacgacggtgacggtggaatgaggaggaggcttccgccgtcgccgccgtgggggctcccgctgctcggacacctccacctgctcggcgccctgccgcaccgggctctccggtccctcgccgcggcgcacggcccggtgctgctgctccgtctcgggcgcgtccccgtggtggtcgtgtcgtcggcggccgccgccgaggaggtgatgcggacgcgcgacctggagttcgcgagccggcccagggtcgccatggccgagcggctgctctacggcggccgcgacgtcgcgttcgcgccctacggcgagtactggcgccagacgcgccgcatctgcgtggtccacctcctcagcgcgcgccgcgtgctgtccttccgccgcgtcagggaggaggaggccgccgcgctcgtcgcccgcgtccgcgccgcgggcggcgccgtcgatttggtcgagcacctcaccgcctactccaacaccgtcgtctccggcgccgtgttcggcgacgagagcgcgcgtggcttgtacggcgacgtcgacagggggcgcgtgctgaggaagctgttcgacgacttcgtggagctactcgggcaagagccgatgggggagctcctgccatggctcgggtgggtggacgctttgaacggaatggaggtgaaggtgcagcgcacatttgaggcgctggacggcatcctcgagaaggtgatcgacgaccaccgtcgccgccgccgtgaggtcggtaggcagatggacgacggcggcggcggcgatcaccgggatttcgtggacgtgttgctcgacgtcaacgagacggacatggacgctggtgttcagctcggcacgatcgaaatcaaggccattatactggacatgttcgcggcgggcacggacaccacgacgacagtgatagaatgggccatggcggagttgatcacccatccggatgcaatgcgcaacgcgcaggacgagatcaaggcggtcgtcggcatcaccagccacatcaccgaggaccacttggacaggctaccttacctcaaggctgtacttaaggaaacgctccggctgcacccgccgctcccactacttgtgccacatgaaccgtcgtcagataccaagatcctgggctatagcatcccggcatgcactcgaatagtgatcaacgcgtggactatcggccgtgaccaggcgacatggggagagcatgcggaggagttcatacctgagagattcctggagagtggcttggactacatagggcaagactttgtgctagtgccatttggtgccggtaggagggggtgtcctggggtcgggttcgctgtgcaagccatggagatggcattggcgagcttgctgtacaattttgactgggagacgagagtggtggataggaggagcgagtttgggacttcatcactagacatgagtgagatgaatgggctttcagtccgtctcaagtacggactacccctcattgctatatcgcgctttccttaa

SEQ ID NO: 3829 - DNA, 1125 bp, Oryza sativa
atggggaactgcgccggcgtgcaggggaacgccgagatcaacccttcgttcagtgctcccaactcgtcagggacaggttccaagaacagcagcaagaacggggccgattccagcacgttcggcaccaaggcgtcggcgtcgtcgtcggtgccgccgactccccggagcgagacggagatcctgcagtcgtcgaacctccgcaagttcaccttcggcgagctcaagggctccacgaggaacttccggccggacagcctgcttggggarggcsggttcggctcggtgttcaaggggtggatcgatgagcgaacgctgacgcccgtcaagccgggcaccggcatgatcgtcgccgtgaagaagctcaagcttgacagcttccaggggcacagggaatggctggctgaggtgaattaccttgggcagctctcccacccaaatcttgtcaagctcatcggctactgcttcgaggacgaacagcggcttctggtgtacgagttcatgccgagaggcagcttggagcaccaccttttcaggaggggatcacacttccagcctctcccatggaatttgcggatgaaggtcgcgctcgaggctgccagggggcttgctttcctgcacagtgatcaggccaaagttatttaccgagatttcaagacatccaacattcttcttgattcggactacaatgcaaaactctctgattttggattggcaaaagatggtcctagtggtgacaaaagccatgtctcaaccagggtcatggggacacaaggatatgctgcccctgaatatctcgcgacaggccatttgaccgcgaagagcgatgtgtacagctacggagttgttcttctggagttgctgtccgggcagcgcgccctggacaagaaccggcctccggggcagcacaacctggtggagtgggctagaccttacatcaccaacaagaggagggtcatccatgtcctcgactcacgcctgggatcccagtattcgcttccagctgcgcagaagatcgcggggcttgcggtgcagtgcctgtcaatggatgcacgatgcaggccgggcatggatcaggttgtgaccgcgctggagcagcttcaaggtgcaaagaaagcagccaagtag

SEQ ID NO: 3830 - DNA, 1194 bp, Oryza sativa
atggcgatgtggagggcggcggcggggcatcttctcggccgcgcgctcggctccagggccgcgcacacatcagcaggcagcaagaagatcgtgggtgtgttctacaagggcggcgagtacgccgacaagaatcccaacttcgtcggctgcgtggagggcgctctcggcatccgcgaatggcttgagtccaaggggcatcactacattgtcaccgacgacaaggaggggctaaacagcggagaattaaggatgatattcatctggttgatggaaggtggaaaggaggttcttgatgtatgtgagctggagaagcacattgaggatatgcatgtcttgatcaccacccctttccacccagcctatgttagcgcagaaaggatcaagaaggcaaagaacctcgagctgcttctcacagctgggattgggtcagatcatattgatctgccagcagctgctgcagcaggtttaactgtggcagaggttaccggaagtaacactgtgtcggtggcagaagatgagctcatgcgcattttgattttgctcaggaacttcttgcccgggtatcagcaggttgttcatggtgaatggaatgttgctggcattgcctatagggcttatgatcttgaaggaaaaactgtggggactgttggggctggtcgtattggcaggctcttacttcagcgtcttaagccctttaactgcaacctgctgtaccatgacagacttaaaattgacccagaacttgagaaagaaattggggccaaatatgaagaggatctcgatgctatgcttccaaagtgtgatgtcattgtgatcaatacacctcttacagagaaaacaagaggtatgtttaataaagaaagaattgcaaagatgaagaaaggtgtaatcattgtgaataatgctcgaggagcaatcatggatacccaggcggttgcagacgcttgctctagtggtcaagttgcaggatatggtggtgatgtctggttcccccaaccagcaccaaaggatcacccatggcgatacatgcctaatcatgccatgacccctcatatctctgggactacaattgatgcacagctgagatacgcagcaggagtgaaggacatgctggacaggtacttcaaaggggaagacttcccggtgcagaactacatcgtcaaggaaggtcagctcgcgagccagtaccagtaa

SEQ ID NO: 3831 - DNA, 516 bp, Oryza sativa
atggcggcggcggagggggagcaggggaagacggtggtggtggtcggggtggacgacagcgagcacagcaactacgcgctggagtggacgatgcagcacctggcgagcggcatggcgggcagcggcggcgccgagctcgtcatcgtccacgccaagccctcgccgtyctccgtygtsggcttcggcgccggccccgggtctggagaggtggtgagatacgtggaggccgacctgcgcaagacggcggaggatgtcgtcgagaaggcgcgccgcctctgcatcgccaacgcgatgcacgcgttgatcgaggtgatcgaaggggagcccaggtacgtgctgtgcaacgcggtggagaagcacagcgcggggttgctcgtcgtcggcagccatggctacggcgcaatcaagagggccttcctggggagcgtcagcgactactgcgcccaccacgcgcactgctccgtcatgatcgtcaagcaacccaaggccaagcgctctcgtgccgagaccgcgtga

SEQ ID NO: 3832 - DNA, 3177 bp, Oryza sativa
atgtcgtcgtccaccagcccttctactgcgccatcggctgagtacgctgagaaaagagtactagtagtggagtggtggactgcgcttcgtgtgcgtgagcgtgagcgtgctcaccggccggggatkgagaagcttgacaggtacctgcaggagcacttcgatgtgccggccaagaacccgtcggaggaggcgcagcggcgatggcggcaagccgttggcaccatcgtcaagaaccgccgccgccgcttccgctgggtgcccgacctcgaccgccgctccttggacaaggccaaggtccgctccacccaggaaaagattcgggttgccctctatgtgcagcaggctgcactcatttttagtgatgatgaactagcattgatcacaagcaagcatgattcgaaagctttaaagatgcatggtggggtagatgggatatctaaaaaagtccgttcatcgtttgatcatggcatatgtgctagtgacttagatacaagacagaacatatatggcgtcaaccgttatgcagaaaagccttcaagaagtttctggatgtttgtttgggatgcattccaggacatgacccttataattcttatggtatgtgcattgctatctgttgcagttggtttggcaacagaaggatggccaaagggcatgtatgatggcttgggtataatactcagcattttcttagttgttatggttactgctgttagtgattataagcagtcactccaatttaaggagctagacaatgaaaagaaaaagatatttatccatgtaaccagagatgggcgtcgacaaaagatctctatatatgacttggtagttggtgatatagttcatctgtcaattggagatcaagtacctgctgatggactatatatacatgggtactcccttttgattgatgagtccagcttatctggtgagagtgacccagtgtatgtttctcaagacaaaccattcatcttggcaggaactaaagtgcaagatggatctgctaagatgatagtaactgctgtcggtatgcgcactgaatggggaaaattgatgagcacattgagtgagggaggagaggatgagacaccactgcaggttaagctaaatggagttgcgaccgttataggaaagattggactggtatttgccatattaacatttttagttctgctggttagattcctcattgacaaaggcatgacggttggtctgctcaaatggtattctaccgatgcattgactatagtaaactactttgcaacagcggtaaccattatagttgttgctgtacctgaaggattacccttggctgttactttgagtcttgcatttgcaatgaaaaagttaatgaatgataaagcacttgttagacatctttcagcgtgcgaaacaatgggatctgctggtaccatctgcacggacaaaacaggaactttgactactaactatatggttgttgacaaaatatggatatctgaggtttcaaagtcagttaccagtaacaccatttcaggagaacttaattctgtggtttcttctagaacattgagtctgcttttgcagggaatttttgagaatactagcgctgaggtggtcaaggaaaaggatggcaagcaaactgtcttaggaactccaacagaaagagcaatattagaatttggcttgggcttgraaggagwtcatgatgctgagtatagkgcctgcaccaaggttaaggttgagcctttcaattcagtcaagaagaagatggcagtgctgatttcattacccartggcacgtccagatggttttgcaaaggtgcatcagaaattattttgcagatgtgcgacatgatggttgatggcgatggaaatgctattcccttatcggaagctcagagaaagaacatcttagatactatcaactcatttgcttcagatgctttaaggacgttgtgcctggcatataaggaagtggatgatgatattgatgacaatgcagatagtccaacaagtggttttactctaatagccattttcggtatcaaggatcctgtgcgccctggagttaaggatgctgttaagacctgtatgtctgctggtatcacagtaagaatggtaactggtgataatataaatacagctaaagctatagctaaagagtgtggaatattgactgaagatggtgtagcaatagaaggaccagaattccatagcaagagcccagaagagatgagggacctgataccgaatattcaggttatggcccgttctttaccattggataaacatacactcgtgacaaacttgcgaggtatgtttgatgaggtggtttctgtgacaggtgatggtacaaatgatgctcctgcattacacgaagcagatatcgggcttgctatgggcattgcaggaacagaggttgccaaggagagtgcagatgtcatagtacttgacgacaatttcactactataataaatgttgcaagatggggtcgtgcagtttatattaacatccaaaagtttgtgcagtttcaattgactgtcaatattgttgctttagttatcaattttgtctcagcatgcatcacagggagcgctcctctcactgctgtgcagctattgtgggtcaatatgatcatggatacactgggagctttagcactagcaacagagcctccaaatgatgaaatgatgaagaggccacctgtccgaaaaggggaaagtttcattaccaaggtcatgtggagaaatatcatgggccaaagtttgtatcagctatttgtacttggagctctcatgtttggtggagaaagccttctgaacatcaagggtgcagattccaaatccatcataaatacactgatcttcaactccttcgtgttttgtcaggtattcaatgaaataaacagcagagaaatgcagaagatcaatgttttccgtggtatcatcagcaattggatcttcattgcagtcatagctgcaaccgtagcatttcaagtggtgatcatagagtttcttggcactttcgccagtactgttccgctcaactggcaacattggctgctcagcgtcggccttggctccatcagcctgattgttggtgtcatcttgaagtgtataccagttggttcaggtgaaacctctgcaactccaaatggatacaggccacttgccaatggccctgatgacatatag

SEQ ID NO: 3833 - DNA, 2409 bp, Oryza sativa
atggcgccaagggaccagtcatgtggggacggcggcgaggtggatccggagggtggcatcgaggcgccactcctctcctccggctcctcgttcttccaggacccggcgcacgaggacggcgatggcgacgaggaggcgcgacggcggcggcggaggttcctcctcgccggscgctcccagtccaacaccacctcccaggtggccctcgtcggcgtcggcgtgtgccccatcgagagcctcgactacgagttgatcgagaacgaagtgttcaagcaggactggagggcgcgggggcggggtcacatcctgcgctacgtggcgctcaagtgggccctctgcttcctcgtcggcgtcctctccgccgccgccggattcgtcgccaacctcggcgtcgagaacgtcgccggcgccaagttcgtcgtcacctccaatctcatgctcgccggcagatacgggacagcgtttgcggtgttcctggtttcgaatttcgcccttacgatgttagcaacggtgctgacggtgtatgtggcgccggcggcggccgggtcgggcatccctgaggtgaaggcttacttgaacggggttgatgcccccgacatattttctctaaagaccctggtggtgaagattgtgggttgcattgctgcagtatcatcatcattgcatgtgggaaaagctggtcctctagtacacacaggtgcatgcattgcatctatacttggacaaggtgggtcaagtaaatatcacctgacatgtaaatggctaaggtacttcaagaatgatagggaccgaagggaccttgttacttgtggtgctggtgctggtattgctgctgctttccgggcaccagttggtggagtcctgtttgctcttgaagcagtgtcttcatggtggaggagtgccctactctggcgagcatttttcacaacagcaatggttgctgttgtgcttagggcattgatagacttctgcaaaagtgacaagtgtggcttgtttgggaaaggtggacttataatgtttgatgtgacttcagattacatcacctaccatttggtcgatttaccgccagtaatcactctaggagttcttggtggagtactaggaagcttgcacaactttttcctggacaagcttactttcaggaaagggcaaaagtacaagctgctcctggctgcagtagtcaccatttgtacatcctgttgtctcttcggcttgccatggattgcttcttgcaaaccttgtccaagtgacaccgaagaagcctgtccatccataggaagatctggtaattttaagaagtatcagtgtgcaatgaatgagtacaatgacttagctagcctgttcttcaacaccaacgatgacaccattagaaacctttacagtgctggcactgatgatgaattccatatctcttcaatacttgtcttcttcttcacatcgtatttcctgggcattttcagctatggccttgctttaccatccggcctttttgtgccagttattttgacaggtgcaacttatggccgccttgttggcatgttaattgggtcccaatcaacattagatcatggcctttttgcagttcttggctctgctgcccttctaggaggatcaatgagaatgactgtctcagtttgtgtcgtcatcctagagctgactaataatttacttatgcttcctttggttatgctggtccttctcatatcgaagacagtggcagatgcttttaatgcaaatatttatgatttgcttgttaaattgaaaggatttccttatctcgaaggccatgttgaaccttacatgaggcaattgtctgtcagtgatgttgtaactggtcctctacaggcattcaatggcatagagaaggttggccatatagtgcatgtcttaaggacaactggacataatggttttcctgttgttgatgagccaccattttcagattctcctgtcttatttggtctagttcttagagcccacttgcttgttctgctgagaaagaaagatttcattcctaactgctcagcttcagcactggatgcttccaagcaattcttgcctcatgattttgctaaacctggctcaggaaagcatgacagaatagaggaaatagaattcagtgcagaagaactggaaatgttcgtagatttgcatccgttcacaaacacgtctccttacactgtggtcgagactatgtctttggctaaggcccatgtgcttttccgcgaagttggattgaggcatcttttggttctaccaaaatcgtctaagagagcgcctgttgtaggcatactgacaaggcacgacttcatgcctgagcatatattgggtcttcatcctttcctcttcaagactagatggaagaaggtgcggtttggcaagtcagcattcaccaacctcgtcttctga

SEQ ID NO: 3834 - DNA, 1065 bp, Oryza sativa
atgggcagccatagtttctcatacgtgctggtggctttgtgcttgcttggggtcgcggcggaggcgacacagcttgcccccgcggtcttcgtgttcggcgactcgacggttgacgtgggcaacaacaactacctgaacatcaccaagcaggcccgagccaattaccccaagcacggcgtggacttcaccggctcgacgccgaccggccggttcagcaatggctacaacttggcagaccagctagctcagcagctcggcttcccaatgagcccaccggcgtacctgtcgctgacagcgaagaccatcgtttcgcagatgtacaagggcatcaacttcgcatcaggcggatcaggcctcggtgacaaaaccggccaagggcaagtgcagtacttctcgaaggtggtggcgatgatgcagaagctgtcaggctcgagaacaaccaacactctcctctccaagtccatcttcctcatcagcaccggcagcaacgacatgttcgagtactccttgtccggcggcaacggcgacgaccgcgagtttctgctgggtttcgccgcggcgtacaggtcttacgtgagggcgttgtaccggctaggcgcgaggaagttcagcgtcgtcagcatcacgccgctgggctgcaccccgtcgcagcgggcccgccggctgtcggaggatggcacgcgcggatgctacggcccgatcaacaccctctcgctgcggtcctacccgacgctcgccgcgtcgctccgggacctcgccgacgagctgcccagcatggcctactccctcagcgactccttcgccatggtctccttcatcttcgccaacccgcgcacgaacgcctggagtttcacggagctggagtccgggtgctgtgggtcggggccgtttggagcgctcgggtgcgacgagactgcgccgctgtgcaacaaccgcgacgaccacctgttctgggatgccaaccacccgacgcaggctgcgtcggccatcgccgcgcagacgctcttcaccggcaaccggactttcgtcagccctgtcaacgtcagggaattggctctgctgtga

SEQ ID NO: 3835 - DNA, 1700 bp, Oryza sativa
atggggttcttcttcttcgcgtcccgtgctgctgctcggttcttgggcgaggctaggatcatccaccccggcgtctccaccgctgcgcttcttgttgcagcagccagtggtggaggccttgtggcgtatgctgattctgctggagagaatgcatcatcagagacatctcaggaggctcccaggaagaagaaggttgtggttcttgggactggctgggctgggacgtccttcctcaaagatcttgactgctccaagtatgaagtgaaagtcatatcgccccggaattactttgcatttacacctttgcttccgagtgtgacttgtgggactgtagaggcacgcagcatcgttgaaccgatacgaaagatgcttgagaagaaaaggaaagatgttgcattctatgaagctgagtgtttcaagattgatgcatcaaagaaagctgtccattgccggtctgccgttggaacaaattttgatggcaatggtgattttatggttgattatgattatttagttgttgctcttggggctacagtaaatacattcaacactcctggtgtgatggagaactgctactttctgaaggaagtagaggatgctcaaaagatcaggaggaatgtgatagactgctttgaaaaagcttcacttcctaacattagtgaagaggagaaaaggaagattcttcactttgtaattattggtggtgggcctactggggttgaatttgctgcagagatgcatgattttcttgttgaggatctggtgaagctatatcctgcaattcaagattttgtgaagataacaattattcagtccggtgaacatatattgaacatgtttgaccaacggatagctacatttgctgaaatgaagttccagagagacggcattgaggtgaacacagggttcagagtggtaaaggtctctgatgatttaattacaatgaagagcaaatcccttggtgagactaatcggcgtgtcttggcaactaatgaatggttaagagttcatgagtgtgataatatatatgcaattggtgactgtgcttcaataactcaaaggaaaataatggatgacatttcaacagtatttaaaatggctgataaagacaactccggcactctaacactcaaagagataaatgatgttcttgaagacatttgtataagatacccacaagtagaactgtatatgaaaagtatgcacatgcttgacattagggatttgataaaagatgccataggtgattctcacaaggagtcgatggtggttaacatagaggagttcaaaaaagctctgtctcatgtggattcccaagttaaaagtattccagcaacagctcaggttgcagcacaacaaggacactatcttgctgaatgttttaacaagatggaccaatgcaaagaacatccagaaggtacaagcatcttgggcaatttgcacccttgggtggagagcaagctgctgcagagctcccaggcgactgggtttccatggggccatagcactcagtggctctggtactctgtatatgcaaggcaaacaagtgagttggcgcacacggatgctggtggtatccgactggactcggaggttcatatttgggagggattcaagccgaatttagcactgccaaatgctgcatcatttcttgtagagataacattgctgaataattttgttgtctttggctgtgttta

SEQ ID NO: 3836 - DNA, 1719 bp, Oryza sativa
atggggtgcgtgtgctccaggcggtttcgggacgacgccgcgccgcgctcggtgcagccgctcgccgccgcctacgaggcgcgccggggtcgctacggccctggcgacttcgactccggcgagctcgccatcccgccgcccaagctactcacctcccacaaggtaccagaaacaggtacacttttaggaagagccagcattgctgctgtcgaggtgttagataccctcgggagtagcatgacaaatttaaatcatggcagtggatttctctctgggggaacaaatcgaggcaatagagtctgtattttagcatttgaagtcgcaaacacaatagctaaagcttccaatttgtggagatcttgctccgacacgagtataaaggaattgaaggaagaaatattgcgttcagatggagtgcaaatattggtctcctcaaattccagtgaactattgtatattgcttatgttgacaaaagggatgaacttgacatcttttcaagagaagtaattcgatttggtaacctgtgtaaagacccaacatggcataacttaggacgctatttcaacaaattaacgacagattttgcgcctcaggatcattcaaaagagcatatggaaactactatccagcaattgatcaatttggctcaaaatacttctgaactctatcatgaattgcatgcgctggacaggtttgagcaggattttcaaagaaaatttcatgaagaagagtcagtgccagcagccagacgtgagagtgttatgatcttgcatagtgaactaaagcgccagagaaagcttgtgaaaactctcaagaagaagtctttgtggtctcgaactttagagacgattgtggagaagcttgttgatattgtcgtatttttacataagcaaattcgggattcattcagtgaagctgagcaagctcaaaacaaaagactaggttcctgcggtctagccttacattatgcgaacataatcaatcaaattgaaaatattgtttctagaccactctctcttcctcctagtgctagggacaatctgtatcatggtctgccagtaacagtgaagtcagctctcagatcgcgattgcaatcagttaatgcccaagaagagcgtactgtagctcaaattaaagctgaaatgcagaaaactcttcgctggattctaccgattgctgaaaatacaataagttgcgaaatgaacaagaaatcaggctcccagctcagtatcacccgtgtccagactcttcattacgccgataaggcaaagacggagcaatacatgctcgatctggtggtgctgctccaccatttagttgtccaggtgaagaacagaggctatgggagcaagtcctcaaagcacgaccagtcccgatcccgcaagggaatggatcttcaacctgaatccaagctcaacacatctccagtgaacaacgccacatatccgagcccgttgtcggagtccgaacgcgagacgctggaccacctgagcttcaagaggacgggctacggtaggagcaagagctgcgagcctccacccaatagagggaagaaggcacatcgaacctgggattcatgccggagccatggcagctcgccggcgagggaattcggtaggaactcagcttcagagcttgacaagacgatggacctggatgtaatagatgggttagatagactgacttcttaccacccaacatcccccacattttgttag

SEQ ID NO: 3837 - DNA, 2766 bp, Oryza sativa
atgggccggctcggtggaggcgggctgctggttccgccgccgccgccgcagcggaggctgttccaccccacgcaggcggcgaggtacagcacctcgtcgtcgtctcagataactccaggagaatttactgagatggcctgggagggggttgtcggcgcggttgatgcagctagaatgtcgaagcaacaagtagtggaagcagagcacctgatgaaagctcttctggagcagaaggatggtttagcgcgcagaatattttcgaaagctggaatagataacacatctgtcctgcaagctactgatgagttcatctcgagacagccaaaggttgttggcgatacaagtggaccgatcattgggtcaagctttgtatcaattttggataatgcaaggaagcataagaaagaatatgctgatgagtttgtatctgttgagcacatattgcgagcattcacagaagataagaggtttggacaacagctgttcagagatctcaaaattggggagaatgagttgaaggaagctatctccgctgtacgtggcagtcagcgggtcacagatcagattgtttttctacagaggtatctctttgttcagctctctattcacaacttgaggggagactctgccaatggcaatggttttgtttcagccagatggtttttcatgttagcattaaaatgtacccagtgtgactgtttgataaccttaggaatcataactctttttatggtgctgcttccagatccggaggggaagtaccaggctctagagaagtatggtattgacatgacagaattagctcgacgtggaaaactggatcctgttattggccgtgatgatgaagtgcgacgatgcattcagatcctttgcaggagaactaagaataatcctgtaattattggtgagccaggagtcggcaaaactgctatcgctgaaggattggcacagcgtattgtgcggggagatgttcctgaacctttacagaatagaaagcttatttcattggacatgggagcattacttgctggggctaaattccaaggtcaatttgaagagagacttaaggctgttctgaaggagatcactgcctcgaatgggcagatcatcttgttcattgatgagatccacactattgttggtgcaggagcagcaggtggggcaatggatgctggtaatttgctgaagccaatgttaggtcggggtgaactccgttgcattggagcaacaacactagatgagtacaggaagtacattgagaaggatgctgctctggagcgtaggttccagcaggtttattgtggtgagccagcagttgaggatacaatctctatactgcgtggcctaagagagcggtatgaactgcaccatggtgtcaaaatatcagatggagctcttgtttctgcggctgttttatcagatcgctacatcactggacgttttttgcctgataaagctattgacctagttgatgaagcagctgctaagctgaaaatggagataacatcgaaacctattgaattggatgagactgacagagttaacctggagattgaagctgctgagagagagtatgatttgaaccgtgcagctgagctcaagtacggaacacttctgtcgctacaaaaacagcttgaagaggctgagaacaaactcatggaattccagcagtcaggcaagtcaatgcttcgagaagaggtgactgatgttgacattgctgagattgttagcaagtggactggtattccagtgtcaaaccttcaacaatctgaaaaggaaaagctactgctattggaagatgtactccacaagagggttattggccaagatattgcagtgaagtcagtggctaatgcaatccgtcgttctagggcaggcctatcagaccctaaccgtcccatagcaagcttaatgtttatgggtccaacaggtgtaggaaagaccgaactggggaaaacactagctgaattccttttcaacacagagaatgctctaatacggattgatatgagcgagtacatggaaaagcatgccgtctcccgtttggttggagcccctcctggctatattggttatggggaagggggccaactgacagaagctgttcgtcgtaggccttattctgtggttcttttcgatgaaattgagaaagcgcaccaggatgtgttcaacatcttattgcaacttttggatgatggaagaataaccgactctcagggcagaacagtcagctttactaactgtgttatcatcatgacttcaaacattgggtcgccattgattcttgatacgcttagaaacacatcagacagcaaggaggcagtttatgaaataatgaagaagcaagtgattgacatggctcggcagtcattccggccagagtttttgaataggatagatgagtacattgtattccagccgctggacaccacagagataaatcgcatcgtggagatccagctgaaccgagtcaagaaccggctgaggcaacagaagattcatctgcagtacacaccagaagctgtggagcatcttggctctctcggctttgaccctaactacggtgctaggcctgtgaagagggtgatccagcagatggtagagaacgagatcgccctcagtgtcctgaagggcgacttcaaagaagacgacaccgtcctcgtcgacgtgagctccgtggcgatcgcgaaaggccttgctccacagaagaagcttgtcctccagaggttagagaatgcaaacttagagttagtcgccaatgactag

SEQ ID NO: 3838 - DNA, 645 bp, Oryza sativa
atggcgatagaccatgcgtcccctttctcgctgaagaacagaggcgacatgggaggaagggggtatgaggaggaagaggtggagaaccagcggtggccgccgtggctgaagccgctgctgtcgacgagcttcttcgtgcaatgcaggatccacgccgacgcgcacaagagcgagtgcaacatgtactgcctcgactgcatgaacggcgcgctctgctccctctgcctctcccaccaccgcgaccaccacgccatccagacgtacatcatcaacagcgcccgcgtggtgttcctcaacgagcgcccccagccgaggcccggcaagggcgtcaccaacacctgcgagattgtgggtacgtccggtggataccgcccaaggaagaagcacggcggttgcggcggcggcggcggcggcggcgacggtggcaagaagaagaagaagagggcggcgctcaaggacgcgcggtacgagtccgaggactcgtgcacgagcaccagcggcggcagcagcgacaagagcagcgtcgtgcagagcttcacgccgttgaccccgccgccgacctccgccagctaccgcaccggcaacaagcgccgcaagggcgtcccgcaccggtcccccttcggcagcctcatcgtcgagttctag

SEQ ID NO: 3839 - DNA, 1116 bp, Oryza sativa
atggcgtcctccatactctccgactgctcctcctccgccacctcccgcctcctccccctccgccgcgccctcctcgcgccgccgtgccgcttccgcccggccaccgtcgccgcgccgccgcggaggcccctcgccatcgccgccccccagctcccgcttctcccccgcgcgcgcggcacggcttcggcctcagccgccgccgccgccgccgcctcctctaccgactcagatgcttgtgccaagatcattgatgggaagttggtggcaaagcagataagagaggaaatcgctgttgagatcgccaagatgaaggatgcaattggggttgtgcctgggctggcagtcatcctagttgggtcaaggaaggattctcaaacgtatgtgcgcaacaagaagaaggcatgcgaagcggttggtatcaagtcatatgaggttaatttgccggaagacagctctgaggatgaggttctcaagcacatcgcaacatttaacagtgatccgtcggtgcatggcatcttggttcagttgcccctacctcatcatatgaatgatgagaacattttgaatgctgttagtattgagaaggatgttgatggatttcatccactgaacattggacgacttgcaatgcaaggtcgggatccgttctttgttccatgcacccctaaaggatgcatggaattactacacagatatggagttgaaatcaaagggaagagagctgttgtaattgggcggagcaatattgtggggatgcctgctgcattattactgcaaaaagccaacgcaactgttagcattgtacattcaaataccaagaagcctgaggaaataacaagacaagcagatattgttatcgcagctgttggagttgctaatctggtcagagggagttggataaagcctggtgctgctattattgatgttggcatcaatccagttgatgatccagaaagccctcgaggttatcggctggttggagatgtgtgctacgaggaggcctccaagattgcaggactaatcacgccagttcctggtggtgtcgggccaatgacaattgcgatgcttttgtcgaacacacttgagtcagctaaaaggatacacaaattcaaataa

SEQ ID NO: 3840 - DNA, 2925 bp, Oryza sativa
atggggcgcctccagcaccaccaccgctcccgctccgcctcctcctcctccttcgcgcgctcctccgacaccgccgccaccgacgccgacgcccgcagcctcgccgcggacgccaccgtcgactgccccttcggccacgtcaatggcctcacccgctccgacctccgggaggccgcctacgaggtcttcttcatgtcctgccgcgccgccggtggcggccggctcaactacttcccggccggggagagcggcggcggcgacgtgtcgccgaccatcggcgccggcccccggggtggcacggggatgagcgtcgtcaacagcagggtcaagagggcgctggggctcaaggcgcggaggtcgtcgcagccgaccacggcgcgggtgagctccatgaacgcgtcgtcggcgcccggctcccccggccgcgccatgtgggcgatgagccagccgtcgacgcccgtgtcgcccgggaaagggaggcggccgatgacctccgccgagatcatgcggcagcagatgcgtgtcacggagcagaacgacgcccgcctccgcaagacgctcatgcgcaccctcatcggccaggtgggaagaaaagccgagacgatcgtcttgcccctggaactgctccggcaggtcaagctcaccgacttcgccgacagcggcgagcaccaccagtggcagcgccggcagctgaagctcctcgaggccgggctcatcgcgcacccgtccctgccgcatgaccgcctcaacgcggtggtgctcaggttccgcgaggtcatgcaggcggcggacacccgcgccatcgacaccggcaagacgtcggacgccatgcaagccctctgcaacgccgtgcamgcccttgcctggcgctccgcccccggaagcaaggccgccggcggcgacgcctgccactgggccgacggctaccctctcaacgtgctcctctacgtgtcgctcctccaggccatctttgacctcaaggaggagaccgtcgtgctcgacgaagtcgatgagctcctggagctcatgaggaggacatggccaacgctgggcatcaccaagatgctgcacaacgtgtgctttgcatgggtcctcttccagcagtacgtggtcaccgggcagatcgagccggacctcgccggcgcggcgctcgccatgctcacggaggtggcggccgacgccaagcaggagagccgcgaccccgtgtacgcacgggtgctctcgagcatccttgccacgatacacgactggtcggagaagaggatgcttggctaccacgagtggttcggcaacggcaactgcggcgccggcggcgccatggccatggagggcgctctgtcactggcgctcgccaccacccagatcatctccgacaacgcgatcttcacgagcatcagcaccgcggaaaccgaacacgaagactgcagcgtcggaagcttcgccggcgaccgtgtggattactacgtgaggtgttccacgagaagcgccttcacgaaggttagcttcctacgcgtttggccacgccatggcgagcgtcttgtgttgatctgccgcggaaacgtgtgccagatactggagaacggactcgggcaaggggacagcctgatcatcgatcgccacgacgacgaagacccgggcgacatcctggcgcggctcgccggcgacacggagcacatcgcgctatccgagcgcgacgccttcgggccggtgctgaggcggtggcacccgttcccgggcgccatcgccgcggtgacgctgcacggctgcttcggcgtcgtgctgaagcagtacctgggcaaggccaccgtgctgagcaacgagctcgtgcacgtgctgcacgcggcggggaggctggagaaggcgctggtgcagatggtggtggaggacgtggcggacagcgacgacggcggcaagtcggtggtgagggaggtggtgccgtacgacgtggagtccatcgtgttcgggttcctcaggacgtgggtcgaggagaggctcaagatttgcagggagtgcatgctccgagccaaagaaaccgagagctggatgccgagatccaagaacgagccttacgcgcagtcggcggtggagctgatgaagctggctaaggcgaccgtcgacgagttctttggcataccggtggccgtgagggatgacttggtccaggacctcgccgacggcatggaggcgatctttttggagtacatctccttcctcacgtcttgcggtagcaagcagagctacctcccgtcgctgccgccgctgacgaggtgcaaccaggactcgaagatcatcaggctgtggaagaaggcggcgacgccgtgccgggcgcccgtgtcgagcccgcgcgcccacgggcaccaccaaggccagggcggcatggcgtccggcggccagaacccgcggccgtcgaccagccgcggcacgcagcgcctctacgtccgcctcaacacgctccacttcatcctcagccacgtccacgcgctcgacaagtcgctctccttcttctcccgcggcaggtgctcgtcgtcgccgtcgtccgccgccaccgcccgcctcctcgcgccgtgctcccacttcgaccgcgcgcgcgccgcggcgcagtccgcggtcgggcacgtcgccgaggtcgccgcgtaccgcctcatcttcctcgactcgcaccactcgttctacgacgggctctacgtgggcsgcgtcgccgacgcccgcatccgcccggcgctccgcacgctgaagcagaacctgtcgctgctcctctccgtcctcgtcgaccgcgcgcagccggtggcggtgcgggaggtgatgaaggcctcgttccaggcgttcttgctcgtcctcgtcgccggcggcggcgacaggagcttcacgaaggaggaccacggcatggtggaggaggacttccggagcctgaagcgcgccttctga

SEQ ID NO: 3841 - DNA, 1758 bp, Oryza sativa
atggcgacgccagcacctgatgtctcggccatcggcgcggccctccgatccccggcggcgacggtaagcgaggccgacgtcgagaagctccggctcatcgaagaactgacctccgacgtggacgccgtgcaggagcgcgtcctctcggagatcctcggccgcaacgccggcgcggagtacctcaccaggtgcggccacgacgccggcgacaccggccgcgccaccttccgggccaaggtgccggtggtgtcgtacgacgacctgaagccgtacatccagcgcgtcgccgacggggactgctcgcccgtcctatcgacgcaccccatcaccgagttcctcaccagctccggcacgtcggccggcgagtgcaagctgatactcgtcgccatggacgactccggccgccgccaggcactgcacggtctcattggacctgtcttgaaactagacgaagacacgaggcggcctcacggcgtggtttgccctgacgagcgtctacaaaagcgagcaattcaagagcatggcaattgccttacacgagccccacggcgggccatcctctgcgaggacgcgttccagagcatgtacgcgcagatggtgtgcggcctgtgccagcgccacgacgtggtgcgcttcggagctgtgttcgcggccgcacttgttcgggcgatccgcttcctccagctcaactggggccagctcgccgcggacatcgaggccggcgagctcggcccacacgttgccgatccgtcggtgcgcgaggccgtctccgggatcctccggtcggacgccgagctcgcggagttcgtccgcatcgagtgctccaagggtgactgggccggcatcatcacgcgtatttggccgaacaccaagtacgtggatgccatcgtcaccggcgccatggcacaatacatccggaccctgcagtactacagtggcggcctgccgatcgtgagcacctcgtatgcgtcctccgagtgtttcttcggcatcaacctccgccccgtgtgcgacccgtccgaggtgtcctacaccatcatgcccaacacggcctacttcgagttcctcccggtcggcgaggtcgtcgacgcgaccaacctcgtcgacctcgcccgcgtggaggtcgggcgggagtacgaggtggtgatcaccacctacgccggtctgagccggtaccgcgtcggcgacgtcctccgcgtgacggggttccacaacgcggcaccgcagttccggttcgtgcgccgccaaagcgtgctgctatccgtcgagttagacaagaccgacgaggccgagctgcaccgcgcggtggagcgcgcctcctcggcgctcctccgcccgcgcggcgtgtccgtcgcggagtacaccagccgcgcgtgcaccgaacgcatcccgggacattatgtggtctactgggagctactgaccgagtcacccgtcggcgccggcgacggtgacacggtggacggggagacgctcggcaggtgctgcctcgagatggaggaggcactcagcgcggtgtacaggcagggcagggttgcggacggctcgatcgggccactcgagatccggatcgtccgtcccggcacgttcgaggaggtcatggacttggccgtctcccgcggcacgtccattgggcagtacaaggtgccccagtgcgtgactgtcccatccgtggtggagctgctggactcgcgcgtcgtgtctagccaattcagccctgccctgccgcattggatcccgactccacgatccgactag

SEQ ID NO: 3842 - DNA, 2136 bp, Oryza sativa
atgaggttgactgctggacctacaccaataatccaactagaaaacgagcagtggccagtggagatgtggagcaaaacgatgctcgttgtgttcatcaatatcgtgttcatccactgccttagcgtgaacattggagcggcggtggccaaccctgcagccagcgatggccggttcgtccaccacggcttcacggcggaggacctcaccatggacggcctcgccgccgtcacgccgaccgggctcctcgcgctcaccaacgccacgtaccaaacgaaagcccacgcgttccaccctgcgcctctccgcttcctcaacacgtcgtcgtccgccgccgccaccgtgcggtccttctcgacgtcgttcgtgttcgccatcgtgtccgacgaccccaggttcaggaacaacgtcgaccatgggctcgcgttcgtggtctccccgaccaagaacctctccacggcgaacgccggccagtacctgggcctcctcagcatggccgacgacggcaagccgagcaaccacgtgttcgccgtcgagctcgacatcatcacgaaccccgagttcggcgacatcgacagcaaccacgtcggcgtcgacgtcaatagcctcaggtcgctgcaggcgaagaccgccggctactatgtcgacggcgacggcgcgttccggagcctgcagctcaacagccagaagccaatgcaggtgtgggtggactacgacggccaggccaagcagctcaacgtgacgctgtctcccgtgcaagtgcccaagcccaagaagcctctgctctcccaagccatcgacctctccacggtcatggccgaggagatgtacgtcggcttctcgtcggcgacgggcgtcgtgttcacgcaccactacgtcctcggatggagcttcagcttcgacggcggagctgctccctcactggacttctccatgctgcccaaggtgccacgagtgggtcctacacgtcggtcagtaatgctgtatgttgtgttgccgattgccagtgcactactgtttcttgttgcgtttgttctgggtgtcttcttcgtgagaaggtggcaccggcagtttgcggaggtgcgcgaagattgggaggttgagtttggtccgcatcggttcacatacaaggatctgtttcatgctacgcagggattcacagacaagaacctactcggtgcgggagggtttgggagcgtgtacaagggtgtgcttcccgtgtccaatacagagatagcggtgaaacgggtgtcacacaattcaagacaagggatgagagagtttattgctgaggtggtaagcatcggccgtatccgacaccggaacatcgtgcggctcctgggttactgtcggcgcaagggagaacttctccttgtttatgactacaagacaaatggtagtcttgacaagtgtttgcatgataatgctacatcaaccacactctgttggcccaagaggatccacatcatcaaaggtgttgcgtcggcattatcgtacctacacaaggattgggagcaagtagtgatccatcgagatgtcaaggcaagcaatgttcttctagacagcgagatgaatggactattaggggatttcggcttgtcaaggctacgggatcatggagccgatgcaaagaccacatacgtggtaggaactatgggttacattgccccagagctcatgcacacggggaaggcaacaccgttgacggacgtgttcgcgttcggtgtgttcctcctcgaggtcacctgtggacgaaggccgattggggaaagcgatagcaacgagattctattaatagattgggtgctgaagcattttcttagcggatccatccttaacgtggtggatccccggcttgcagggaggttcagcttcgaggaggtgaatcttgttttgaaactaggactaatgtgctcacatccattgcccaaggcaaggccaagcatggacaaagttgtgaagtacctcgatggtatgcttccagcaccagagctatcaccgacgcacatgagctataacatgatggagttgatgctacagaatggggttggttcacatagtttacccgtgtggtcctctttgttagataatagtgttggtacaatgtcatctgcttcggttctctcggacgggagatga

SEQ ID NO: 3843 - DNA, 1550 bp, Oryza sativa
atggcgtcgcctccaaccgcctccgcctccgccagtgaggccgcggaatccggcaggcggagcgcgccggggccgatcgacgtgccgagcccgagggaccacctgcaccacctcctcgaccgacgtgacacgccgcgggtcgtgcacgtggaggggacgacgatgcagcggcagcgtggggaggcggcgggtgacgcgggggcggcggcggcggcgaagcccgaggtgaagctggtgaccggggatggcgggtacgtgctcgaggacgtgccgcatgtgtgcgactacctccccgatctaccgacatactcaaatccactgcaagataacccggcatactcggttgtgaagcaatactttgtaaacccagatgacactgtctgccagaaggccattgttcacaaggatggccctagaggcaaccacttccgtcgtgctgggcctcgacagagggtgttttttgaatcggatgaggtccatgcatgcattgtcacatgtggaggactgtgccctggactgaacactgtcattagggaaattggtgggtatagaggtttctatgcttgtaacaccattgacttgagtccaaagagtgtaaacgacattcacaaaaggggtggaactgttcttgggacatcacgtggaggccatgacaccatgaagattgttgacagcatccaggatcgtggtataaatcaggtttatgtaattggtggtgatggtactcaaaggggtgcaggagtgatttttgaagagattagaagacgtggtctcaaggttgctgttgctggcattccaaagacgattgataatgatataccagtaattgacagatcatttggtttcgacactgcagttgaggaggcccaacgtgcaataaatgctgctcatgtagaagctggaagcgccgagaatggtataggcctcgtaaagctaatgggtcgacacagtggttttattgcacactatgctactctagccagcagagacgtggattgttgcttgattccagagtcacctttctatctggaaggtgaaggtggcctttttagatatttggaaaagcgtctgaaggagaatggtcatatggttatcgttgttgcggagggtgcagggcagaaacttattaatgaaacaaaggaatcaatggggaaagatgcttcaggcaattcgattcttcttgatgttggtctttggttatctcaaaagataaaagagcatttcaagaaaatcaagactactataaatctcaagtatatagatcctacatacatgatacgtgccattcctagcaatgcatctgacaatgtgtattgcacactgttggcacacagtgtggttcatggagccatggctggatacactggtttcactgttggccaagtaaatggtcggcattgctatatcccgttttacccaagtttcctcagcaagaaagatgtggaggacgcaaagatggaagaagagagagcatccaagtttttcgatgggccgcctcccaaccccaaggttgaagacaaagtcgcttccaatggcaaggctgtgaagtg

SEQ ID NO: 3844 - DNA, 1329 bp, Oryza sativa
atggattcggcggcaaaagcctcgcattcggcggcgccgccgccgcccggcsccggggtccgcgtccgsgccccgctggtagagtctgtctcatgctactgcagattagatactggtctgaaaactgttgttgatgctagaaagtttgttcctggagcaaagatgtgtatgcaacctgatgtcaaacccaacaagtgcaaatcaaggggctctcgtaaggagaggagccgaactcaagcaccacttttgcctggtcttcctgatgaccttgctattgcttgtctcatacgggttcctcgagtggaacatcccaatcttcggatagtttgcaaaagatggaaccgtctcttatctgggaattactattattccttgcgcaagagaaacgggatggcggaagaatgggtttatgtctttaaaagggaccgtgaaggaaagatatcctggcatgcctttgacccactgcaccagctatggaagtcacttccaccagttccagcagaatattcagaagcattaggctttggctgtgctgttctgagtggttgctatctgtacttatttggcggtaaggatcctctgaggggctctatgaggcgtgttgtattttacaatgctcggacaaacaaatggcaccgagctccagatatgttacggaaacgacacttttttggttcttgtgtcataaacaattgcttgtatgttgctggtggggagtgtgaaggaatacaaaggacactcccgtctgctgaagtttatgatccaaataggaacagatgggcctgcgttgctgaaatgaacaatgggatggtacctttcattggagttgtatatgatggcaagtggttcctgaaagggcttgattcccatcgccaagtgacgagtgaagtctacctaccatcatccaatttatggtcaaccattgatgatgaaatggttaccggctggcggaacccaagcattaccttcaacggaaagctctattcatctgattgtcgagatggctgcaagcttagggtgtatgatccaaacacaggaacatgggcaaaattcatggacagcaagcaccacctgggcagctcgcgcgcctttgaagctgcagcgttggttacattaaatgggaagctttgcatcgtccgcaacaacatgagcatcaccctggttgacatctccgacccaacgatgagcattgagactgacagtgcacgcatgtgggagactgttgctcggaagggccagcacaggtcattcgtggcaaacctgtggtcgaccatcgcaggaaggaacctgaagagtcacattatccattgtcaggttttgcaggtttga

SEQ ID NO: 3845 - DNA, 2208 bp, Oryza sativa
atgcagacttatgtgatcgtctttgatggcttaccagcttctccttctggtttgcttgctacagtcgtcaccagttcatacctgtcactgacgagcgcgttctttttttcgcgtactttggactcagagctgcccggcgtgctggccgtgatccccgacgtcctgcacaaggtccacacgacgcgttcctgggatttcctcgagctagagcgaaatggcgcggcgaccggtgcgtggaaggacgccgcgaagtacggggtggacgctatcatcggcaacgtcgacacaggtgtatggccggaatccgcgagcttcaaagacgacggctattcagtcccgtcgaggtggcgcggcaagtgcatcactggcaacgacacgaccttcaaatgcaacaacaagctgatcggcgcggggttcttcaacctcggcttcctagcgtcgggcttgctgcaggggaagccgccaagccaggctgcagagctgtacacgccacgggactacatcgggcacggcacgcacacgctgtccaccgccggcggcgggttcgtgccggacgccagcgtgttcggccatgggaagggcacggccaagggcggctcgccgctggcgcgggtcgccgcctacaaggcgtgctacgccgagggctgctccagctcggacatcctcgcggccatggtcacggcggtggaagacggcgtgaacgtgctctcgctctccgtcggcgggccggcggacgactacctgtcggacccgatcgccatcggcgcgttctacgccgtccagaagggcgtcatcgtcgtctgctccgccagcaactccggcccgcagccgggctcggtcaccaacgtggcaccatggatacttacggtcggcgcgagcaccatggacagggacttcccggcttatgtcaccttcggcggcgtcacgagcagcatgaccatcaaggggcaaagtctgtcaaacagcactctgcctcaagggcaacggtacgcgatgatcaacgcgaagaacgccaacgccgcaaacgtaccgagcgagaactcgacgttgtgcttccctggctccctggacagcgacaaggtgcgcggcaagatagttgtctgcaccagaggggtgaacgccagagttgagaaggggctggtggtgaagcaggccggcggcgttggcatggtgctctgcaactacgccggcaacggggaggatgtcatcgcggacccgcacctcatcgcggcggctcacgtctcctactcccagtgcatcaacctctttaactacctcgggtcaacagacaacccggtcggttacatcactgcatcggatgccaggcttggcgtaaagccagcgcctgtgatggcagccttctcttcccgtgggccaaacccgataactccccagattctcaagcctgacatcaccgcgccaggagtcagcgtcatcgcggcttacagcgaggcggtttcgccgacggaactctctttcgacgaccgccgtgtcccctacaacataatgtccggcacctccatgtcgtgccctcacgtgtcgggcatcgtcggcctgatcaagaccaagtaccccgactggacccccgcgatgatcaagtcggcgatcatgaccacagcgatcaccggggacaacgacagcggcaagatccgggacgagaccggcgcggccgcgacgccgttcgcctacgggtcggggcacgtgaggtccgtgcaggcgctggacccgggcctcgtgtacgacaccacgtcggccgactacgccgacttcctctgcgccctgaggcccacccagaaccctttcccgctcccggtgttcggcgacgacggcaagccgcgcgcgtgcagccagggcgcgcagtacggccgccccgaggacctcaactacccgtccatcgccgtgccgtgcctgtccggctccgcgacggtgcggcgccgggtgaagaacgtcggcgcggcgccgtgccggtacgcggtcagcgtcaccgaggcgctggcgggggtgaaggtcacggtgtatccgcccgagctcagcttcgagtcctacggggaggagagggagttcacggtgaggctggaggtgcaagacgccgcggcggccgccaactacgtgttcggaagcatcgagtggtcggaggagtcggagtcggacccggaccggaagcatcgcgtgcggagccccatcgttgccaagacgacctgcgggtag

SEQ ID NO: 3846 - DNA, 1926 bp, Oryza sativa
atggcgacggcggcggggatggggatcggggcggcgtgcctggtggcgccgcaggtgaggccggggaggaggttgcggctccagcgggtgcggaggcggtgcgtggcggagctgagcagggacggtgggtcggcgcagcgcccgctggcaccggcgccgctggtgaagcagccggtcctgccgaccttcctcgtgccgacgtcgacgccaccsgcgcccacgcagtcgccggcgccggcgccgaccccgccgccgttgccggactccggcgtgggggagatcgagcccgatctagaaggtctcacagaagattccatcgacaaaacaatttttgtggctagtgagcaggagtctgagatcatggatgtgaaggagcaagctcaagctaaagtaacacgcagcgttgtctttgtaaccggtgaagcttctccttatgcaaagtcaggtggactaggagatgtttgtggttcactgccaattgctcttgctcttcgtggtcatcgtgtgatggttgtaatgccgagatacatgaacggggccttgaacaaaaattttgcaaacgcattttacactgagaagcacattaagattccatgctttggcggagaacatgaagttactttttttcacgagtatagggattctgttgattgggtgtttgttgatcatccctcatatcatagacctggaaatttgtatggagataattttggtgcttttggcgataatcagttcagatacacactcctgtgctatgcggcgtgtgaagccccattaattcttgaactgggaggatatatctatggacagaaatgcatgtttgttgtgaatgattggcatgccagtcttgtgccagtccttcttgctgcaaaatatagaccatatggtgtttacagggatgcccgcagtgttcttgtcatacataatctagcacatcagggtgtggagcctgccagtacatatcctgacctgggattgccacctgaatggtatggagcattagaatgggtgtttccagagtgggcaaggcggcatgcccttgacaagggtgaggcagtcaattttttaaaaggcgcagttgtgacagcagatcgaattgtgactgtcagccaggggtattcatgggaggtcacaactgctgaaggtgggcaaggcctcaatgagctcttaagctcccggaagagtgtattgaatggaattgtaaatggaattgacattaatgattggaacccatccacagacaagtttctcccttatcattattctgttgatgacctgtccggaaaggccaagtgtaaagctgaattgcagaaggagctgggtttacctataaggcccgatgtgcctctgattggctttattggaagattggactatcaaaaaggcattgatctaattaaacttgccattccagatctcatgcgggacaatattcaattcgtcatgcttggatctggtgacccaggttttgaaggatggatgagatccacagaatcagggtacagggataaatttcgtggatgggttggatttagtgttccagtttcccaccgaataactgcaggttgcgatatattgttgatgccatccagattcgaaccttgtggcctcaatcagctatatgctatgcaatatggtacagtgcctgttgttcatggaactggaggcctcagagatacagtggagaattttaacccgtttgctgagaaaggagagcagggtacagggtgggcattctcgccactaaccattgaaaaaatgctgtgggcattgcggatggcaatttcgacatacagggaacacaagtcctcttgggagggtctaatgaagcgaggcatgtcaagcgactttacatgggaccatgccgcctcacagtatgaacagatcttcgaatgggccttcatggatcaaccatatgtcatgtaa

SEQ ID NO: 3847 - DNA, 2130 bp, Oryza sativa
atggatcatcatcgtcagatgcaggacatccagctcgcgcgctgttcttcgcagcaccatggctcggaggcggcggtgacggcgagaggtgattctgcaggtggcttggagatgtgcccggctctgtatctcgctgcctccaaagggcgagccgaggaggtcatggcgctccttcttcagccacggcatggtggtgttgcgcagggacatcttgatcaagtcaatggtacttggatggtaccgcataatggtagagaggtggaagggcccggccctggggcagggcgagcagtgcaagcgccctgggccccgccaagtcaggggccccctgaccagcggcatggccagtgcaacatatcagaggtgagcgcggagagtaacaccgtgtttcacgtggctgcggagcaaggacacgacgagctgatccgggaggtgtacctcaggttcaaggagagcagcctcctctctcgccggaactcgtcgcaggacacgccgctgcactgcgcggcgagagccggacacgccggggccgtcacggccatcgtccagctgctggccctggacagcatcctgggatgcaagaacgaggccggagatacggcccttcacctggcggcgaggaacggccatggcgcggcggtagaggcccttgtctcggcggcggcgccggagctgtcctccgagctgaatgccgccggcgtgtcgccgctgtacttggcggtgatgagtaagtcggttacagccgtgaaagcgatcattaccacgtgcagcgatgcatcgcccgttgggccgaacaagcagaatgctctgcacgctgccgtcttccagatctcagaaatggtcgacctggtattgaaatggaagccagctctgtctggacaatgcgacgtcaaaggcagcagcccgctccatctcgcgtcgtccgacggcgaccgctccatcgtaagcgcgatcgtgcgcgccgcgccgccgtccacggcgttcctgaaggactcggacggcctctcggccatccatgtcgccgcgcggatgggccaccaccatgtcgtcgaggagctgatatctgcctggcccgacgccgccgagctccgcgacggccgcggcaggacgttcctccacgccgcggccgagaaagggcacgcgccggtcatctcgctcgccgtcaagaacccgatgctttgcggcatcgtgaacgcgcaggacaaggatggcaacacggcgctcmacytcgcggtggctgcagccgcgtccaagggactagccgcactactttccgccggagacaacgtacgagtcaacatcatgaacaacgatgggtacacaccgtttgatctcgctgccaactcgtctagcttcctctccatgtcttctgatcttctccttgagactgaatccgggaaaaaggagaggaagaagagagatatgagaacaagcagagaagatacctggtctaaaataagccttgtggtgacactgtctgcctacggggcacaatcctgcccgcagaggcaagaccacctgaatcaatggagaggcaatgacacaacagattggataaggaagacgtccaacagcctcgctgtcgtggccgtgctcgtcgccaccgtcgccttctccgccacgttcaacgtgcccgggggctacggggacgatggcaaggcggtcctccaggcgaagaccgcctacaaattcttcatcgtcttcgacagcgtcgccatgacgacttccgttgtcgcagtgatacttattgtgtatgggaaagcatctggttcatggaagagcttcattttagctctgcacttcatgtgggtttcgatgatcggcatgatcgtggctttctgggcggctctggtcgccgtcatgagaaggaggacaatcaatattgtgatatacgaagtcataatcaatgggatctatgtcttggtcttgagcatcatgatcttgactaagccggcgtcgtggatcagcttcgtgaagtttatgttcagcagtttattgcctgagagacatcacaggcgtgtcgctcggcagtatccgtttgccggcacttactcgcgtaactattctgtcttcgttgtcacaaacatcttggcatacgttggtgccttcttggcactttcaaaaagctga

SEQ ID NO: 3848 - DNA, 840 bp, Oryza sativa
atggagatggaagatagcggtcgcggcgtcgtgggcgccgggaagcgcggcgtcgcggagaccttctccaggctccgggagcagggcaagactgcattcattccattcatcaccgccagtgaccctgacttggcaaccacatcgaaagcgttgaagatccttgattcctgtggttcaratgtgattgagctgggtgtaccttactcggatccgttggctgatgggccggttattcaggctgcagcaacgcgtgctcttaagaaaggcgctacatttgattccgtcatagctatgctcaagggggttatacctgagttgtcttgtccaatagttatcttcacatactacaacccaattttaaagcgcggagtgagtaacttcatggctatcattaaacaagccggcgtacatggtcttgtagtacctgatcttcctttggaagagacagcgctgttgaggaatgaggctgtcatgcatggcatagagctggtgctgcttacaacaccaaccacaccaacagagaggatgaaggagattgcaaaagcttcagaaggatttatttatcttgtaagttctgttggagttacaggtgcacgctcaaatgtaaatttgcgtgttgagtaccttcttcaggagatcaagaaggttacagacaaacctgttgctgttggctttggcatatcgactccagagcatgtaaagcagattgcaggctggggagcagatggtgtgatcatcggcagcgctattgttagacagttaggagaggctgcttcacctgaagaagggttgaaaagagtagaagagtatgccaagaacatgaaggctgctatgccttga

SEQ ID NO: 3849 - DNA, 1950 bp, Oryza sativa
atgcacgtcggctatggcatcgtcgccgttgtcctcgtcctcttgccgccgtcggccacgccggctgggatcgctgactgcgacgaaggaktcggcaacacgtacgtggccaacagcactttcgaggcgaacctgaacgtcctcgccgcggcgctttcccccaatgtctccgtggctccggccggcttcgctgtcgccaccgtcggcgcggatcccgacaaggtctttgcgatggcgctatgccgcggcgacgtgaacgcctccgcttgcagcgcgtgcgtcgcggcagcgttcgtcgacgggaagaaagattgtcctggaaacagcggcgtcgccatgtacgaggacgcttgcgtagctcgcttctcccgctataggttcatggatttcctcagtccggatcagtggcaggtctcacagatgatttggtatcccgagcaagcctcggcgagcgtcgatgtgccggcggttggctggttcaacgccgccgtcacgaagatcctcgccgccatggtcgaccacgccgtgacctcgacgacggggaactcgaccaccaagaagtatttcgtgacgggtgaggaggagttcgaccccaacatctacgggttcgcgcagtgcgtgccggacctgacgcccgcgcagtgcaacgattgccttaaggacctcctcttctatgcaaaacaagcgtacctcggcaaaagccttagctgggttcgtgtcaattcggtgtggtgcagactgatgtatagtgtgcagccattctaccgaggccgggcgatgctgcaggtctcggcgccaccaccaacagccgaagctcctgttctttctccagagcctgggtcagggaagaaaattagtacagcaggaatcgctgctggcgtcgcttcgtcggttgtggtattgttgatactttcagttttcgcatttgttcgcttcaggaggaggaccaaggttacagacgctgtccacccattgaagaaaataacgagagcacaatgcatgatttttgatctttctgcactgcaagaggcaaccgagaatttctcgccgaataataagcttggcgagggtggttttggtgctgtatacaagggagtgctctcagatggacaagaagtagcagtgaagaaacttttaggaactggtcatggattggaccagctatacaatgagatcaagttgttggctgagcttcagcacaagaaccttgttaggctacagggattttgcttgcatcaggagcagactctgcttgtttacgaatacctcaagaacaggagcctggacaactttctatttgatcccagtagagggaatgccctaaactgggatcaacagtacaacatcattctgggaattgccaaaggaatattgtatcttcacgaggattcaagcttgaggatcattcaccgggatctaaaatcaaacaacattctagttggagatgatatggaaccaaagattgcggactttggattagcaaggctgctaggcgaaggtcatactcattctaagacaactagagttgttggaacatttggttatatggcaccagagtacgcaatagatggaaatgtgtcaaccaagatcgacatttttagctttggtgtgctggtcctcgaaattatcacgaggagaaggaactggcattctgacgatcatgatctcgttagtgatgtttggaattgctggacaaaagggactgctacaaaaatgatttaccagtcgctcaatgggtactctgaaagccaagcattacgatgcatccacattggactactttgtgtccagccagaccccgatgacaggccacacatgtcatctattattttcatgttgaccaaggaaaatatgaagcttcaaccaccagcagaacctgcattctttttgggtagagaatcagcttcctctcctccatcctgtgggcaacacggctataactgtgattga

SEQ ID NO: 3850 - DNA, 1917 bp, Oryza sativa
atggcggctagccgtgtcgccctgtccgtgccagtcgccgccgccgtcgcgctgctgctgctcgcgctcccccgcgccgcggtgtcgtacccgtgggggttgtgcaacgacacggccggcgaattcccggcgaggaggagcagctaccttgccagtatcaacctcatcgccgccaccctccccggcaacgcctcggcctcgccggacctgttcgccaccgccgagggcgtcggcgcgccgccggaccaggtctccgccctcgcgctctgccgcggcgacgccaacgcctccacctgcctcgcctgcctcacccaggccttcctcgacctccccaacgcctgcgcctaccacaaggtcgccgccatcttctacgactcctgcctgctcgcctactccaacgccaccatcgccgccggcgacttctcctccgagaagatcccgatttacgggttctacagcaacgcgaacgccacgacggagcaggcacggttcaaccgcctcgtggcagcgctggtgaacgccaccgccgactacgcggcgcgcaaatccacgcggcggcggtacgcgtccggggaggccgacttcaacgcggagttccccaaggtgtacagctgggcgcagtgcactccggacctgacgccggcgagctgccggagttgcctcgcgcagatcatagggacatatattgggttttttgagaacagggtcggaggattcgtccgcgcggtctggtgcagcttccagtacagtaccacgccctttctcgacggaccgatgcttgtaaggttacaaggaacgtcaggtgcctcgccggcgccgtcgccggcggccgtggtgcccgcagttaaccagacgccgccggcggcgacgccgacgcttgaaggagatgccaattactccactgaagcagaggacattgagaatttagattcgatgctcatcgacatctccattttgcgatctgcaactggtgattttgcagagagtaacaagctcggtgagggcggatttggtgctgtgtacaagggtgtgctcccggacggctacgagatagcagtgaagagactgtcgaagagctcaacgcaaggggtggaagaactgaagaacgagctggctctggttgcgaagctgaagcacaagaaccttgtcagcctcgtcggcgtctgcttggagcaacaggagcggctgctcgtatacgagtttgttccaaaccggagcctcgacctgatccttttcgatactgagaaaagtgagcagctggactgggagaagaggtacaagatcataaacgggatcgctagaggtctgcaatacctccacgaagattctcagctcaaggtagtccaccgcgatctcaaggcgagcaacatcttgctagacgtgaatatgaaccccaagatttcagactttggcctcgcgagaattttcggtcgagatcagacccaggctgtcaccaagaatgtcatcggcacatatggatacatggctcctgagtacctgacacgtgggaactactctgtcaagtcagacgtattcagcttcggcgtcatggtccttgaaatcgtgacaggtaggaagaacaaccacagctacaactcccaacaatctgaagatctcttgaccatgatctgggagcaatgggtggccgggacggtgctggagatggtcgatccgagcatgaacagcttcttctcggagagcgacgtgatgagatgcatccacattgggctcctctgcgtgcagggtgacccggcgaaccggccggtgatgtcgtcggtggtgctgatgctcggcacggacaccgtcgaactccatgcccccgcgaagccgacgctcttcgccaggaaaggcggcggcgacgaatccggcgtcgcgtccggcggcatgtcaatcgtgtcattggaggagcagtcgtag

SEQ ID NO: 3851 - DNA, 1116 bp, Oryza sativa
atgccggcgcgggccgcggcggcggcggctgcggtggcgctgctgctggccgtctgcgctcaggcggcggcgctgccgaggttcgctgaggcgccggagtacaggaacggggaagggtgtcccgcggcggcgacggcggcggcgggggtgtgtgacgctgggctggtgcacatctcgatgacgctggacgcgcactacctgcgcgggtccatggcggcggtgtactcgctgctcaagcacgcctcctgcccggagtcgctcttcttccacttcttggcggaggaggaggaggttgggggtggtggtgacctgcggcgccccgtggcggcgtcgttcccgtcgctgcggttcgagatctacgcgttcagggcggaggccgtggcggggctcatctcggcgtccgtgcgcgccgcgctggagtcgccgctcaactacgcgcggaaccacctcgccgaactgttccgcgctgcgttgccccgcgcgatctacctcgactccgacgtgctcgccgtcgacgacgtgcggcgcctctgggaracgcgcctccccgccgccgccgtcgtcgcggcgcccgagtactgccacgccaacttctcccgctacttcaccccggcgttctggtccgacccaggcctcggccgccgcgtcttcgccggccgccgccgcccgccctgctacttcaacaccggcgtcatggtcatcgacctccgccgctggcgcgccggcaactaccgccaccgcatcgagcggtggatggagatccagaaggagaagcgcatctacgagctgggctcgctgccgcccttcctcctcgtcttcgccggcgaggtcgaggccgtcgaccaccgctggaaccagcacggcctcggcggcgacaacgtgcgcggcagctgccgcccgctccacgacgggccggtcagcctcatgcactggtcaggcaaggggaagccatgggaccgcctcgacgccggcaacccgtgcccgctcgaccacacctggaagtcctacgacctctacgttgccggggacgacggcgccgccgcctcctcgccggcgtccgggccggcgttgtcgtcgacgtcgacgacgtggcccgcattggtgttctcttggtag

SEQ ID NO: 3852 - DNA, 2154 bp, Oryza sativa
atggcgcggcagcagcagcagcgggaggaggagagggccccaatgggcgcggcccagcggcggctgcgcgccgtctccggccacctccagccgccgacggagtccggcggcgttgacctcgccgccaaccccaccgccggcgagtacgcgcacgtttwcaactcaatgtgcatagcttctccagtgcagggctacagtgctgtactccctgagaagttgcaaactggaaagtggaatgtgtacagatccgcaaagtcacctcttaagttaataaatagattccctgataacccagacattggaacgcttcatgataactttgtgtatgcagttgaaacctttagggactgtagatacctgggcacaagagtctgtgttgatggaacagttggggactacaaatggatgacatatggagaagctagtacaagccggactgcgataggttctggtcttatttaccatggaatacctgaaggtgcgcgcattggtttgtattttataaacagacctgagtggaccatagttgatcatgcctgtgcggcatattcatatgtatccgtgccactttatgatactctaggtccagatgcagttcagttcattgttaaccatgcgacagtacaagctattttctgtgtgcctcaaacactaagcactctactaagctttataactcaaatgccgtgtgttcgccttatagtggtaattggtggagacaatgcaaatatgccatctaccccaacagctactggagtggaaattataacttactccagactacttagccagggaaagatgagttctcaatcttttcgccctccaaaacctgaagatattgccactatttgttacactagtggcactactggcacaccgaagggagttgttctttctcatgggaatttaattgcaaatgtagcaggatcaagcctagtcattaagttttacccatctgatgtgtatatctcatatctacctttagctcacatctatgagagagttaaccaggtctcagtggttcactatggtgttgccattggtttctaccaaggggataatttgaagctgatggatgatctggctgcattgagaccaacagtatttcctagtgtgcctcggctatataatagaatttatgctgcaattacaaatgctgtcaaggagtctggagggttgaaagaaagattgtttcatgctgcatacaatgctaagaggcaagcgattattaatgggagaaatccgtccccaatgtgggacaggttggtatttaacaaaataaaagctaggcttggtggacgtgtgaggcttatgacttcaggcgcttctccattgtcagctgatgtaatggaattcctaagaatatgttttggtggtgaagtactcgaaggatatggaatgacagagacatcatgtatcatctctgcaatgaatattggtgataggttaattggtcatgtcggatctccaaatccatcttgtgagattaaactagtggatgtcccagaaatgaattacacctctgaggatgaaccatatcctcgtggagaaatctgtgttaggggacctacgatattctgtggttactataaagacgaaatccaaactagagaggctgttgacgaggatggttggttacacactggagacataggtttgtggatgcctggagggcgtctaaaaattatagataggaaaaagaacattttcaagttagctcaaggagaatacatagctcccgagaagattgagaatgtctatgctaagtgcaagtttattgcgcagtcctttatatatggtgatagtttaaactcttctttggttgccgtagtagcagttgaaccagatgtgttgaaggcttgggctgcatctgagggaatccagcacgaggatttaagacagctttgtgctgatccgaaagcaagatctgctgtcctggctgagatggactctattggaaaggaagcacagctaagaggttttgaatttgccaaagctgttacccttgttgctgaacctttcacattagaaaatggtctcctcaccccaactttcaaggtcaaaagaccgcaagctaaggcatactttgcaaaagaaatcgcagatatgtatgcacaactgcgccaagcagaacagataaaacctaagctgtaa

SEQ ID NO: 3853 - DNA, 1263 bp, Oryza sativa
atggcggtggcgcagcagcagcagcagcagcagaggcaggccaccggtgagtcgctgatgcagaagtgcaagccgtacgtggcgatggtctcgctgcagttcgggtacgccggcatgaacgtgatcaccaaggtgtccctcaaccacggcatgagccactacgtgctcgtcgtgtaccgacacgccttcgccaccctctccatcgcgcccttcgcgctcgtcctcgagcgcaaggtccgccctcgcatgtccttctgggtcttcctccagatcttcgtcctcgccctcctcgggccggtgatcgatcagaatttctactacgccgggctcaagttcacctcgccgaccttctcctgcgccatgagcaacatgctcccggccatgaccttcgtcatggccgtcatcttcaggatggagaaggtgaacctgaagaaggcgaggtgcgtggcgaaggtggtgggcacgctcgtgacggtggccggcgccatgctcatgacgctctacaaggggcgcgccgtcgagatggtctggaccaagcacatgcacctccacggcccgcaccaggacgccgtcgccgccgccgccgccgacaaggactggctcaggggctccatcttcctcatcatcgccaccctcgcctgggcctccctcttcatcctccaggccgcgacgctgaagaggtacgacgcgccactgtccctgaccacgctcatctgcttcgtgggcaccctgcaagccatcgtcgtcaccttcgccatggagcacagcatgtccgtgtggaagatcggcttcgacatgaacctcctcgccgccgcctacgccggtatcgtgacatcgagcattgcctactacgtgcaagggctggtgatgcagagcagggggcccgtgttcgcctcggcgttcagcccgctcatgatgatcatcgtcgccatcatggggtcgttcatcctcgctgagaacatctacctcggagggatcattgggtcggtgctgatcgtcgccggcctgtactcggtgctctgggggaagcacaaggagaacgctgagaagaaggaggccgaggcgatggagatcccggtggcgatcaagggcgtcgacggcaacggcagggtcatggacatcgtggagctggacgaggtgcagctggagaaggcccaggtgaacggcaaggcggcggcggcggcggcgcacgagcacgccgcggtggtcgccgtcacggtccccgccgaggaagcccggatgcagggcaaggacgaggcctag

SEQ ID NO: 3854 - DNA, 1104 bp, Oryza sativa
atgggtttctggcgccggtgcacaccgtcgacatcggcctgtgcaggcgtctgtgtcgtcgccctcctccttgtggctttggcttgctgcccgacgcgcgcacgcggcgctgccccggcggtgtacgtacttggcgactcgcaggcggacgtcgggaacaacaactacctgccagcgacgctgccgatgtacaaggccaactaccctcacaacggcgtcgactacccggggggcaagcccaccggcaggttcagcaacggctacaacttcgtcgactaccttgctgacagtctcggggtggccagccctcctccatacctctctataagcaacacctcggtatacctgaggggtgtcaacttttcttcaggaggatcaggggtgtctaatctcacaaacatgggtcagtgcatcagcttcgacgagcagatagatcagcactactccactgttcatgcaacactggtggagcagctcggcccgcgtcaggcctcgacccaccttgccgaatcgctcttcagcgtcgccatcggcggcaacgatataatcaatcgcgtcctgctgagccagctcgtgggcacccaagaccaattcatcagctcactggccaactccctgaaacgccagctgcagaggatgtatgacctcgggacgcgaaggcttttatttgtgggcgcggcgccactggggtgttgcctgatgctgcgggagcagagccccaccaaggaatgccacgcggaggccaattacctatcagctcggtacaacaacgccgtcaccatgctcctccgcgacatgagcgcgatgcacccgggcatgagctacgccttcttcgacacgtacaccgcgttgctgcagtacatccggcagccagaggcatatggttatactgaggtgaaagcagcatgctgcggcctaggggacaacaacgccatgttccagtgcactccggcaagctcgtactgcgccaaccgaacaagctacatgttctgggacatcgtccatccgacggagatcacggccaagagactcaccaaggttgcgtttgatggatccccgccgttggtttacccgataaacatcagccagctcactgcgagttag

SEQ ID NO: 3855 - DNA, 1098 bp, Oryza sativa
atggagagctcgtcgccgtcggtgccgttcccgctgctgcaggcgccggtggagagcacgtacagggcctgcaccatcccctaccgcttcgcctccgacaacccgcgaaaggccacccccgtcgagatccagtggatcgacctcttcctcaactccgtcccctccttcaggcagcgcgcggagaacgaccccacggtgcccgatgcgcccgccaaggccgagaagtttgcccagaggtacactgcaatgctcgaggagttgaagaagaacccagagagtaatggagggccaccagattgcattcttctttgcaggcttcgtgagctagtccttagagaactgggatttagggatatattcaagaaggttaaggatgaggagaatgctaaggctatgtcactctttgagggcgttgttcagcgaaatgatgagattgaagatgatggaaaacgagcagagaacttgatccgtggaatcttagcaggaaacatatttgacttaggatctgcacagcttgcagaagtttttgctaaagacggtatgtccttcttagcgagttgccagaatcttgtatctcgaccttgggttatcgatgacctggatgcatttcaaaataaatggactaagaaatcttgggaaaaggctgttatttttgttgataattctggcgctgatatcatcttgggcatattaccatttgcaagggaattgctccgacatggcacaaaggtgattcttgctgccaatgacatgccatcaatcaatgatgtcacttacccagagcttgttgaaattataaacaagctcaaggatgaaaatggaaagcttgcaggtgtggatgcatctgacctactcgttgccaactccggtaacgatttgccagtaattgatttgtccagtgtgtcaccagaactagcttatttggcaaatgatgctgacttggtcgttctagaaggcatgggaagagcaattgaaaccaacctatatgcacaaatgaaatgtgactcgattaagatcggaatggtaaaacatcctgaagtggcgcaatttttgggtgggaggctttatgattgcgtcttcaaattcaatgaggcctaa

SEQ ID NO: 3856 - DNA, 1455 bp, Oryza sativa
atgggggacgaggtggggagaggccacttcggctacacctgcgccgcgaagatcaagaagggggcgcgcaagggggacgcggtcgccgtcaaggtcatccccaaggccaagatgacaacatccattgctatagaggatgtccgaagggaggtgaaaatattgaaagctttggcgggacacaagaacttggttcaattttatgatgcctatgaggacaatgacaatgtgtacatagtaatggagttgtgtgaaggaggagagcttctggatagaatactttccagaggtgggaagtactctgaggatgatgcaaaagcggttctggtgcaaatattaaatgtcgtttcattttgccacattcaaggagtggttcatcgggatctcaagccagagaattttctatttacttcaaaagatgagaactctcaacttaaggctattgattttggcttatcagattttgtaaaaccagatgagaggctaaatgatattgttggaagtgcttattatgttgctcctgaagttctgcacagatgctatagcacagaagctgatgtctggagtataggtgtaattgcatatattctcctttgtggcagtcgtccattttgggcacgcactgaatctggcatattccgttccgttctcaaagctgaccccagttataatgaggcaccttggccttctcttactctggaagcaatggattttgttaagcgcttgctttgcaaggatccacgtagaagaatgactgcagcacaggctttaagtcatccatggatcagaaattacaatgacattaagctgccactggacatccttatattccgacttatcaaagcttatattcgttcctcatcattgcgaaaagctgctctaagggctctatcgaagactttgactgttgatgagcttttctatctgaaaggacagttttctctgttggaaccagacagaaatggatgcatcactctagataatatcagaatggccttaacaagagaagccacttatgctatgaaggaatcacgagttcaggagattcttgtctcgttaagcgctcttcagtacagaagaatggactttcaagagttctgtgcagcagcagttagtgtgcaccagcttgaagcattagatagatgggagcaacatgcccgttccgcttatgatttctttgagaaggatggcaatcgagctatcgtaattgatgaactagcttctgaactgggtctcagcccttcagtgccattgcatgttgttctgcaagattggatcaggcacaccgacgggaaattgagtttccttggatttgtcaagttattgcatggcatgtccagcagattgggctacaacgattgggcacatattcacagcttcggattcaaatatttcttgcagccgagtatttttagctctagaaaattatggatctgtgattatattgatagcatttag

SEQ ID NO: 3857 - DNA, 2964 bp, Oryza sativa
atgccggccccgtgcttgcccgaccaggcagcggcgctgctccgcctgaaacattccttcaacatgaccaacaagtccgagtgcaccctcgcatcatggcgcgccggcacggactgctgccgctgggagggcgtccgctgcggcgtcggcatcggcgttggccatgtgacctcgcttgacctcggtgagtgcggattggagagcgctgctcttgaccctgcgcttttcgagctcacttcgctcaggcaccttaacctcgcgtggaacaatttcagcgggtctcatattcccaccattgggttcgaacggctcactgagctcacctacctcaatctctccaactccaaatttgcaggccagataccaaatacaataggacgtctcactaatttgatatcccttgacctctccactgattttttccttattgatctagatgatgagttcttatcagttgccacctattcacccgcttggttacttgtggcaccaaacattgtgtcaatagtcgcaaacctccacaacctgaaggaactttatatgggcacaatagacttgtccagcaacagcatggtacagtggtgcagtgccttttcaaactccactacccctcaacttcaggtccttagcttaccatattgctacctcgaggttcccatttgtgaatcattgtcgggtatacgctcactgagtgagattaacctacagtacaacttcatacacggtcccattccagagtcctttggagatttaccttccctaagtgttcttagtcttacacacaacagtctagaagggagcttcccaagtagaatcttccagaacaaaaacttaacctctgttgatgttaggtacaacttcgaactctccggttcgttgccaaaaaatatctcatcaaatgacattttggtagatcttcttgttagcagtactaacttctctggtccaatccctaactcagtaggcaacatcaaatccttggaaaatttgggtgttgcatcaagtgacttctcccaagagcttccctcttctattggccagctgagatcgttgaattcgttagagattacaggggctggtgtagtaggagcagtaccatcttggattgcaaatttgacttcattgacccttctcgacttctcgaactgtggcttatctgggaagataccatctgcgataggtgctatcaagaatctgaagaggttagcgttatacaaatgtaacttttctggccaaatacctcaagatctatttaacctaactcaattgagagtcatatatcttcaatataataacttcattggtacgttggagctcagctcattttggaaactaccagacctattttctttgaatctttccaacaacaaactatcagttgtagatggtgagaaaaataattcttcatgggtgtccataaactatttctacaccttgcgcctagcatattgtaacatatccaatttccctagtgccttgagtctcatgccttgggttggaaatcttgatctttcaggaaatcagatccatggtactatacctcagtgggcgtgggaaacttcgagcgagttgtttatcctcaacttattacacaacaaattcgacaatataggatataattatcttccattttacttagagattgttgatctcagttataacttattccaaggacccatacctataactggacctgacacttggttgctcgattgctcaaacaaccggttctcatccatgccatttaacttcagttcccagcttagtgggatgtcctatctcatggcctccagaaacaacctatctggagaaattccactctcaatttgtgatgcaagggacattctgctccttgatctttcttacaacaatttaagtggcttgattccactttgtttactggaggatatcaattcccttagtgtgttcaacttgaaagcaaatcaacttcatggtgagttacctcgtaatatcaagaaaggatgtgcattagaggcattagatttcagtgagaacatgtttgaaggacaactacccacatctctagttgcttgcagagatttggaggttttagacattggaaataatcagattagcggtggttttccatgttgggctagtatgcttcctaaacttcaggttcttgtcctgaagtccaacaagttcaccggagaggtggggtcttctgccatcgaaaaagataacacttgcgaatttgcaaatctacggattcttgatttggcttcaaacaacttttctggtactctacatcacaagtggttgaaaaggttaaaatccatgatggagacatcttctagtgcgacattgcttatgcaatatcagcacaacgtgcatagtacaacatatcagttttctacttcaatcgcatataaagggtatgaagtcacatttacaaaaatcttgaggacccttgtagtcatcgatgtttcagacaatgcactccatggtagcattcccaagtcaattggagagctcgttctcctccgtgggctaaacatgtcacataatgccctcacaggaccaattccatctcagcttggtgctctgcatgaactcgagtcattggacctctcatcaaatgatctttcaggggagattccacaggagttagcacagctacacttcctctcagtgctgaacctgtcctacaacggtttggttgggagaataccagattcaccccagttctcgaacaatctctcctatctggggaacattggtctatgtgggtttccattgtccaaggaatgcagcaacatgacaacaccaccaagctcacatccttcagaggaaaaacatgtggatgttatactgttcctctttgttggacttggagttggcatcgggtttgcagttataatcgttgtgacatggggaatccgcatcaagaaaaggtcccaagacagcagatttccgttttggaaaaaagttctctgtatgtaa

SEQ ID NO: 3858 - DNA, 2118 bp, Oryza sativa
  misc_feature (1)...(2118): n = A,T,C or G
atgggctattgggccgataatattctgggcttctttttgggtcgagaatattttgggcttaagggcccaattcgttcttcgtttcggcccgcttttagtccgcagcttacacttgtttcgtctcatctctcgtgtcccctcacttcgctgcaaaaccctaccgtcgccgccgcccccgcagctatgacgtcatcgccggcggcgaggcgccggccgccgggtccgctggcgctggggctggagtcgtcggcgaacaagatcggcatcggcgtcgtctccctctcgggggagatcctctccaacccgcgtcacacctacgtcaccccgccggggcacggcttcctgccgcgggagacggcgcaccaccacctcgcccacctcctcccgctcctccgcgcggcgctgggcgaggccggggtgacccccgccgacctcgcctgcgtgtgctacaccaaggggcccgggatgggcgcgccgctccaggtcgccgccgccgcggcgcgcgcgctctcgctgctctgggggaagccgctcgtcggcgtgaaccactgcgtcgcgcacgtcgagatgggccgcgcggtcaccggcgccgtcgaccccgtcgtgctctacgtctccggcgggaacacgcaggtcatcgcgtacagcgaagggaggtacaggatcttcggcgagaccatcgacatcgcggtggggaactgcctcgatcgctttgccagggtgcttgagctgtccaatgatcctagccctgggtataacatcgagcagcttgcgaagaagggagagaagttcattgatctcccttatgttgtaaagggtatggacgtgtcatttagtggcatactgagcttcattgaagctacagcaattgagaagcttaaaaataatgagtgcacgcctgcagatctatgctactcattgcaggaaactctctttgctatgcttgttgaaatcactgagcgtgccatggcacattgtgattcgaaggatgttcttattgttggtggtgttgggtgcaatgaacgtttgcaagagatgatgaggataatgtgttcagaaagagggggtaggctgttcgcaaccgatgatcgatactgtattgacaacggggcaatgattgcatacactggtttactggcatacgcacatggcatgaccactcccctagaggagtccacttttactcaaagattccgaacggacgaagttcatgcaatctggagggagaaggagatgccagtgttaactaacatccgtgcccatgcaatggctgaagtaattcttgttcttttccttcctatccaaggaaatagaatacttggaaaggaagccagagtccagagacatgagcaggtgggtcggtggagcggacaggtgacgaccatcatctccgagcagttcccgccggacgtcgacgcaagcatcgccacgttccgggtcgactccgacgtcgtctcgctcaacgggagggaggcgctgcaggcggacgccgaggcsgggcgcgacggtcgagtccacgccgtcatccgctgctccgcgtcaacctccaccacgggcggcggcgcggcgcgctccggcgtgtcccgagcgtacggcgcgtccaacgccatgacgccgcgcgcytcmaacctcaccggcgtggagatctactcgccggtggagatgaagtggaaggagaggagcggcacggcgaagacggcgaagatggcgaagcggcgcggcggttgggaaaacgacgcgacgaggatggcggcgggcgagcaggagcggcaggcctcgcaggtgcttggtgagggtgctcgtcggcatcccggtcttgatccagatctccgtctgcgaggcagcgaggacgttgtccaggaggactgtcgtcggcggcggcggcaccgccgmgacgctaggtctagcgggctgcctcgcctngccgcmaccgccaagccgacgagctcgccgcctccccgggcctccgccggctgcgcgtgtggctccagctccgccgccgcgggatgtacggtgacgtgggcgcttaccgtgcagcagcttgtaggggaagccaatcaaagccagctaggaagtaggacctctgccagatggggcccaccagctgtccggggatag

SEQ ID NO: 3859 - DNA, 423 bp, Oryza sativa
atggggaggtcgccatgctgcgagaaggcgcacacgaacaagggggcgtggacgaaggaggaggaccagcggctgatcgcctacatcaaggcgcacggcgagggttgctggcggtcgctgcccaaggcggcggggctcctccgctgcggcaagagctgccgcctccgctggatgaactacctccgccccgacctcaagcgcggcaacttcaccgacgacgacgacgagctcatcatcaagctccaggcccttctcggcaacaagtggtcgttgattgcggggcagctgccggggaggacggacaacgagatcaagaactactggaacacgcacatcaagcgcaagctcctgagccggggcatcgaccgcagacgcaccggccggtcagcgccgggagcagcgccgccgcggcgagcgggctga

SEQ ID NO: 3860 - DNA, 750 bp, Oryza sativa
atggccgacggcgcgacggcggccatcgtcgtcatcaaccccaacaatccctgcggcgcggtgtactctgcacagcacctttttcagattgctgaaacagcgagagaattggggatcccaatcatagcagatgaggtgtatgcacatatggtgtttggtgggagcaagtttgtgccaatggctacctttgcacatatcacaccagtaatcaccattggagcactatcaaagaaattcatgctgccaggatggcgacttggttggttggccttctgtgaccccaatggtgcactcaagcatgtcagaaatgcaacagaaatgctactgaatgtgacttcaggccctgcctccatagttcaggctgcagttcctaagattctctcaaacgaacacaatgaattccatcgaaacgttgtgaacttgcttgagtctgcagctgatgctctctacagaagagtgaaccagattgaagctctgcagtgctactcaaaacctcatggctccatgttcatgatggttgaagtcaacacttcacttctgttcggtgttgaagatgacatggacttcgctcgtgaattgattaaagaagaatctgtcctagttttacctggttctgtaattgggttaaagaactggattaggatattctttggggcacctactagtgtgatacttgaagcctgtgataggattgaagcattctgccaaaaaagagcagttcaagtaaagctactgaaaaagaagttctga

SEQ ID NO: 3861 - DNA, 2562 bp, Oryza sativa
atggagttgaccggcctgacgcgggcggcggcggcggccaccgtgacgccgccggcgccgcgccggggatggggcgagctccggttcgcgccgctgctgcccggcgagcggcatgggaggaggaaggtggtggtggcggccatcagcgaggaggtgccgcggctggcggcgtcgccgtcgtcggggatcaagggcggcggggccggggagaggcggccggcgccggagaaggtggcgctgcgggcggcgctgacggtgcggcggaagcagaaggaggacatcaaggaggcggtggccggacacctcgacgcgctctgggacatggtcggccggaatgtcgtgctcgagctcatcagcaccaagatccacccaaggaccaagaagccgatgcagagtggccgtgtgtccatcaaggactggtgccagaagaggggagccaagggcgaccacgtcgtgtacacggccgagttcacggtggacgccgacttcggcgagccgggcgccatcgccgtggccaaccggcacaacagggagttcttcctggagagcatcgtcgtcgagggcggcggcctgccgtgcgggcctgtgcacttcgcctgcaactcctgggtgcagtccaccagagagctgccaacaaagagggtgttcttcagcaacaagccatatttaccttctgaaacacctcccgggcttagagaactaagggagaaggaacttaaagacctaagaggagatggcacagacatgctagcagagagcagagtagagaagccgcatccaatatatgttccccgcgatgaggcatttgaggagctgaagcagggtgccttctcatcagggaggctccgggcagtacttcacacattgatcccatcgctgattgcatccatctcagctgagacccacaatttccaaggcttccaccacatcgacaacctctataaggagggcctcaggctgaagctgggcctgcaagaacacctattccagaagataccacttgttcagaagattcaagagtcgagcgaagggatgcttcgttacgacactcctagcattctttctaaggacaagtttgcatggctccgtgacgatgagtttgctaggcaggctgttgcaggaataaacccagttaacattgagcggctgcaggttttcccaccagtgagcaagctggatcctgcaatctatggaccaccagaatcatcaattactgaaacacacatagctggacatctcaacggactcacagtacaacaggcaatggacgaagcaaagctgttcatagtggactaccatgacgcatacctgccattcttggaccggatcaatgcgatagatggacggaaagcatatgcgacccggaacaatcttcttcctgacagaagctggcacactgaaaccgatcgctatcgacttagtcttcctccagccaagccaggggagcctcggccaagcaaggtcctgacgcctccctatgatgctacctcgaattggctctggatgcttgccaaggcccatgtcagctccaacgatgctggtgtccatcagctggtcaatcactggcttaggacgcatgcaacaatggagccgttcatcctggcggcgcaccggcatatgagcgcaatgcaccccatcttcaagctcctgcacccgcacatgcggtacacgctcgagatcaacgcgcttgcacggcagagcctcatcaacgccgacggagtgatcgagtcctgcttcacccccggccctgtctccggcgagatcagcgctgcttactaccgtaaccactggcggggagttgctgtggaggacgcgacgcagccccatggcgtcaggcttctcatcgaggactacccatacgcgaatgatgggctcctgctctggtcggcaattcgaagctgggtggagtcctacgtgcagctctactacccggacgccgggacggtgcagtgcgatcttgagctgcaggggtggtaccacgagtcgatccatgtcgggcacggcgacctccggcacgcgccgtggtggccgccgctctccacgccggtggacctggcgtccatcctgacgacgctggtctggctcgcgtcggcgcagcacgcggcgctcaacttcgggcagtacccgctgggcgggtacgtcccgaaccggccgccgctgatacggcggctgctgccggacctggagcgcgacgcggcggagtacgccgcgttcctcgccgacccgcaccgcttcttcctgaacgcgatgcccggggtgctggaggcgaccaagttcatggcggtggtggacacgctgtcgacgcactcgcccgacgaggagtacctcggcgaggggcgggacgagggcggcgtgccgtggacggcggacgaggcggccgtggcggcgcacggcatgttcgcggccgatgtgcgacgcgccgaggagaccatcgagaggcggaacgccgaccacggccggaagaaccggtgcggcgccggggtgctgccgtacgaactgctggcgcccagctcgccgccgggggtcacctgccgcggcgtgcccaacagcatctccatctga

SEQ ID NO: 3862 - DNA, 1269 bp, Oryza sativa
atggcttgcaatgtgctcattttctctgcatatgtcgtcgtcatgtcgttcttcttgtgtagtgttcatgccaaggtcaacatgaatgcatcattccatttaactagtggagatgatagtctcagaggcaggtctcttgagtcaaagaaggtggtgttcgatgtgcgcaaacatggcgcttacggagatggacaacatgatgacacgaaggcattggcaaaggcatgggctgcagcttgctcctcttcgcaaccttccattgttctcatcccaaagggcaagagatacctcaccaagcacattacactatctggtccatgcaaatcaagcatcacgttcatgatagagggtacgttggtggctcctccaaagaggtcagattggagcaaggaaactattaggcactggattatgttcaatggtgtgagtggccttactgtcgctggtggtgggactgtcgatgaaaacggcaagatttggtggcaaaattcctgcaaaacgaatgcaaaacttccatgcactgaagctccaacggccttgacattctactcctgttcaaatctgaaagtggagaacttgaagctactaaacagccaacaaatccacatgtcagttgaggattgcactgatgttaggatctctagcctgacaatcacagcaccaggcactagcccaaacaccgacggcatccatatcacaagaagtaaaaatgtacaagtgacaggctgcataatcaagaccggggatgactgcatgtcgattgaggatggaactgagaacttacatgtcaagaacatggtgtgtggaccgggacacggcatcagcatcgggagcttaggcgatcacaactctgaagctcatgtcaacaatgtcaccgtcgacaccgtcaggctatatggcacaaccaacggagctcgcatcaagacatggcagggcggttggggctacgcgaagaacatcgtgttccagaacatgatcatggaaaatgtttggaacccaatcattatcgaccagaactactgtgattctgctacaccctgcaaggaacagacatctgcggtgcaagttagcaatgtggtcttcaagaacatcaggggcacaagtgcttccaaggaggctatcaaactggactgtagcagaaatgtaccttgtcaaggaataaccttgaaggacgtcaagctcactatcaagggaggtggtagtgatgccaagagcacttgcggaaacgcaaaatggaagaaatcagggatagccctgtgctttcagtaa

SEQ ID NO: 3863 - DNA, 1182 bp, Oryza sativa
atggcctccactgtgctcattgtctctgcatctctccttgcactcttcttcttcttgcatagtgctgatgcagatgttggcagtaatgtgttcagcatacagagctacggggctcatggagacggacgacatgatgacaccaaagcattgggagatacatgggctgcagcttgctcctctgcaaaacctgcagttttgctcatccccaagggcaagaaatacctgatcaagcacacaacactgtctggtccatgcaaatcaagcatctcattgatggtgaagggtagtttggtggcttctccagagaggtcagactggagcaaggagaccataaggcactggattctgatcagtggtgtcactggtcttactgtcactggtggtgggaccatagatggaaatggcaagatttggtggcaaaattcatgcaaaaccaactcaaagcttccatgcacagaagctccaacggcactgacattctactcctgcaagaatctgaaggtagagtatctgaaggtggtgaacagccagcaaatccagatttcagtggaggattgcaccgatgtgatggtgtctcgcctgtcgatcacagcaccagaaacagccccaaacactgatggaatccatatcacacgcagcagagatgttgaggtgacagactgcatgatcaagaccggggatgactgcatgtcaatcgaggacggaaccgagaacctgcatgtcaagaacatggtgtgtggaccgggacacggcatcagcatcggtagcttgggtgatcataattctgaagctcatgtcaacaatgtcaccgtcgacaatgtcaggttgtatggcacagccaacggagctcgcatcaagacatggcagggaggaaagggttcagcgaagaacatcgtgttccagaacatggtcatggacaatgtctggaaccccatcatcatcgaccaaaactactgcgactcttctacaccctgcaagcaacagaaatctgcagtggaggtgagcaatgtgctgttcaagaacatcaggggcacaagtgcatcagaggaggccatcatgctgcattgcagcagcagtgtaccttgccatggcataaccttggagaatgtcaatctcactgtcaagggaggaattgatctgaaacatgaacatccttggaccttggaagatgtagagaagtag

SEQ ID NO: 3864 - DNA, 612 bp, Oryza sativa
atgaatcccgagtacgactaccttttcaaacttctcctcattggtgattctggtgttgggaaatcgtgcttgcttctcagatttgcggatgactcatacctggacagctatatcagcacaattggagttgattttaaaatacggacagtagagcaggatgggaagaccatcaagcttcaaatctgggatactgctggacaagaacgtttcaggacgattacaagcagctattaccggggagctcatggaataattattgtatacgatgtgacagaccaagaaagcttcaacaatgtgaagcagtggttgaatgaaattgatcgttatgcaagtgacaatgtaaacaagctccttgttgggaacaagagcgacctaactgccaacaaagttgtgtcatctgaaacagctaaggcgtttgctgatgagatgggcatccccttcatggagacaagtgccaagaacgccactaatgtggagcaggccttcatggctatggccgcatccatcaaggacaggatggctagccaaccggccgcttcaaatgcaaggccaccgaccgtgcagatccgcgggcaacctgtcaaccagaagacgtcgtgctgctcgtcctaa

SEQ ID NO: 3865 - DNA, 1179 bp, Oryza sativa
atgccgacgcctcgtcctcgccaccgccaccatgcgctcccgctcgcgctcgcgctcgccgcgccgctgctgctgctagccgcggcggacgggcagccgaacgagtcgagggacaagaacaacggcggcgggggaggtgggttcatggcgcccagcggcggaggcggcggcatgggctctcagtcgccgagcttcagcgcgcccatggtggtgctcctcgtggcgctcatcgcggccttcttcttcatcgggttcttctccatctatatccggcggtgcggcggcgaggcctccacggggccgaccatcccggccgcggcgctggcggcgctgtcgcggcaggagcagcggagccggcggcagcgcgggctcgaccccgccgtggtcgagtcgttccccaccatgaagtacgccgaggcgagggagctccgcgacggcggcaaggacgccgtgctcgagtgcgccgtctgcctcagcgagttcgacgacgacgaggagctccggttgctgcccaagtgcagccacgccttccacccggactgcatcggggagtggctcgccggccacgtcacctgccctgtctgtcggtgcaaccttgcgcccgacgcggcggcggcggaagcgaacgtcgtctccggcgaggtggatggggagcagcaggaggaggaggtggtggtggccatcgacgtggaccgcgagggcgaggaggaggacgaggagaggcggagggaggcgatggagctcgagaggatcggcagccagcgccgcgcgtgcgtcgagtcgcggtcgctgccgctgccgcgtcgcactcgacgggcactcctcgcacgacgcggctcggcgacgccggcgacctcgagcggttcacgctgcgcctgccggagcacgtgcgcagggagatggtcgccgccgcgcgaggagagcwtgcgccgaaccgtagtccgggaaggccgcgtcggcggcggcgcccggagcgcgcggatcgggcggtccgaccggtggccgtcgttcatcgcgaggaccttctcctcgaggatcccgttctggtctgcgtcgaggaggtactcaacgccgcggaggccggagctgacgccgccgccaccaccaccaccacgacgccaacgtcaacggcgaggaccaagcgtgacaagacggccgccgccgcagatggctccgtga

SEQ ID NO: 3866 - DNA, 1392 bp, Oryza sativa
atgggagaggctaggagagggcagaatcctcatcatgttcttggctatggcttccatggcaccaccttgcccaactccatggcttctgcaaacctcttcgagcaaggaggaggaggaggaggtggcgctgcctattttggagagctagaagaagctcttgttcatcaggttgccacactcaggaggagggctcaacaaactgcaaccaccaccacctctcaccatggacacaccactcccttctccactgctgctgctgcagctacagcaacagcaacagctaggcctcctgctacactggacatcttcccatcctggcctatgaggaggagctctcttccaacaccgaaggatggatgttcaaatgtaacggcagacacaacggactccgagagcagcagcaagaacaacggcgatcagggtgcagcagcagccgacatggcgagccagtttgatcagatcccacagcagcagcagaagcagcacaagaagatggcagcaagttccactcacagtgaccacaggatgacaaagacacttgatccaaagataatgagaaggttagcccagaaccgagaggcagcacgcaagagccggctgcgaaagaaggcttacatccagcagcttgagagcagcaagttgaggctggctcagatggagcaggatctcgagagagctcgttcccagggcctcttgctgggaggatcaccaggtggaaacaccagcgcaggagcggcgatgttcgacgccgagtacgggcggtggctggaggacggcgggcggcggatggcggagctgcacggcgggctacacgcgcacctgccggacggcgacctgagggcgatcgtcgacgacgccctggcccactacgacgagctcttccgcctgagggcagccgccgccaaggccgacgtgttccacctcatcactggcacgtgggccacccccgccgagcgctgcttcctctggatgggcggtttccaaccgtccgatctgctcaagacagtggcaccccagctagaccctctgactgaacagcaagtggttggcatctgcagccttcagcaatcatcgcagcaggcagaggaagctctctcccagggcctggagcagctgcatcagtcactagctgagaccgtcgccaatggcggctccgtggtcaacgaagccagccttgggagcttcatgggttacatggcccttgccctgggcaagctgtccaaccttgaaggctttgtcatacaggctgataacttgaggcaacagactcttcatcagatgcacagaattctgacaattaggcaggcagctcgatgtttcttggcaattggcgagtaccataatcgcctccgtgccctcagctccctctgggcttctcgtccccgagagtaa

SEQ ID NO: 3867 - DNA, 1257 bp, Oryza sativa
atggacactccggcggccgccgactggtcggagcttccggccgacgtgctcggcctcgtcctcctcgagctcgagttccccgacctgttccgctccgccgccgtctgcaagctctggcgcgccaccgcccgcgacatacgccgcctcggcctctactcccgcgcgcagacgccctgcctcctctacaccaccgccgccgccggcccgcgcgccgccgtgctctacagcctcgccgacaagacgacgtcctacacggtccccttcccggacccgcccatcgcggagcgccacatcgtcgggtcatcccacggctggctcgtcaccgccgaccaccgctccgagctccacctcctcaacccggccacaggcgagcagctcgacctcccacccgtcgccaccatcgaacacgtaaggccactctacgacgacgccgggaacctcaacaactacaagttggtctactacgacggcggcggcaacagtcaccggagcaacgacgatgacatgcacacggtgacgcacccgccggagacgttcagggagttcttgtatctcaaagccgtcatctcctccgacccatcgcgcggcgacgactacacggtgatgctcatccatcacccatatcttcagctctccytcgsgagatccggcgacaagaagtggacatggatcaagatggggaacaatgagtgtgagtggttcgaagattgcatctaccacgacggcgtgttctacgcccagaccgttcacggcgccatccacgccattgatgtcgtcagtgcttcttcctccttcacccatagactgattctcaagccgaccatgggtgaattgggcaccctctacattgtacgtaccacggaaggtgacatcctgcaggtcttgcgagtcacggaagaagatgaaggtagcgagcataaggacgtacgaacaactgaaatcggggtgtacaaggttgactacaagaagcaagatcttgatgacgtcgatgacataggtaacaatgcattgtttattggcactagttactcgatgtgcttgccagtgaaggattatccacacttgatgccaaatcacatatatttcgacgatgactacgggtacttggttcaccgtaaacatcttcgtcgggacgttggagtttatgattatacgaatgacactgcgatcgatgtggagtatcctcagccgtggctgaattggccactagctccagtttggattactccaagttttactaaaactgccaaaatatag

SEQ ID NO: 3868 - DNA, 3168 bp, Oryza sativa
atgggcgaggccgggcaggacgcgccgccgccgccggagaagggcgtcgaggtggaggtgttcccggcgtgggcgcggggcgtggaggagtgcgaggcgcggctgggggtctcggcgtcgcggggcttgtcgtcgcgggatgcggcggcacggctgcgggcgcatggccccaacgagctcgccgagcacccgggacccacgctgctgcagctcgtcgcgcagcagttcgacgacacgctcgtccgcatcctcctcgccgccgccgccgtctccttcgcgctcgcgctctcctcctccgccggcgccgtcamgctytccgccttcgtcgagccgctcgtcatcttcctcatcctcgtcgtcaacgccgccgtgggtgtctggcaggagaccaacgccgagaaggcgctcgaggcgctccgcgagatccagtccgaccaagccgccgtcctccgcgacggcgactggctacccagcctccccgcgcgggacctcgtcccgggcgacatcgtccagctccgcgtcggtgacaaggtccccgccgacatgcgcgtcctccgcctcgtcacctccacgctccgcgtcgagcagggctccctcaccggcgagaccgcctccgtcaacaagaccgcgcaccaagtgccccacgacgacgccgacatccaggccaaggagtgtatggtcttcgccggcaccaccgtcgtcaatggcagcgcaatctgcctcgtcgtgcacactgggatggccactgagatcggcaaaatccacgcgcagatccacgaggccgcgcaggaggacgacgacaccccgctcaagaagaagctcaacgaattcggcgaggcgctcaccaagatcatcggcctcatttgcgctttggtgtggctcatcaatgtcaagtacttcttgacgtttgagctcgatgggtggatgccgaggaacatccgcttctctttcgagaagtgcacatactacttcgagatcgctgtggcgctcgctgtcgctgccataccggaaggacttcctgccgtgatcaccacgtgccttgcacttggtacaaggaagatggccgccaagaatgctcttgtcaggaagcttccaagtgtggagaccttgggatgcaccaccgtgatttgctctgacaagaccgggacgctgacaacgaaccagatgtccgtggcgaaacttgtggcgatcggagatgctgaagggaaggtcaggagcttcaaggtcgatgggacgacatatgatccccgggatggtagaattcacgattggcctgcagggaggatggatgcaaaccttcagacgatcgcaaagatttctgctgtgtgcaatgatgccagtgtggcacattcttcacatcagtatactgcaactggaatgccgacagaggcagctttaaaggtcttggttgagaaaatgggaatacctgaaggaatgaacggattgtccttggatccatctgaaacattaggctgctgccaatggtggagcaatgttgccaagaggattgctactcttgagtttgaccgtacaaggaaatcaatgggagtaattgttaagtccaaatcaggaaggaatgctctacttgtgaagggagctgttgaaaacttgctggagaggagtagccacattcaactgcaggatggttcagttgtgccgttagatgaaaaatcaaggaaagctattttggaaaacctccatgaaatgtcaattaaagctctgcgctgccttggttttgcatacaaagaggatctagcagaatttgcaagttacgatggtgaaaaccaccccgctcacaagcttttgctggatccagtcaattatgcagcaattgagaccaatttgatattcactggtcttgctggcctaagggatcctccaagggaagaggtttttgatgctattgaagattgcagagctgcaggcatccgtgttatggtgataacaggagacaacaaagaaactgctgaagcaatatgccgtgaaattggtgtgttttcacatgacgaggacattaccttaaagagtcttacaggaaaggagttcatggcacttgaggacaagaagacactgctgcgaaggaaaggtggcctactgttctctagggcagagcctaggcacaaacaagagattgtgagactgctcaaagaagatggtgaagttgttgctatgactggagatggagttaatgacgcccctgcgctaaagctggctgacattggagtagcaatgggtattacaggcactgaggttgcaaaagaggcctctgacatggttcttgctgatgacaattttagtaccattgttgcggcagttggtgaaggaaggtctatttacaacaacatgaaagctttcatcagatacatgatttcctcaaacattggtgaagttgcgtcaattttcctaacttctgctctgggtattcctgaggggttgataccggttcaacttctatgggtaaaccttgtcaccgacggtcctcctgcaactgcattaggtttcaatccacctgataaagacatcatgaagaaaccgcctagaaagagtgatgactcactgattactccctggattttgttccgttacctggtcattggcctttatgtggggattgccacggtcggcatctttgtcatatggtacacacatggatctttcatgggcattgacctcaccggagatggtcacacccttgtcagctactctcagctctcaaactggggccagtgctctacctggaacaacttcacagttacgcctttcactgctggagctaggactttcaccttcgatgacaatccatgcgagtacttccatggtggcaaagtgaaggcgacaacgctctcgctgtctgtcctggtggcgattgagatgttcaactcactcaacgccctctccgaagacactagcctcctgaggatgcctccttgggtaaacccatggctgctcctcgccatgtcagtgtcgttcgggctccatttcttgatcctctacgtgccgttcctcgcgcaagtgtttggcatcgtgccgctcagcttgaacgagtggctgctggtgttgcttgttgcactcccggtggtgctcatcgacgaggttctcaagtttgtcggaaggtgtacaagctcatcaggccccaagaggcgaaccaggaagcagaagggcgagtaa

SEQ ID NO: 3869 - DNA, 702 bp, Oryza sativa
atgtccgaccctggcctmatccgcgacatcaagcgcgccgtcaccatccccgtcatggccaaggcccgcatcggccacttcgtcgaggcccagatcctcgaggccatcggcgtcgactacgtcgacgagagcgaggtcctcaccctcgccgacgacgcccaccacatcaacaagcacaacttccgcgtccccttcgtctgcggctgccgcgacctcggcgaggccctccgccgcatccgcgagggcgccgccatgatccgcaccaagggcgaggccggcaccggcaacgtcgtcgaggccgtccgccacgtccgctccgtcatgggcgacatccgcgcgctccgcaacatggacgacgacgaggtcttctcctacgccaagcgcatcgccgcgccctacgaccttgtcatgcagaccaagcagctgggccgtctaccagtcgttcagtttgcggccggcggtgtggccacccccgccgacgctgccctcatgatgcagctcggctgcgacggcgtcttcgtcggctccggcatcttcaagagcggcgaccccgcgcgccgcgcccgcgccatcgtgcaggccgtcacccactacagcgaccccaagatcttggcggaggtcagcagcgggctcggcgaggccatggttggcatcaacctctccgatcctaaggtggagcgcttcgccgcccgctccgagtag

SEQ ID NO: 3870 - DNA, 588 bp, Oryza sativa
atggcggcggcggcgagatggtgggtggcggcggtggtggtggcggtggcggcgatggcgggggcggcgaagggggacttcgcggcggacaaggcggagtgcgcggacaagctgatggcgctggcgacgtgcctgacgtacgtggaggagaaggcgacggcgagggcgccgacgagggattgctgcgccgggcttgggcaggtggtcgccggcagcaagaagtgcctgtgcgtgctcgtcaaggaccgcgacgagccggcgctgggcttccgcatcaacgtcacccgcgccatggacctcccctccggctgctccatcgccgccaccttctccgactgcccaaagatgctgaacatgtcgcctgactccaaggaggcagagatcttcaagcagtacgcgagggagcacgagtccaacaacgccaccaagcctgctcctgctgccgctgctgctgccaccggtagcgctggcaaggcgacggcggcgaccggcgacgccggcgtggggcggcggcaacgcagctcgctcgccgcgcgtgccgtggccgcggcggtgctcgccgccgtattcggcctcaccgtcgcctga

SEQ ID NO: 3871 - DNA, 2709 bp, Oryza sativa
atggagaagctggacaggtacctgcaggagaacttcgatgtgccggccaagaacccgtccgaggaggcgcagcggcgatggcggcaagccgtcggcaccatcgtcaagaatcgccgccgccgcttccgctgggtgcccgacctcgagcgccgctccttggacaaggccaaggtccgctccacccaggaaaagattcgggttgccctctatgtgcaacaggctgcactcatttttagtgatggtgccaaaaagaaagaatacaaactaacaggggatattattaaagctggatatgccatcaatccagatgagctagcattgatcacaagcaagcatgattcaaaagctttaaagatgcatggtggggtagatgggatatctataaaagttcgttcatcatttgatcatggcatatatgctagacatgacccttataattcttatgttggtttggcaacagaaggttggccaaagggcatgtatgatggcttgggtataatactcagcattttcttagttgttatggttactgctgttagtgattataagcagtcacttcagtttaaggagctagacaatgaaaagaaaaagatatttatccatgtaaccagagatgggcgtcgacaaaagatctctatatatgacttggtagttggtgatatagttcatctgtcaattggagatcaagtacctgctgatggactgtatatacatgggtactcccttttgattgatgagtccagcttatctggtgagagtgacccagtatttctcattgacaaaggcatgacggttggttkgctcaaatggtattctactgatgcattgactatagtaaactactttgcaacagcagtaaccattatagttgttgctgtacctgaaggattgcccttggctgttactttgagtcttgcatttgcaatgaaaaagttaatgaatgataaagcacttgttagacatctttcagcgtgtgaaacaatgggatctgctggtaccatctgcacggacaaaacaggaactttgactactaaccatatggttgttgacaaaatatggatatctgaggtttcaaagtcagttaccagtaacaccatttcaggagaacttaattctgtggtttcttctagcacattgagtctgcttttgcagggaatttttgagaatactagcgctgaggtggtcaaggaaaaggatggcaagcaaactgtcttaggaactccaacagaaagagcaatattagaatttggcttgggcttgaaaggagatcatgatgctgagtatagggcctgcaccaaggttaaggttgagcctttcaattcagtcaagaagaagatggcagtgctgatttcattacccaatggcacgtccagatggttttgcaaaggtgcatcagaaattattttgcagatgtgcgacatgatggttgatggcgatggaaatgctattcccttatcggaagctcagagaaagaacatcttagatactatcaactcatttgcttcagacgctttaaggacgctgtgcctggcatataaggaagtggatgatgatattgatgacaatgcagatagtccaacaagtggttttactctaatagccattttcggtatcaaggatcctgtgcgccctggagttaaggatgctgttaagacctctaaagctatagctaaagagtgtggaatattgactgaagatggtgtagcaatagaaggaccagaattccatagcaagagcacagaagagatgagggacctgatactaaatattcaggtcatggcccgttctttaccattggataagcatacactcgtgacaaacttgcgaggtatgtttgatgaggtggtttctgtgacaggtgatggtacaaatgatgctcctgcattacacgaagcagatattgggcttgctatgggcattgcaggaacagaggttgccaaggagagtgcagatgtcatagtacttgacgataatttcacaactataataaatgttgcaagatggggtcgtgcagtttatattaacatccaaaagtttgtgcagtttcagttgactgtcaatattgttgctttagtcatcaattttgtctcagcatgcatcatagggagcgctcctctcactgctgtgcagctgttgtgggttaatatgatcatggatacattgggagctttagcactagcaacagagcctccaaatgatgaaatgatgaagaggccacctgtccgaaaaggggaaagtttcattaccaagttcatgtggagaaatatcatggggcaaagtttatatcagctatttgtacttggagctctcatgtttggtggggaaaggcttctgaacatcaagggtgcagattccaaatccatcataaatacactgatattcaactccttcgtgttttgtcaggtattcaatgaaataaacagcagagaaatgcagaagatcaatgttttccgtggcatcatcagcaattggatcttcattgcagtcatagcagcaaccgtagcatttcaagtggtgatcatagagtttcttggcactttcgccagtactgttccactcaactggcaacattggctgctcagcgtcggccttggctccatcagtctgattgttggtgtcatcttgaagtgtataccagttggttcaggtgaaacctctgcaactccaaatggatacaggccacttgccaatggccctgatgacatatag

SEQ ID NO: 3872 - DNA, 504 bp, Oryza sativa
atggaggcatccaagctagcaatctgcagcttgttcgtgctcgccgtggtagccgctacaatgtttcactgctccgatgcccagaactcgccgcaggactacctgtcgccgcagaacgcggcccggtccgccgtcggcgtgggtccgatgagctggagcacgaagctgcaggggttcgcggaggactacgcgaggcagcggaagggcgactgccggctgcagcactcgggcgggccgtacggtgagaacatcttctggggctccgccggcgccgactggacggccgcggacgcggtgcggtcgtgggtggacgagaagaagtactacaactacgccagcaacagctgcgccgccgggaaggtgtgcggccactacacgcaggtggtgtggcgcgactccaccaacgtcggctgcgcccgcgtgcggtgcgacgccaaccgcggcatcttcatcatctgcaactacgagccccgtggcaacatcgttggccgcaggccctactga

SEQ ID NO: 3873 - DNA, 939 bp, Oryza sativa
atgctgattcacggggagggctcgtcgtcgtcggcggcggcrgcgggggggaagatcaaggggtcgtggagcccggaggaggacgagcagctgagaggggcggtggcgaggcacgggccgaggaactggacggcgatcagcgaggaggtgcccgggaggtcggggaagtcgtgccggctgcggtggtgcaaccagctcagccccggggtgcaccgccgccccttcacccccgacgaggacgcgctcatcgtcgccgcccacgccaagtacggcaacaagtgggccaccatcgcgcgcctcctcgacggccgcaccgacaactccgtcaagaaccactggaactcctcgctycgscgsaaccgcagggccgccgccgcggcgcccgcggcggctgcatccgtgtcgtaccagtccatggatctcaccgaggaggccgacaacgacgacgagggcaccagcgacgactcggtggcgatccctgcgcattgtcgtcgccggcggcggtcgtcgctggtgtcctgtgcttccgccgccgccgcccccggccaagaggctgtgcgtggcgccgcccaccggcgtggagcaccgggctccgcsgcccgacccgcctacgtcgctgtcgctcagcccgccgggcgccgccgccgccgccatctcagcctccaccgtggtcggcgggtcgtcggcggcgcgcgcggaggaggaggccgtggcgagggagaaggcgaggatggagcaggacccgtggctgatggcgatgatgcggcagatgatcaccgaggaggtgcagcggcaggtgagcgtggtgtactcgctggtggcatcctccgcggcgatggcggcacagacgggcaacgccggcggcgtcggccggaaagggcccgacggccgcccatccaacggtcaggattgattgatcaaccgatcatagatctctaa

SEQ ID NO: 3874 - DNA, 990 bp, Oryza sativa
atgtcggcgggatggtggggcccacaggacctgggtgcggggacgctgagcttgatctcgcccacggacattcgccctggcttcctgccggtgttccgttccgggagctgcgccgatatcggtaccaaatcgtacatggaggacgagcatgtgtgcgtcgataacctcatcgagcacctgggagtgcgtacacctgtgatccctgcaccgggtgccttctacggggtgtttgatggtcatggtggtacggacgctgcttgttttgttcggaagaacttactgaggttcataattgaggatggtcacttccccagcagcatagagaaggcaatcaggagtgcatttgtgagggctgatcatgcaattgcggattcccattctcttgaccgcaattctgggactacagcattgacagcacttatttttggcaggacattgctcgttgcaaatgcaggagactgtcgagcggtattagggaagagaggccgagctgttgagttgtcaagagaccataaacccagctgcagaagcgaaaagatcagaatcgagaaccttggtggtactgtctttgatggctatctcaatggtcagctgtctgtagcaagggcgattggtgattggcacgtgaaaggttccaaagggtccataagccctctcactgcagagccagagtttcaggaggttagactcaccgaagaagatgagttcttaataatcggctgtgacgggctttgggatgtgatgaccagccagtgcgctgtcacaatggtaaggaaagagctgatgacacacaacgatccggaaagatgctcgcaagagctagttcaagaggctctgcgacggaactcatgcgacaacctaactgtagtggttgtgtgcttctcatcagacccaccacctcagatcgaggtcccaagatttcgagtacgaagaagcatttcgatggaaggattgcatatgttaaagggagctcttgacagtaatgcctga

SEQ ID NO: 3875 - DNA, 3020 bp, Oryza sativa
atgccaccgccctcccttctcctccctcctctcctcctcctcctcggcctccatgccgccgccgccgccgtctccgaggtgtcggccctcatggccttcaagaacgccctcaccatccctcccaccgccgccgccttcttcgcccggtgggacgccgccgcggcttccccctgcaacttcaccggcgtcgactgcgccaattccggcggcggcggcgtcaccgccgtcgccgtggagggcttgggcgtggccgcaacgtccgtcccgttcgacgttctgtgcggctcgctgccgtcgctcgcgaagctctccctgccgtcgaacgcgctcgccggggggatcggcggcgtcgcggggtgcaccgccctcgaggtgctcgacctcgcgttcaatggcttctccggccacgtcccggacctctcgccgctgacgaggctgcagaggctcaacgtgtcgcagaacagcttcaccggcgccttcccatggcgcgcgctggcgtccatgccgggtctcaccgtgctcgccgccggcgacaatgggttcttcgagaagacggagacgttccccgacgagatcaccgcgctcaccaacctcaccgtgctctacctctccgcggccaacatcggcggcgtcatccctcccggcatcggcaacctcgccaagctcgtcgacctcgagctctccgacaacgcgctcaccggcgagataccgccggagatcaccaagctcaccaacctcctgcagctcgagctgtacaacaactcgctccacggcgagctcccggcggggttcgggaacctgacgaagctccagttcttcgacgcgtccatgaaccacctcaccggcagcctctccgagctccggtcgctcacccagctcgtgtcgctgcagctgttctacaatggcttcaccggcgacgtgccgccggagttcggcgagttcaaggagctcgtgaacctgtccctgtacaacaacaacctcaccggcgagctgccgcgggatctcggcagctgggcggagttcaacttcatcgacgtgtccaccaacgcgctgtccggcccgatcccgccgtacatgtgcaagcgcggcacgatgaccaggctgctcatgctggagaacaacttctccggccagattccggccacctacgcgaactgcacgacgctggtgaggttcagggtgarcaagaactccatgtccggcgatgtscccgacgggttgtgggcgctccccaacgtcaacatcatygacctcgccggcaaccagttcacaggcggcatcggcgacggcatcgggagagccgcctcgctgagcagcctcgacctggccgggaacaggttctccggcgcgatcccgccgtcgatcggcgacgccagcaacctcgagacaattgacatttcgtcgaacgggttgtcggacgagattccggcgagcatcgggaggctggcacgtctcggcagcttgaacattgctaggaatgggatcaccggggccatcccggcgagcatcggcgagtgctcgtcgcttagtacggtcaatttcaccgggaacaagctcgccggcgcgatcccgtcggagctggggatcctgccgcggcttaattctttggacttgtccgggaatgacctctccggtgccgtgccggcgagcctcgccgcgctgaagctgagttccctgaacatgtccgacaacaagctcgtcgggcccgtgccggagccgctcgccatcgcggcctacggcgagagcttcaaggggaaccccgggctgtgcgccaccaacggagtggacttcctccgccgctgctcgccgggagcaggaggccactccgcggccaccgcgcgcaccgtggtcacctgcctcctcgccggcctcaccgtcgtgctcgcggcgctcggcgcggtgatgtacatcaagaagcggcggcgcgcggaggcggaggcggaggaggcggccggcggcaaggtgttcggcaagaaggggtcgtgggacctcaagtcgttcagggtcctggcgttcgacgagcacgaggtgatcgacggygtccgcgacgagaacctcatcggcagcggcgggtccgggaacgtgtaccgcgtgaagctcgggagcggcgcggtggtcgcggtgaagcacatcacccggacgckcgcggcggcggcgcgcaggagcacggcgccgtcggccgccatgctccggtcgccgtcggcggcgcggcgcacggcgtcggtgcggtgccgcgagttcgactcggaggtggggacgctgagctcgatccggcacgtgaacgtggtgaagctcctgtgcagcatcaccagcgacgacggcgcggcgagcctgctggtgtacgagcacctccccaatggcagcctctacgagcgcctgcacgaggggcaaaagctcggcggccgcggccgcctcgggtggccggagcgctacgacatcgccgtcggcgccgcccgtgggctggagtacctccaccacggctgcgaccgccccatcctccaccgcgacgtcaagtccagcaacatcctcctcgacgagtccttcaagccgcgcatcgccgacttcggcctcgccaagatcctcgacggcgccgccgcgacgccggacaccaccagcgcgggcgtggtggccggcacgctcgggtacatggcgcccgagtacgcctacacgtggaaggtgacggagaagagcgacgtgtacagcttcggcgtggtgctgcttgagctggtcacggggcggacggcgatcatggcggagtacggggagggcagggacatcgtggagtgggtgtttcgccggttagatagccgagacaaggtgatgtccctcctcgacgccagcatcgccgaggaatgggagaaggaggaggcggtcagggtgctccgtgtcgccgtggtgtgcaccagcaggacgccgtcgatgaggccgtcgatgcgctccgtcgtgcagatgctcgaggcggccgggatcggccgggagttggccatggtcacttcggtgaaggtcaaggtgatcgccta

SEQ ID NO: 3876 - DNA, 2838 bp, Oryza sativa
atggaagggactggtgagatgagagaggttggacgagaaactctccatggaggtgtggtgcagagtgttagtgagactgatgagtacaaagaaaagactattgacagtgaaaaagatgggcagtttcgggtgcagccaagatggaggaaattcttggctcatgttgggcctggagctctggtggccattggcttcctagatcctagcaacttggaaactgacatgcaagctggagctgacttcaagtatgagcttctgtgggtcatcttagttgggatggtctttgcacttctgatccaaacattagctgccaaccttggagtgaaaacaggaaggcaccttgctgaactgtgcagggaagagtacccgcactatgtcaacattttcytatggatcattgcggagttggcggtgatttctgatgacawtacttccggagtgttgggcacagcttttgcgttcaacatattgcttaagattccagtgtgggctggagttattctcacagtgttcagcaccctcttgcttcttggagtacagagatttggggctcggaagctggagttcatcatagcagcattcatgttcactatggcagcttgcttcttcggagagctaagctatttgaggccgtctgcaggagaggtggtcaagggcatgtttgtcccttctctccaagggaaaggcgctgctgccaatgcgatcgcactctttggcgctatcatcacaccatacaacttgttcttgcactctgctctggtcctgtcaaggaagaccccacgatcagacaaaagcatcagagctgcttgcagatacttccttattgagtgtagtcttgcattcatcgtggctttcctcataaatgtttcagtcgttgttgttgctggatccatttgcaatgcgaataatctttctccagctgatgccaacacgtgtggtgacctaactctgcaatccacacctcttttactcaggaatgttttggggagatcaagctcggtggtgtatgctgttgcgctgctagcttctgggcaaagcaccactatcagttgcacgttcgctgggcaggtcatcatgcaggggtttctggacatgaagatgaagaattgggtaaggaacctcatcacccgagtcatcgccatagctcctagcctcatcgtctccattgtcagtggtccctcaggcgccggcaagctaatcatcctgtcatcagaattcgctttgctcctccaaaagcaacaatatcctgaattcttgatttggatacagatgatcctgtcatttgagctgccgttcgctctcatccctctactcaagttctgcaacagcagcaagaaagttggacccctcaaggaatccatctatacggtggtgatcgcgtggatcctgagcttcgcgctcatcgtcgtcaacacctacttcctagtgtggacatacgtggactggctcgtccacaacaacctccccaagtatgccaatggcctcatctccgtggtggtgttcgcgctcatggccgcctacctggtcgccgtcgtctacctgacgttcaggaaggacacggtggcgacgtacgtgccggtgccggagcgggcgcaggcgcaggtggaggccggcgggacgccggtggtggacgcctccgccgccgacgaggaccagccggctccgtacaggaaggaccttgccgatgcttccatcatatgtatttcaaattgggaggacgaagattttatagcttggcatccagacttgcatggtagattctcagtcaggagtgcttattacttggctctgaatttgaagaatcaagaggatacaggtccgtcgaatatggcaggcgatcgtagatgggacctgatctggaagtgtgaagtccctcagaaagtgagaagttttgcttggaaggttgccactgactcccttgcaacaatggctaataaaacgaaaaggaagcttgagcggatagctacctgtggggtatgtgggtcagaaactgaagacacccagcatgctcttcttcgctgttcccagtcaagatttttgctgatggctatgcaaggtgatgggcactttcctgtgctcactgatgtgcgtatggataataaagcctggctgtttgatctgttagacaggctatccgaatctgaacgggcggcccttctcttggtgttatggcgaaattggtttgttcgtaatgaaatcgtccatgagaaaacccctccaacgatcgagtcttctaaaagattccttgagagctatattcagtcactgttcaacatccgacaaaagtctgtagttggttcagagaaaggaaaaaacgttctaatctgtcttggcttatgggaaagaggtccctccaggatcaagaccagcttgcaaacaaaaatgggtgagaccgcaaaccggatggttgaagagaaggggggcattggcatagtcatgagggactgggaggggagggtgatttttgcttcctgcaaaaccctgaacagctgtcatagtgcattagaagcagagttggtcgcgtgcagagagggtattgccttggcgcttcagtggacgctgctcccagtacaggtggaaacggactgcttggtagcgttacaaatgatccaagccaaagaagttgagcgctcggagcttgcctttgccgttagagagattaaggatctcctcgctggaagtcgggagtgtttgctcaggaaggttcatagaagccaaattttagttagtcatatgttagctaataaaagtcgcagtgaaaacttgtcgggattttggtgtgaaaatgattgcacctttatctcaaagcttgtaattgacgatattattcctgagtaa

SEQ ID NO: 3877 - DNA, 3590 bp, Oryza sativa
atggagggcatcgaggggctcctggcggacttcggcgtgcggccgcaggggaaggccgcgcccatggccgcctcccgctcccgctccaccaccaccaccggatccgcctggcccaaccctagatccaccccagcgcccgcgccgtcctacgacgggctcttcggcgcgcccccctccgcggccgccaccaccaccacctcctccccgttcgactcgctgttcaatggccctcctacttcctcctcctcctcgtcgtcggcggcggcgagggccacggtgtacgacgacgacatcttcggcgcggtcccggggctgaggccgagctccaattcggcgtcctcctcctccgcggcgcgktacgacggcgacgacgtgtttgggggtggccggcgcgcggcggcgtcccccgcgtttgatgacgtgttctccagcaaccgctcggcggcggcgccttcgtacgacgacatactaggtgggttcggggtgaagccgcaggcgggggaggagaagaggtcggtggtggttgaggacgacgacctgctcggggggttcgggaggaagccacattcggaggcggagaagaagccggtggtggtggagaaggctaatgggggcaacggattcgatgatctgatcccggggttctctgggagcggcccgcagaggagtaggaagattattgatgataacaaagatgagccagcagttcgaacttctaaatcaacagccagtgtattagatgatgacccatttgttgttctagaaacaaattctgcctcaggttcaacatatccatcccctagcagcttcatggatcccttggaacatctgaataattctgcaagctctaaaggcaagaatgttgataatactactgataatgatagtctgcctgatgattcaagtgcctttaaccaggttccaaaatcagatcctttgtttacctcagaattcaatggtgatacaaagtatatgaatccaccaagcaaagcccgagactcaaaccctctacatggttcaatgaatggaaattcagcacggggatcttctacggaggacttaggagatgccaagacaaagtcacagtctgcaaggtactctgatatttatgtcgatggctcaagttcagacagatatgctactgatggcgttggggatcagtcaccaagatctactgaatccgaagatgacatatggcttacagtttctgaaattcccctcttcacacagccaactaatgctccaccgccctcaagatcaccacctcttcttaaacaaagacctctgcaagcaaaagctaatggtaattatgatgggtatgtgcggcaatcaaaccaaaatcacaaccaatacagagacatgccagatcaagcagaggtttcttcactagatgagatggaaggttttgcgaaggacaagtcccaaatgccttcttatgacgacaatttttttggtgaagctgaacaatctgaaagaacttcatcagatcgtgaagagaaagagaggcaggccagattggagcaggaacaggaaatgaaactgatggaggaaaagaagagagaacagagacgacttgaaaaggagagagaattggaacagcagaaagaaagagaaagacaagccatggagagggccacaaaggaggcccgagagagagcatctgctgaagctcgtgcaaaggctgaaagggaggccacccagcgtgcacagcgcgctgctgtgcaaagggctcaacaggaagctcgtgagagggctgcagctgaggctaaagaaaaagctgcaaggattgctgcagaagcaagggagagggctgcatctgaagccaaggagagagagagggctgcagcagaaagagctgctgccgagagagttcagcaagaagcaaggaagagagctgaacgtgctgcagtggaaagagctgctgctgaggctcgggaaagacaggcagctgctgcagcagctgctgctagagaaaaacagagctcagcagatgatcttgagtctttctttggtgcgggtgcccgagcaaatagtgcgccaaagcagaggactccaacagtggattctatgtttgattctcaacctcaatctagagcaaccacgaatggatcacagagatcagcctccacctcagcatctatgagaaaagccccgtcagccacaaatattggggatgatctatctaatttatttggagcccctgcatcatctgatgtattccaagaagttgagggagagagtgaagaaagaagacgtgctagattagaacgccatcagaggacccgtgaacgagcggcaaaagctctggctgagaagaacgaacgggatatgcaggttcagagggaacaggcagaaagagacttggtgctattggtgctgttggcactttctgaattccagagaattggggacacactagactttgaaatcaggaggtgggcagctggaaaagagggcaacttacgtgctttgttatcaactttacaatatatactttggccagaatgtggatggcaagcagtatccttgactgatttgattactggcgccgctgttaaaaagcagtacagaaaggcaacattatgcatccatcctgacaaggtgcaacagaagggtgcaaatcttcagcagaaatatactgcagagaaggtgtttgatattcttaagggcggcggcggcggacttcgcgatggscgggccggcggcggtggtggcgaagacgggggcggcgccggtggagcgggtgaagctgctgctgcagaaccaggccgagatgtccgccgcgggagcctcacccggccctacaggggcattgccgamgccttcggccgcgtgctccgcgaggagggcgtcgcggcgctctggcgcggcaaccaggccaatgtcatccgatacttccccactcaggcttttaacttcgcattcaagggctacttcaagagcatctttggctacgacaaggagaaagacggaaaatggaaatggttagctggcaatgtagcatctggcagtgctgcaggggctacaacctcatccttgctatatcatctggattatgcacggacaaggctagctactgatgcaattgaatcacagggaagcaaacgtcagttcagtgggctgcttgatgtctacaaaaagacacttaaaactgatggtattcgtggattatatcgaggtttcagtgtgtccattgtgggtatcactctatatcgaggtctctatttcggaatctatgataccatgaagcctcttattctagtgggaccactgcaggaaaatttcttcgccagttttgccttgggctgggcaataactacgttctctggagcctgcgcctatccatttgatacactccgtcgcagaatgatgttaacttctgggcagccattgaaatataagaacgccttccatgcagcaaaacagatagtttctactgaagggttcttcacactattcagaggggtcggcgcaaatattctctcaggaatggcaggagctggagttcttgctgggtatgaccagctccaccggtttgcaggtcaacatggttacaattttgagagcaagatgaaaggggcattgaaatg

SEQ ID NO: 3878 - DNA, 5235 bp, Oryza sativa
atggagggagcagccgccgccgccggcggcggggagatgctatccccaggtgaggcggactggcctcccgagctgcggctcccaccgccgccccsgccctccgccgcatcggagggggagccgccgcccgcgcgggccgcggtggggatggatgactcgcagttcctcggatcgatcatcggcttgcccgcccagccgccgcaggccacggccgaggcgctcgcggtggtcggggtcaagaggaggagagggaggccgccgaagaagagggacggggcggcggcggcgacggcggttgttcccgcggcgaggcctgcgaggaggagggaggacgaggaggaggtcgtctgcttcatctgcttcgacgggggcaacctcgtcgtgtgcgatcggaggggatgccctaaggtctaccatccggcctgcatcaagcgcgatgaggcattcttccaatctcgcagcaagtggaattgcggttggcacatatgcagcagctgtgaaaaggcagtgcactacatgtgctatacgtgtacatactccctttgcaaagtatgcatcaagcaaggtaaatttttcagtgtcagggggaccaagggcttctgcgatacctgttattcaactatactgttgatagaatccaaagatgaaggtgatacaaagattgttgttgattttgatgatcaaaatagttgggaatacctgttcaagctatattgggtggatctgaaagggaagctttcattaacattggaagaactaactagcgccaaggctcgatggaatgcacctactacttacactaggaaagaaaaggatgagtcatctgatgacctttatgatgctaataatgacgatgatgctggttctgactgctcctcaggaaagcgaaagagaaattcttcgagaaaaaagggtcgaaaacgtcggaaaccaaattctgattgtagcattgccacaaaaaaggttgagactgttactagagatgatggaaccctgcccaacaaggtaccaactgaagaggcgtccttgccggtagacaccaaatgggcttcgccagagctactggagtttgtagggcacatgagagatggcgatcaatcttttatttcccagtttgatgttcaggctcttttgcttgactatataaaacagaacaacctccgtgaccctcaaagaaagagtcaaattatctgtgactcaaggcttcaccgtttattcaggaaaacacgcgtcgctcattttgagatgttgaagcttttggagatgcactttattgtaagtgagccttctgcagtaaatgatggtagccaagggattatcaatcctgattcagctcaaatagatcatgccagtggatataatgacatggcagcaaagttctctcctgataggagacgaaggatgcatagaaagatggaaagagaaccacaggctaatcctgaagattacgcagcaattgatatgcataatattaacctaatttacctgcgccgtagcttgatggaggatcttattgatgatcccacattgtcagacaaaatttctggtgcttttgtcaggataagaatttcgggacttggtcagaagcaagatatgtatcgtctggtgaaagttgtcgggacacataaggtttcagaaaaatacagcatcgggaagaagatgacaaattttgcacttgagataatgaacttaaacaaaaaggagattatcacgatggacacagtatcaaatcaggattttacagaggaggaatgcaagcgcctaaggcagagcatgaagtatgatctaattagccgactgaaagtgggtgatatccaagagaaagccaagatcttccaatttgtaagagtgaatgatcttctcaacactcctgaggaaagagcacgcagaattaatgaagttcttgacgtgcatgttgactcgcatatggatcctgattatgaatctgatgatgaatttggcaacaagaaagctgttgaacgtagtgtaaattgggcaagatcagatccgttcgtttcacccgttaaagttaaatattcgaacagttcacaaaagaatggtgatgctacccgccatctcaaaaacctgtctaaacaaaatacagagcgtaaatcaggagcagcaagaaactttgagaattcccattcaccagttggtatggatattccaaaatctggcactaatgtaaagagtaccaggtgtgaaactacgtcaccttcatctcatggggttgtatcaagtgacatggaaccagaaaaagtctggcactacaaggatccttctggaaatgttcagggcccatttactcttgtgcagctatccaaatggacaagttacttcccacgtgatatgagagtatggcttacatttgagagtgaagagagatcattgctgttgactgaagtgctctcaaagcaaccaaaagattttggtcacctggcatckgtwactacaagtagtaagtcgacagtagcagacactggacaaaacagaaacactgaaattgttgatctcaacaaagctccttctcctgttggttatagtatgcttaattcttttgaaaccactgttcagtctactaagcattctgctccagaaagggaaagcgtgaactctttagatgacaggttatcacactcgactgactcagttccaccaaaggacgctaacgcttcaaatagtcaagcaatgtgtcagatcaagcattcaggctctcttccatctcctggaagtccacatcaacgatcagacttgcaccatgatgaagtacagggaggacgctctggtgaatggaacaatcaacacaacagtgaactgtggagtccatccatgccgcagacaagttctagtgcacacagtaacgtggaatctcatcacgatcattatccttcgtggtcacaggttcaacatgatcctaaaaatagtttacaagcaggttctgggaaggatctgaattcgaggtatgatattgcgcagaaacttcctagtcaacggatcacgagagatgttcccagccctgtatttgcctggagtccatctgagtccaggactgcttccagtcaacatgaaggttcttgcttgagttcaacaaccaatctatgcactcatgatgaacttcattcttcaattgcttctgcaaaggctaaaagctttgctccagcaactcctgttgaagacagaggttcaagctcaccctctggtatgctgagtctctcggaaagagcaccaatctgcagtccacagtcagctccttctgcgtctgcttctgatacatgcaagatggaggagaacatgaatcaacaaaaaacacttgaagctgatatatcaaacacgtcagttaatcagtctccacagtctaagattctccctgaatcttctcctgataaccaagatgctgaacatgaatatcgtagtccacctccaatatctgagagtaaagagttatccccacagtcaaggactacccctggatcttctcctgataaccaagatactgaacgtgaatatcctagcccgcctccaatatctgggagtaaagagatatccccacagtcaaggactatccttgaatcttctcctgataaccaagataatggacatgaatatcctagtccacctccgataccggagagtatagagctatctccgcattctaaggctctccctgaatcttctcctgataaccaagatattgaacctgaatgccctagtccacctcaaatacccgagagtaaagagctatctcggcagtctaagattctccctgaatcatctcctggtaaccaagatattgaacctgaatgccctagtccaccgcaaatacctgagagtaaagagctatctcagcagtctaagattctccctgaatcctctcctgataaccacgatattaaatatattaagtgtgaagatcctagcccaactccgatatctaagagtaaagaggtgtctccgcaatctaagattctctctgaatcttatcttgataaccaagatgttgaacgtgagtgtcctagttccattctgataactgagagtaaagagcttgctgtggacctccctggatcaatatcattagcacctgaaaaaacagcttctactgatgtaggtgaaaactcttcacttgcttttatttttccaaaatctactctggctggggatgatgctttgaaatcagtatttgatatggcaaaggcgcatttagaatgtgaagattcaaaggttaaagaagaactgtatgttgaatcaactgttgttataagagatgacatggttgttaatcctgcctctggagttgagtccatagacatgtctgaaaatctcttggaatctttgatggagcaaagttgtggaactttttacatggatggtacaacagccttagaaggttttctgtctggttcaacgaaggaagaaccgcaatgttctagccccattgctttatccacatgctctagccccattgcattatccccttggggtgaacatggctactatcaaggagattctgttggttcttctttatggggtgtccaggacgatgatccaatcggtaatatttggccattatcctcacaagcaccggctctccagtattcatctggtagcactgctcattttattgatgaagcaactgtcacccatggaaataatggagttgttctaagtagcacgccaggggaggaggtgggtttaccaaactcaggtgtttgcacagattggggattggttgagcaggtgaatccagaaacaaatgatgcatcggtatcaatgatagacaagaactcaggattagtagattctcaaccatcagcaaatgatggctcagatgtgggtactgcacggaacactaaccataatactaacttgtccctcaaccatgaaacagcggtacccttgagtagaagttctggagaagcatcaagaaaacacggatttattactgacttgaatgttgctacttcagaggaggcgttagggaacaccaagaactggaatccatatgctggtaatgctaatcggggcagccagcggaatcatcaccgtgacaggtactctcaaataagcgaatcttggcttcttagctcaaactactctaggagtaggtctgatggatttggcactggtggatcgtcgagatcaaccccaaggggacaaactcagagggggatatgtaaatttcatgagaatggctactgcaggaagggtgcatcttgtaactacctgcacccctga

SEQ ID NO: 3879 - DNA, 1233 bp, Oryza sativa
atggagagcggcggcgccggcggcgaaggcgagacggcggggtggcggttcggcgcggcgaacccggcgctggcggtggcggggtcgcagagcatccgcgcggccgtgacacggatttaccgctgcctcgacgggagctgcaacgcgcggcccgtggcgccawtcgcccacggcgacccctccgcgttcgcgtgcttccgcgccgcgcccgccgccacggacgccgtcgccgccgctgccgcctccggcaagtacaactactactcccccgccgtaggaatcgccccggcgtgcagcgcggtggcggcgcacctgtcgcgggagctcccctacgccgtctcgccggcggacgtggtgctcaccgccggctgcaaccacgccgtcgagatcatgatgtccgtgctcgcgtcgccgggcgccaacgtgctgctcccgcggcccggctacccgctgtacgcgtcgcgcgccgccctgagcggcctcgagttccgccacttcgacctcctccccgacagcgagtgggaggtcgacctcgccggcgtcgaggccctcgccgacgccaamaccgtcgccatgatcgcagagacggcgaggaagctggggataatggtgatcagcgacgaggtgtacgaccacttcgcgttcgggagcaagccgttcgtgccgatgggggtgttcggcgacgtggcgccggtgatgacgctgggcggcatctccaagcggtggatggtgcccggctggcgcctcggctggatcgccgccaccgatcccaacggaatcctcaggaacaagaagatcatcgactcagtcattgactaccgagccatctcggtagatcccgtaacatttgttcagggagcattgcccgacatcctcgcgaagacggacgatgcgttcttcaccaatgcccttggggtggtgaagaaggcggcggagatatgctacgagaagctcaaggagatcgactgcatcacctgccctcacaagccggagggctccatgttcgtcatggcgaagctggacctgtcttccctagatggcatagaggacgacgtcgacttctgcagcaagctggccaaggaggaatccgtggtcatctgcccagggagtggattagggatgaagaattggctccggataaccttcgcggttgatccacaattactagaggatggtctagagagaaccaagtgtttctgcaagaggcatggtaaaatcaaggaagccagctag

SEQ ID NO: 3880 - DNA, 1146 bp, Oryza sativa
atggggtgcttcgcgttcaagagcaaggccaagaaccagcgggcggcggcgtcgggggccaggtcgccggcgccgacgtcggacgggcagaagagcaaggcatcatcggcgtcgacgccgacgaggagcatccaggagctgtcggacgagaggggcgcgcagcggctgcgggtgttcgacctcgacgagctcagcagcgccaccaacggcttcagccgcgcgctcaagatcggcgagggcggcttcggctccgtctaccgcgccttcttccgctccgccgccggcggcggcggcgcccgggtcgtcctcgccgtcaagcgcctcaaccagcgcagcctgcaggggcacaagcaatggctggctgaggtccaattcctaggtgttcttgagcacccgaatctagtgaggcttgttggctattgtgcagtggattcagaaacaagcaagcacaggctgctggtctacgagttcatgcccaacaagagcctagatgatcatctgttcaaccgagctcatcctcccctctcgtggagattgaggctgcagatcatgatcggcgccgcgcggggcctagactacctccatgaaggcctgcaagaagttcaggtgatatacagggatttcaaggcagccaatgttcttcttgatgccgatttcaagccaaaactttcagactttgggctagcaagagaggggccaactgaaggaaagacacacgtctccaccgcggtggtggggacgcacgggtacgcggcgccggactacatcgagacggggcacctgacgaccaagagcgacgtgtggagcttcggcgtggtgctgtacgagatcctgacggggcggcggtcgctggagcggagccggccggcggaggagcagaagctgctggggtgggtgcgccgccacccgccggagagccagagcttccggtcgatcatggacccgcggctgggcggccggtacccggcggcggcggcgcggcaggtggcgcggctggccgaccgctgcctcgtcaagaaccccaaggagcggccggcgatgagggaggtcgtcgaggagctcgagagggtgctccagatggagccaccgacgacgacggcggccgacaaggacggcgaccgccgcctgccgccggcgaagaggtga

SEQ ID NO: 3881 - DNA, 3069 bp, Oryza sativa
  misc_feature (1)...(3069): n = A,T,C or G
atggcgcaagaccgacaaaagaacaaagtattagcagcctcagatgctagcaatagcggtggcgagttcctcacttcgaattcmgttgagaaattatcactaaaaatgatcaccttttgttgtccagcaaaatggctacagagagtgctcggccgnttgagtggaggaactggagcagggaagtggccaccaagcaaggacacgggttcctatgattctattccagctagcctttcagaagatgagttagcggagttggccttcatgccaaatagtggcggcatttttgggaagtggaggggttctgtcctggaacgcagtggaagcgctcctcctaccatggaaggttctttagttgcacttggtcacctcacaggtcaaccgagtggcaaccttggggccatactgccaaacttgggcactgaagctaacaattcagagtctaaggagaatatatattatgattcggcatgcgtcaaatactatatgtccaaggtgaatttgaacccaaggtttcctccaccactcgtttcaaggaaccagtttggcaagtctgaagaacgaaagccgttctcccttgatgacagcagcagcaggtccttacttcttggtcatcctactctgccaacacacaaggaagaacctgaggacgaaaagtcaccaagtttggattcaagttcagcagacgatgctcaatgtgattctgcccaaagcacatctaacttagggggccacagtccaaatcttgtagattcaattaaggaaaactttcatcggagcaatggtttgtatgataattcttccgatcttttaaatgcaaactctggtgatggagggtcgatttattctggcattagttcattgaagaattcctcactttatgttgtccagtcatcagacttgaatggatttccaccagatgctcatcagcgttcccctagacctattaggactccagtcagtacaaaacttactagcgacagtctgccagcttcatctcctcccacttcatcctgttctgactacagtactattactgaagcttgtcagcaaagaaatccaagcatggccgttaaacctggtgaaccagttggtaccatgcttgatagttcagacttcagtctgaagaatttgaatattagtccggatatcctaagtagttcatatgtcatgcaacagtggcagaaaaatgccccagtgtggaatggcctatcaaatgtagtccatggcgatcatgtgccaatgattcctccaggaattaatcttcctcaagttccatttgtggacaattccggttttggtcatatgaagttccctggtgatgttcaactgatgtcccagatcgggatggcaacacctttttgtacaccaaattcttttgggataccatgttatcctaatttgcagtcgcctagtgtttgggttcctccattcggaatcggcggctatggtttgcctggtccatttgtcccacctgttataactaacttcactcctcaacttcctggttttccttcagcagtaaatcttgctgcagcaactgacttatttcacccatataagatgtatgagcatcttggggtacctatgccatcccctgttcctgatcagagccttacgcattattttcaacagccccctatccatccgtatggtgttggaaatccatatgatacaatggtttcaagtaataattttgtagggaatcctgctggcgtttttggttcaccaatcattgacccatcagagcagaagtttcagataccggttactactgtagctgctaatgcctctactcccatcaaaggtggaaagcccattgggaattatgagactgcctcaccttactttggcgtaccgatgccttatccagcaggtccaacattacatgggcaacctgcttctggaacatctcctcgtgacaaaaggaacgatgtcaagggattccaaccccctcgaaaaaatatgcctgttagttccgagatacaaggtcagaaagggagggagaagtttgatgatcccaaggcacacttttctgttgaagaactaatatccagcagaactcatagggttgagctggctgacatcaaaggacagatagtgaaatacagctcggaccaaaatggtagccggttcattcagcagaaactggagaattgcaccattgaagaaaaggatttactttttgccgaggtccttcctcatgctttggaattgatgactgatgtattcggaaattatgttattcagaagttggcaaagtattatctgagtaaaatttcttcagactgttattctatccatagaattgtttattctgaacatcagttggcccttgaagtaattgatcttgaacagaaaattgttcttgttggtgaactcgatggacatgtgctgcgatgtgttcatgaccaaaatgggaatcatgttatacaaaaatgcattgaatgtattccattggaacatattggttttctggtgtcatcttttcagtgccaggttgccaaactgtcaatgcatacatatggatgtcgtgttattcagagaatcctcgagcgttgcagcaataattctgaatgcctttgcataattgatgaaatcttgcagtctgcttgcatcctcgcacaagatcagtatgggaactatgttgtgcagcatgttttggagaaagggaatgaacatgaaaggggccaaatcatcactaaattggctgggcaggtagtgcccatgagccaaaacaaatttgcgtctaatgtcatagagaggtgttttgaacatgggggcagtgcagagcgggaacttttggtcaaggagattctgaagcaaactgagggcaataactatttgctggtgataatgaaggaccagtatgctaattatgtggtacagaagatgcttacaacatgcaatgaacaacataaggagatccttctcagtcgtgtgaaaatccatttgccattattgaagaaatacacctatgccaagcacatcgtcagcctagtcgagcgcctctgcggtgacggagctgtgcagtccgaatccaaaaaaactgtaaccaagggctgctga

SEQ ID NO: 3882 - DNA, 1953 bp, Oryza sativa
atgctcgaggaagcttctgctattagggaatccaagtcgagcataacaaaacagacccaggagttgaagagcaaggatgacggcatccagaagctggaaaagcttattgaggagaagtcaaagaaaattgctaccctgcagagtgagataacttcacttgagacaaagagatctttagctgcagaggagcaggcaggcaaggccaatgcccgggctattgagcttgagaagcagattgaaaaactgaagaaggatattgaagcacaaaatagcaagaaatcaactgtggaggctagggctggtgatgcagataagaaggtgcaagagctgaatgctaagctggagaaactccaaaagacaagtgatgagcaaaagcgtaggattcagaagactgaacatgctcttaaagttgcagaggaggagcttatgagggtgcagttagaaacaacaacacaattaaatcagctgaaagagatttgttctatgccagttcatggagcttggttgccaccttggttagtgacacacacagctcgtgctaaggaaatgatgttaagtcactggaatgaacatgggaaacctgctgttaacagtttattgcagaaggcatcagagaaatcagttcaggcaaagaaatgggccgagccacatgtagaagctgccaagacgaaatggatacctgttatcaaggaaaaatgggttaccatgaagacaaacgcagagccttatgtgcaaaaggtctcagcaaaatctatagagctctatcaagcttctaaggatgtkgtctwacctcatgttgtgaaagcacataagattgctgatccctacttccaggaagccaagaaagtatccaaaccttacattgatcaagttgctaaggccactaagccacatgtcgagaaaattagaatttatttgaagccttatacaaaaagagcagtccatatatatggaaattttcttgagaaggctacagcttatcatcaacaggctcaagcaactgtcttggactacctgcaccaacatgaattgacaaaagaatttgcgactgaagagttggcctgctcgcgatatactgcttgtggcatggaatcttggatcaatcgaaccatatgcttgcccgttttctctgaagttacagagtctcttctcaattcatacggtataaaaagaaaatctcggatggcatacagagtaggatatcccgggccatcgctaagcattggttctctcgagcaggcgtggcaacagaaggggagaggtgtccggcggcggagcggggacggcagcggcgggagagggagagaggcggccaatgtgacagcagcagcgggagaggataggtggcgtccggcgccacggcaagctcagcggcagagatattcgaacgcgccgggtgctcgacctcgggccctgtcgccggcaagtgacacgctctccccgtcgaccctctctccctccctcgcctactcgtcctacaccaccaccctctccgcgctctcccgccacggccgcccccgggaggccctctccctcttctccacctccgcggtcgttcgccccgacgccgagctcctctcctgtgtcatttcctgctgccgccgcgcatccgccttccttcccgctcgcgccgcgcacgcctacgggataaagaccgcgccgctgctggccttctacgcctcggccagtctggcgctcgtggcgctgtatgcgatgtgtcggaaggtgagctcgccgccgccgagcttgccgtcgccggctgcctcctttccctccgccgctgctgtatgcactgacgatttgttcaccactaggagcgtcggtgtttgctcgccggagaagaagctggtggtgccggagagcgtgtgcgggcggccgaccggccgctggggctgtagttccaccamgcctccggcgacctgtacgtggctgacgcgtacctgggcctcctga

SEQ ID NO: 3883 - DNA, 705 bp, Oryza sativa
atggcgcagaggacgctggagctgacgctgatctcggccaaggatctcaaggacgtgaacctcctctccaagatggaggtctacgccgtcgtctcgctctccggcgaccgccgctcgcggcagcggatcgccaccgaccgcgccggtggccgcaacccggcgtggaacgccgccccgctccggttcaccgtcccggcctccggcgcgggttccctccacgtcctcctccgcgccgagcgcgccctcggcgaccgcgacgtcggcgaggtccacatccccctctcggagctcctctccggcgcccccgacggcgccgtccccgccaagttcgtctcctaccaggtccgcaagatctcctccgggaagccacagggcgtcctcaatttctcctacaagatcggcgagtacggctacgggtacccggcccagccgccgccgccgcaagccggctacggctacccacccccgccgccgcaagccggctacggcggcggctacggctacccgccgcaggctgggtacggcggctaccagcagcaggccgtgaagccggcgaagaagaacaacttcgggatgggactcggagccgggctgctcggcggcgcgctcggcggcctcctcatcggagacgccatctccgacgcgtcggcgtatgacgccggctacgacgcagggttcgacgacggcggtggcttcgatttctag

SEQ ID NO: 3884 - DNA, 2145 bp, Oryza sativa
atggcctcctcttccgtcttctccccgctactccgtgcactccggccgtccacctcctgctcggggcgctcttctgccacccacgacaacagcgccgccgctgtcgttgccgctggtggcgctgccccgcggccggcgcccctcgcggcggttgtcagccacaggagggagctgttgctgggggcggcattgggcgcggcgttcctgaaggcgcctttgccggccgaggcgcgtgaggtcgaggtcggcgcggtcctgccgccggcggcgtccaaccccgggttcgtgttcttccgggctacttccaaggacactcctgcacttcgagctggcaatgtgcaaccttacgagttcattctgccacccacctggaagcaaacgcgagtggccaacattctgtccggcaactactgccagcccaagtgcgccgagccgtgggtggaggtgaaattcgaggacgacaagcagggcaaggtgcaggtggtggcctcgccgttgatccgcctgacgaacaggccgaacgccacgattgaggacatcggtagccctgagaggctaatcgcctctctggggccttttgtcaccgggaacaccttcgactccgacgagctcgtcgatacctccgtggagaagatcgatggccaaacttactacagctatgtgctagagactccattggcactgaccggttctcacaatctggcgaaggcgactgccaaggggaacacggtggtgctcttcgtcgcaagtgccagcgacaagcagtggcagtcgtcggagaaagttctcaagaccatagtggattcatttaaattccaccaagaagacacaaattccagcagagatagtccgatagagattagcatggcgtcgacagccgtgtcccggcacgtggtcgcggtgccgtacccgggccgcggccacatcaacccgatgctggccgcgtgccgcctcctcgcggccgcggacggcgagctcaccgtcaccgtcgtcgtcacggaggagtggcacgggctgctggcctccgccggtgtgcccgccamgctgccgccggcgggccgcgtccgcctcgccaccatccccaacgtcatcccctccgagcacggccgcggcgccgaccccgccggcttcttcgaggccgtggacgccaagatgggggtggccgtcgagcagctgctcgaccggctggagcggaggcccgacgcgatcgtggccgacacctacctggcgtggggcgtgccggccggcgcggcgcgcgggatcccggtgtgctcgctgtggaccatggcggccacgttcttctgggcgctctacaacatccacctctggccgccggtggatgaccgggagggcgagcaagacctaagccgcaagtccttggagcaatatgtcccaggctgctcatcagtcaggctctctgacgtcaagatcttccggtcttgggaacggtcaatgaagctgacaacggaggcgttcgtcaacgtgcgtaaagcgcagtgtgtcctcttcacttccttctacgagctcgaaccctgcgccatggacagaatcacgcaggcggttccgttcccggtgtacccagtcggaccttcaatctcggacatgccgctggacggcggcgccggcaagatcgacgacgaggagcaccgtgcctggctggacgcgcagccggagcgctccgtgctgtacgtctcgttcggcagcgtcgtctccatgtggccgtcgcagctggaggaggtcgccgtggcgctgcgcgacagcgcggtcaggttcttctgggtggccagggacagcgccagcgccggtgactgcgacgatcgccggcggcaacgggttggtggtgccgtggtggtggacgcccgcgtcgtggccgacgagtggaggatcggcgtcaacctgtcggagcagaggagggaggaggacgacggcggcggcgtcgtcgtcggcagggacgcgatccgtgccgccgcggcgaggctgatggatccggacgacggcgagagccgagagatgaggaggagggccgcgctgctgcgcgaggcttgccgtggcgccgtgcaggacggaccggacggtggctcgtcgcgccgctcgttgaacggattcgtgaaagatctcgccgacgggagacttaatttccagtga

SEQ ID NO: 3885 - DNA, 1158 bp, Oryza sativa
atggagcgcccttcgagcgactgctcgacggctcsggctcgagraggaggaggagacagcggcgcccgtcgcggcgttcgtggccgactttctacttgtgcgtgggtcgtggacgttcggcaaaccggaggggccttgcccgtctgctccctcttccccatggccgccgtgttcttctccgcctactaccacttcgacagcctcccgtcgtggctcgctaaaccgccgcaccagccggtcgccggtgccacaacagataaccctgatcagagacttgagcactatatctcaagcttggcttcaagttcaataatgttatctgatctcaagcctttaattcacagtgagagaacagtggagtatatcctagcatgtatctctagcatcagaaaagcacagtgcctcctattcaccaccatatatgagcttgaggccagtgtaatcgactctcttgaatcattagtcacctgcccagtgtacccaattgggccctgcattccgtatatgacccttgaaaacgagcataccaagtccaatggagaagctcctggacggatagattacttcgcgtggctggattgtcaacctgagaactcagtgctatatgtttctcttggcagttttgtctcggtgtcatcctctcagcttgatgagatcgccttgggccttgccacaagtgaggtcagattcttgtggattcttcgtgaacaatccactcgagtgcgagaacttgtcggtaacaccaacaagggcatgatacttccatggtgtgatcagctgaaggttctgtgccacccttcagtcgggggcttcctgacccattgtggaatgaactcgacgctggaagctgtctttgctggggtacctatgctcaccttaccattgttctttgatcaaccaattaatggccggctaattgtggaagagtggaagattggagtgaacttgagggactcgacagacaaggatcgcctgatcagaagggaggagattgcaagggctgttaagaggctgatggcatctgaagaagctgagatgaaagcaataaggaggcacgctcttgagtggaaagagatttctcatagagcagtcgacaagggtgtatcttcgcattgtaatctggcttcactgatggagatgatatgcccatcaagatga

SEQ ID NO: 3886 - DNA, 2697 bp, Oryza sativa
atgcctccctcgagatcgctcgcgtgccttctgctgccgccgctgctgctgctgctcgagtccgtgcgggacgcggacgcggggcccctggccgtggagatcgtgcggcccagcttcacggcgactagctacgactacgtcgacaccggcggcgcgttcttggtgtccaggaacggctcgttcagggcggcggtgttcaaccccgggaagcagcaggccagcttctacctcgccgtgctgcacgcgccgtcggggacgcccgtctggtcggccaaccgcgacgcgccgacgagctcgaccggtaaggtccagctctctgtgggagggatcaccgtgtcggacgccaatgggacggtgctgtggtcaacgccgccgctgcggtcccccgtcgcggcgctccgcctgcaggacaccggggacctgcagctgctggacgccgggaacgccacgctgtggcggtcgttcgataacgccaccgacacgctgctgcccgggcagcagctgctcgccggagcatacctgtcgtcggcgaagggcgctaccgatttctcccagggggactaccggttcggcgtgatcaccgccgacgtgctgttgacgtggcaggggtccacctactggcggctgtcgaacgacgcccgggggttcaaggataccaacgccgccgtggcgtccatgtcggtgaacgcgtcggggctgttcgcggtcgccgccgacggcgctatggtgttccgggtgggcctcgcgccggcggagttccgcatgctgaagctggggagcgacggccggctgcgcatcatcagctacgcgctcgtgaactcctcggcgccggtcggcggcgacttcatcgccccagccggcgactgcgacctcccgctgcagtgcccgtccctcggttactgttcaccggcgggcaacggctcaacctgcacgtgcccgccgctcttcgccgcatccgtgacagttgccggctcgtgcacgccgggggacggctcgacgctcgcgtcgccggccgcgtgtcagaacaacgacagtagcagcggcggcgcctccgtttcatacatcgccctcaagccgctgacctcctacttcgccacgaagttcgacgccccgacgaacaccggcgtcaacaagacggcgtgtcgcgcgctctgcaccgccagctgcgcttgcctcggcttcttccacgacagcgtctccctgagctgccgcttgatcggaggaaagcagctcggctcgctgtacaagggcgcatcagatacaaacctgggatacatcaagacgttcaactccgcaaccaaggccgggagcaaccaaatcggctcgtcgtcggcgaaccacaccgtgccgatcgtcctgccgtccgtcgcggcgttccttctcctcgccgtgctcggatggtatatatggtggaggaacaagatgagcaagaacggcaagaaaaagaagggcaagagctccaccatgaaagtgtacttgggccgtcagaagtcgccgtccagggacaccggctataacgcggacgctgacgacgacggcggcggcgacgatgacgacatcgtcataccgggcatgccggcgaggtttagctaccaggagattacaacgatgacctccaatttcgcgacgaaggtgggatccggcgggttcggcaccgtgtacaaaggggagcttccaggcggcgaggggctcatcgccgtgaaaaagctcgaggccgccggcgtgcaggccaagcgggagttctgcacggagatcaccatcatcggcaacatccgccacgtcaacctcgtccgcctccgcggcttctgcgccgagggttcccgccggctgctcgtctacgagtacatgaaccggggctcgctcgaccggtcactgttcggccgcacggggccggtgctggagtggggggagcgcatggaggtggcgatcggcgcggcgcgcgggctggcgtacctgcacaccgggtgcgagcagaagatcgtgcactgcgacgtcaagccggagaacatcctgctcgccaacggcggccaggtgaagatctcggacttcggcctcgccaagctgatgtcgcgggagcagtcggcgctgttcaccaccatgcgcggcacgcgcgggtacctcgcgcccgagtggatcagcaacgcggccatctccgaccgcgccgacgtctacagcttcggcatggtgctgctcgagctgatacacgggaggaagaaccgcggcgagcaggaggcggcggcgccggccaacaacgtcgccgtcgctgccggcagcggcgagcactcggacttgccgtccggatggagcagcgcgatgacgtcgacggcgagtggcacgagcggcggcggcgacgagtacttcccgatgctggcactggagctccatgagcagcggagatacctggacctcgtcgacgcgaggctggaggggcgcgtcgacgaggccgaagcggcacgcaccgtccgcgtcgcgctctgctgccttcacgaggaccctgcgctgcggccgagcatggccaccgtggtgcggatcctggaaggcagcgtgccgccgccggagccgcgggtcgaggcgctcggcttcctccggctctacggcaggagctatcccttgccggtgccgggttcgttgaccgccatggccggtggtggctcgcatttggacgagtcactgaaggacacgtcagcaccaagatag

SEQ ID NO: 3887 - DNA, 1089 bp, Oryza sativa
atggagctggggttgagcttgggggaggctatggcggatgctgggagggagctggttcttgggcttgggatggggaggagggaggaggcggcggaggcggggaggagggatcatgaggtgaggagggagctggagttcgggtcgatgtcgagcaggtgcggtggttcttcgccggagccgacggtgcggctcacgcttctgcccatggtgcccggccttggcctcccatggcctcctccgccgccgccgtcgtccgagagcaggcatttggaggcgtcgacgcggggattcgacgtgaaccgcccgccgtcgtccggcggcggcggcggcggcggcggcgcggaggaggagcaggacgacgtggccggggcggcactctcgtcgtcccccaacaacagcgccggatccttcccgatggatgacttctccgggcacggcctcggcggcaacgacgcggcccctggcggtggcggcggcgaccgctcgtgctcccgcgccagcgacgaggacgacggcggctccgcgcgcaagaagctccgcctctccaaggagcagtccgcgttcctcgaggagagcttcaaggagcacagcaccctaaaccccaagcagaagctggcgctggcgaagcagctcaacctccggccgcgccaggtggaggtgtggttccagaaccgccgcgccaggacgaagctgaagcagacggaggtggactgcgagtacctgaagcggtgctgcgagacgctgacggaggagaaccggcggctgcagaaggagctcgccgagctccgggcgctcaagacggtgcaccccttctacatgcacctcccggcgacgacactctccatgtgcccctcctgcgagcgcgtcgcctccaactccgccccggccaccgcctcctccgccgcaacatcgtcgacggccgcgccgcccgcggcaccctcatccggcggcattgcggccacctcctcctccgccgccgccgmcgcggcgccggaccacaggccgtcgtcgttcgccgcgctgttctcgtcgccgcgtggcttcccgctatccgtagccccgcaggcgcagccgccgacgagctcgtga

SEQ ID NO: 3888 - DNA, 2115 bp, Oryza sativa
atggcggccgccgctttggccggcgttctcctcctcgccctcgcggcggtggcgggagccgacaccgacggcggcgacgccgcggcgctggggaatctgtactcctcctggaatagcccggctcagctcaccggctggtcggccggcggcggcgacccttgcggtgccgcgtggatgggcgtctcctgcgttggctccgccgtcacctcgatctcagagtttgggagactggatccagccatccaggcaaataatggtgctctgctggttttcagtgtctttttcagttgtaggaaaaagggctttttccaagctttctggtatggggctgaatggcactcttggctaccaactatccaatctgctagcattgaagacaatttgcgatgcaggaatttggcaggaaataacttttccggtaaccttccatactcgatatccaacatggtttcactcaactatctcaatctcagccacaacttactatttcaggaaattggtgaaatgtttggaaacctcactgcactttctgaactagatgtatctttcaataacctgaatggcaacttgcctatttctttacgctctctgtcaaatatttctggcatttatctgcaaaataaccaactatcgggcacagtcaatgtactcagcaacctaagccttactacactacttggaggaaactcatttctcaatgtaccttcatctccgccatctactatcacttcaccacctcagggtcaaccagactttcctcaaggaccaacaactgctccaaatatccctgagattcctattgatcaaggtagtgacaagaagcaacgtctgcgaactggtctggttatagggatagttattggctcaatggctgctgcttgtggtgtacttttcgcgttggtactgtgccttcacaatgtccggaaaagtaaagatggtgggatcagtgaatcaaaagatgtcgcaagcacttttgcagtaaacatagatagagcttctaacagggaaatatgggatcacacccagcaagacgcacctgtttcaagttccgtgctcccgcctatgggaaaaatgactcctgaaagggtatatagtacaaacagctctatgtcaaagaagatgaaggtctctgtcacagcgaatccatatacagttgcttctctccaagttgctacaaacagcttctgccaagattcgctcctaggtgagggttcacttggtcgtgtttacaaggccgacttccccaatggaaaggtacttgcagtgaagaagatagacagtgcgtcactttccttgtatgaagaagataactttcttgaggttgtgtcgagcatttcacgacttaggcacccaaacattgtgccgcttgcaggctattgtgttgaacatggacaaaggcttcttgtgtatgagcacattggaaatgggacactgcatgatatattgcattttttcgatgatacaagcaagatccttacatggaaccaccgcatgaggatagcactaggcaccgcgcgagctttagaatacctgcatgaggtgtgcttgccccctgttgtacatagaaacttaaagtcagcgaatatcctgcttgataaagaatacagtccccatctgtctgactgtgggcttgctgccctgacaccaaatcctgagagagaggtttcaactgaagtgtttggatcttttggatatagcgccccagagtttgccatgtcaggaatatatactgtaaaaagtgacgtgtacagttttggagtagtgatgttagaactattgacagcacgtaaaccgttagacagctctagagagaggtccgaacagtctcttgtcacatgggctactccacagcttcatgacatcgatgcgcttgccaagatggttgatccagcaatggatgggatgtaccctgcaaaatcactctcccgtttcgctgacataattgcattgtgtgtccagcccgaaccggagttccgtccaccgatgtccgaggttgtccagcaactggtgcgcctggtgcagagggcaagcatggtgaggcgtcaatcaggagaggatgtggggctttcatacaggggccctgaccgcgagggaggcacagccgacgccatctga

SEQ ID NO: 3889 - DNA, 1173 bp, Oryza sativa
atggctgcggccatcctcctccgccgcgtcccccccgcgcgggcccaggccacggcgctcatcgcggcgcgctcgatctcggactccacggcgccgctcaccatcgagacctcggtccccttcacctcccacatcgtcgacccgccctcgcgcgacgtcaccaccaccccggccgagctcctcaccttcttccgcgacatgtccgtgatgcgccggatggagatcgccgcggattccctctataaggccaagctcatccgcgggttctgccacctctacgacggccaggaggccgtcgccgtcgggatggaggccgccatcacccgctccgattccatcatcaccgcgtaccgcgatcactgcacctacctcgcacgcggcggcgacctcgtctccgcgttcgcggagctcatgggccgccaggctgggtgctcccgcgggaagggcggatccatgcatttctacaagaaggacgccaatttctatggtggccacggtatcgtcggcgcccaggttccccttggatgcggtctcgccttcgcgcagaagtataggaaagaggaaactgctacgtttgccctctatggtgatggtgccgcgaaccagggccagctctttgaggccctcaatatatcggctctttggaagctgccagctatattggtctgcgaaaacaaccattatgggatgggaaccgctgagtggagggcagcaaagagccctgcctactacaagcgtggtgattatgtgcctggattgaaggttgatggaatggatgttcttgctgtgaagcaggcatgcaaattcgcaaaagagcatgctattgcaaatggcccaattgttcttgaaatggatacctacaggtaccatggccattctatgtcagatcccggaagcacttaccgtaccagggatgagatctcaggtgtaagacaggagcgtgatccaattgaaagggttaggaagttgattttggctcatgacctagcaactgctgctgagctcaaggacatggagaaagaaatccgraaagaagtcgatgatgccattgcgaaagcaaaggagagtcctatgcctgatacttctgagctctttacgaatgtatatgtcaagggttttggtgtggagtcatttggggcagacaggaaggaattgagagctactcttccatag

SEQ ID NO: 3890 - DNA, 1122 bp, Oryza sativa
atggggggcaatccggcgatgcgggccggattggcgttggtggtggtggtggtggcggtggtggtgggggatgtgggcgcggcgttgccgaggttcgcggaggcgccggagtacaggaacggggaggggtgcccggcggcggtggcgggggcgggggtgtgcgacccggggctggtccacatcgcgatgacgctcgacgcgcactacctgagggggtccatggcggccatctactcgctgctcaagcacgcgtcgtgcccggagtcgatattcttccacttcctggcggcggcggacggcggcgaggggtgcgggggtggggtcggggagctgaggaccgccgtggcggcgtcgttcccgtcgcttcggttcgagatctacccgttccgcgctgacgcggtcaccgggctcatctcggcgtccgtgcgcgccgctctcgaggcgccgctcaactacgccaggaactacctcgccgacctgctccccaagtgcgtcccgcgggcgatatacctcgactccgacgtgctcgccgtcgacgacgtgaggcgcctctgggagacgcgcctgcccgccgccgccgtcgtggccgcgcccgagtactgccacgccaacttctcccgctacttcaccgagaccttctggtccgacccgcagctcggcgaccgcgtcttcgccgggcgacgccgcgcgccctgctacttcaacaccggcgtcatggtcatcgacctccggcggtggcgcgtcggcaactaccgtcgccgcatcgaggtgtggatggagctgcagaaggagaagcgaatctacgagctagggtcgctgcccccgttcttgctggtgttcgccggcgaggtggaggccgtcgaccaccgctggaaccagcacggattgggcggcgacaacgtcctcggcagctgccgccctctccacaagggccctgtcagcctcatgcactggtccgggaagggcaagccatgggaccggctcgacgccggcaagccttgcccgctcgaccacacttggaaatcatacgacctctacattgcagagggtgattcatcttcagcatcagcaccgttcgcattgtcatcatcggcattgcctgcggcggcattttcttggtag

SEQ ID NO: 3891 - DNA, 3279 bp, Oryza sativa
atggccgaggaacacgaccaccatgggtcgtcgcggcacatgtcggcgtcgcagaaggagctcggcgacgaggacgcgcgggtggtgcgcgtcggggacgccgagcgcaccaacgagcagctggagttcgccgggaacgcggtgcggacggccaagtactcgccgctcacgttcctgccgcggaacctgttcgagcagttccaccgcctcgcgtacgtctacttcctcgtcatcgccgtgctcaaccagctcccccagctcgccgtcttcgggcgcggcgcgtcggtcatgccgctcgcgttcgtcctcaccgtcaccgccgtcaaggacgcgtacgaggactggcggcgacaccgctctgaccgcgccgagaacggccgcctcgccgccgtcctcctatcccctggcgcgggcacccacttcgccccgaccaagtggaagcacgtccgcgtcggcgacgtcgtgcgcgtctactccgacgagtccctcccggctgacatggtcctcctcgctaccagcgatcccaccggcgtcgcctacgtgcagacgctcaaccttgatggcgagtccaacctcaagacgcgctacgcaaagcaaagaaacgcttcaccacgccgccggagcaggctcaccggcgccgttcatccgctgcgagcgcccgaaccgcaacatctacggggggagagccgccggataccgctcggcccgtccaacatcgtgctgcgaggctgcgagctcaagaacacgacctgggccatcggcgtggtggtgtacgcggggcgcgagaccaaggcgatgctgaacaacgccggcgcgccgaccaagcgcagccgcctcgagacgcagatgaaccgggagacgctcttcctctccgccatcctcgtcgtgctctgctcgctcgtggcggcgctctcgggcgtgtggctgcgcacccacaaggccgacctcgagctggcccagttcttccacaagaagaactacgtgagcgacgacaagaacgccaactacaactactacggcatcgctgcccagatcgtgttcgtgttcctcatggccgtcatcgtgttccagatcatgatacccatctcgctctacatctccatggagctcgtcaggctcgggcaggcctacttcatgatccgggacacgacgctgtacgacgcgtcctccaactcgaggttccagtgtagggcgctcaacatcaacgaggacctaggccaggtcaagtgcgtcttctccgataagaccggcacgctcactcagaacaagatggagttccggtgcgcgagcgtcggcggcgtcgattacagcgacatcgcacggcagcaacctgttgagggtgatcggatttgggtgcccaagattccggtgaacgtcgacggggagatcgtggagttgctgaggaatgggggagagacagagcaaggaaggtacgcccgggagttcttccttgctcttgcgacgtgcaacaccattgttcccttgattcttgatggcccggacccgaagaagaagatcgtcgactaccagggcgagtccccggacgagcaggcgttggtctccgccgccgccgcgtatggtttcgtgctagttgaacgaacctccgggcacattgtcattgacgtccttggtgagaagcagagatttgatgttcttggacttcatgagtttgacagcgatcgcaagaggatgtctgttatcattggctgtcctgacaaaactgtcaagctgttcgtaaaaggcgcggataattcgatgtttggagtcatcgacaaaacaatgaatcccgatgttgttcgtgcaactgagaagcatctccatgcatattcctcactggggctgcgtacacttgttatcggtgtcagggaacttagccaggaagagtttcaggagtggcaaatggcttatgagaaggctagtactgcattgctaggaagaggaggcctactccgtggtgtggctgccaacatcgaacagaacctgtgcctattgggagcctctggtattgaagacaagctgcaagatggtgtacccgaggcgatcgaaaaactcagggaagctgggattaaggtttgggtactaactggtgacaagcaagaaactgctatctccattggcttttcctgcaagcttttgacaagggagatgacacagattgtaattaacagtaactcaagagagtcatgtagaaagagtcttgatgatgcaatttcaatggttaacaaactccggtcattatcaacggactcacaagctagagtccctctcgctttgatcattgatggtaacagccttgtctacatttttgatacagaacgggaagagaagctttttgaagtggcaatagcttgtgatgttgttctatgttgccgggtagctcccctacagaaggccggtattgtcgatctaataaaaaagcggacaagtgacatgactttggctattggagatggtacctttccaggtgcaaatgatgtatccatgattcaaatggctgatgttggtattggcatcagtggacaagaaggaaggcaagctgttatggcatcagattttgccatgggacaattcagatttttggttgacctgttgttggttcatggtcattggaactaccagagaatgggctacatgatcctatataacttctacagaaatgctactttcgtattcgtgcttttttggtacgtacttaacactggtttcaccctgacaacagcaataaccgagtggagcagtgtgttatattctgtgatctatactgctgtcccaactatcgttgttgcgattctcgacaaggatctgagtaggaggacattgttgaaatacccccaactctatggtgcagggcagcgcgaggagagttacaacctaaggctgttcatttttgtcatgctggactccatctggcagagcctcgcagttttctttatcccttaccttgcatacagaaagagtacaatcgacgatggaactgggatcacgcacgcagcaatatggggcagtatagtcgcaacgctgatttgtgtcatggtcatagactccataccgatattgcctggtttctgggcaatatacaaggtgatgggaactggactgttttgggcattgctgctcgcggtaattgtggttggaatgattcctcattttgtcgctaaggccataagggagcatttccttccgaatgatattcagattgcgagagaaatggagaaatctcaagattctcatgatgtcactcatccagaaattcagatgagtacagtggcacgagcttag

SEQ ID NO: 3892 - DNA, 945 bp, Oryza sativa
atggatttggagatggagatgatgaggatggcgatgagcccggcgatgtcgtcggcgacggcggcggcggcgagcgaggacgagggcgacctgaggagggggccatggacggtggaggaggacatgctgctcgtcgactacatcgccaaccacggcgagggtcgctggaactcgcttgctcgctgtgcagggctgaggcgcaccggcaagagctgccgtctccggtggctgaactacctccgccccgacgtccgccgcggcaacatcaccgccgacgagcagctcctcatcctcgacctccactctcgctggggcaaccggtggtctaagatcgcgcagtatttgccggggaggactgataacgaaataaagaattattggaggaccagagtgcaaaagcacgcgaagcagctgaggtgcgacgtcaacagcaaggagttccgcgacgtcgtccgccacgtctggatgccgcgcctcatcgagcggatccaggccgacgccgccgccgccggcgaagttgcggcaccggcgccggtgtcggcggcggcgacgaggtcgatgagctcgccggctggcgcgatgtacctccaccaccagcagattccgctcgccgccggcgccatggtggtggcgccggcggtgagtagcgaagcgtaccaccaccacggctgcggcggcggcggcgacacgagctgcagcgagccgagccaggcggcggtgaccatgagccccgacgacgcatccagcacgctccggtcgtcgtcggcggcggcggagaacgacacgatccacggcgacgtgcttagcggcagctggtcggagcttcttgccaccaccaccaccaccatcgccgccaccgccggcttgccggacttcgatgagctcggagatttcgaggacaacttatggagccttgaggacatttggctgcaccagcagtgttga

SEQ ID NO: 3893 - DNA, 1380 bp, Oryza sativa
atgcagtatagaacgcaacaagccatgctacctgctgtgaagctctctcctggccctgtggccttcgctggcaccaatctacggtccagatcagcttcggtttcatctgtctcaagtctcaaaccatccaaatttgtggtctcttcactcagaccactctaccttgcaccactagatggcccaagagctgctgggcaaaaggctcagaggcagccacttgagttcaggtgtgctgcttccgcagccgatgacaaggagtctaagaccgaggtggtgcccgtccgctcggaagctgcccagaagctgaagatctccatctatttcgcgacatggtgggcgcttaatgtgatctttaacatctacaacaagaaggttctcaatgctttcccatacccctggctcacttctacgctctcccttgcctgcggctctgcgatgatgcttgtctcatgggccactcgccttgttgaggcccccaagactgacctagatttctggaaagttcttttcccggttgctgtggctcatacaattgggcatgttgctgcgacagtgagtatgtcaaaagtagcagtgtcattcacacacattatcaaaagtgcagagcctgcattcagtgttttggtatcaaggttccttcttggggagacgtttccggttcctgtatatctttctcttcttccaatcattggtggatgtgctcttgctgctgtcacagagctgaactttaacatggttggattcatgggtgccatgatatcaaaccttgcatttgttttccgcaacatcttctcaaagaggggcatgaaggggaaatctgtcagtggcatgaattactatgcctgcctgtcgataatgtcccttgtcatactcacaccattcgctatcgctatggagggccctcaaatgtgggctgctggttggcaaaaggctcttgcggaagttggtcccaatgttgtctggtgggttgctgcacagagcgttttctaccacttatacaaccaggtgtcttacatgtctctggatgagatttctccattgacatttagcattggcaatacgatgaagcgtatatctgtgattgtttcgtcaatcattatcttccacacacctgtccgccctgtcaatgcactaggagctgccattgccatccttggcacattcctgtattctcagactgcagagtattttagttcattcttttgctataggaggcaaagcagtgagttcaaaaagatggtaatgttcagggccatggatgaagaagggatccagatgaagaatgtctctgccaaaccagtagcaagcactgaggccaattttgcttgtgcaacttatcttgtagatataggggggttaggttttgatatgaggtcataa

SEQ ID NO: 3894 - DNA, 2865 bp, Oryza sativa
atggcggcttgcggcgccgcggcggcggagtattcagctctcctgtccctctcatgtgggcctatcactcgccgccgtttcgccgtctcctgccgcgctcgaccgcccggcaacctcagtgcacagcagaagaagaagcgagggaaaaacattgctccaaaacagcgctcttcaaatgcaaaactcttgcttactactgaggaaaatggacagcttccaagtaccagtttgaggacttctatggaacgtcctcagaagagtacatccagtgaggacgataccaatggggctattagccagatagatgaaaaaattgcagccattggtaatgaacagcaagaggtactgccttactggggtggtcatatacttatatcagcctatcaggatattctgctcctaaatcaagctcgtcttcaagcaattgaagatgttgacaaaattcttactgaaaaggaagctttgcagaaaaaggttgacactctagagatgaatttgtcaaaagcacttgcaaccaaagggaacataaatacagatatccctggtgatcatttagagaaatttaccaaagaaattttgatagaaagtgctctaagtggaggcaatccagcacatttgtgtgagtctccacttttcatggagctgactgttctaaaagaagagaatatgctacytwaggctgacgcacaatttcttaaagcaaagattgttgagtttgctgaaacagaggaattcctattcaaattggagaaagaaaggtcactgttagacgctacagttagggagctggaagctaggtttctagttgctcaaactgatatctggaaagttgtccctctgcaatatgatgtttggatggagaaagtagaaaatctgcaacacatgcttggatgtttgaaaaatcatgtagagaagtatgctgcattgttggatcagcatgatgatctgcatgacaagattgatgagctagaagcatcactaaaagaagggaaaacatctgagttttctccttatgttgttgaacttctgcaacagaagttgaaagcagcaaaaagccatcaccaagcaggccatcaagaaacaaacactcacattcaagtatatcagcagttaactgaggaatttcaagataacctaggtaaactaatagaagaaagtggcagactggagcattctgcaaatagtatgccatcagaattctggagtcacatcctgctcatgattgatggttggttccttgagcggaaaataccaaatactgatgcacgtatgctgagagaaatggcatggaagagagatgaccgtatctgtgaagcctactttgcttgcaagggtgcaaaagaaagtgatgttatggaaactttcctaaagctatcgttatcaggaaacagtgtagattcgtgtcaggttggcggtctggcagatgtagttgctggtcttggcaaggcacttcagactaagggacatttagtagagattgttcttcccaaatacgactgtatgcaacttgaccagattactaatcttaaggttttagatgttgtcatacaatcctattttgatggaaatctattcagcaacaacgtgtggacaggaactgttgaaggtcttccagtctattttattgagccacagcatccttcaaaattcttctggagggcccaatactatggagagcatgacgattttaaacgttattcatactttagccgtgcagcactggaattactttaccaatctgggaagaaaattgatataatccactgccatgactggcaaactgcatttgttttctgggtgtcaactattctctaccgtgttcaagaatattgtatcttacacttagatttcaggcacctctatattgggatatatatgcaactcgaggcttcagctcagctagaatttgtttcacttgccacaacttcgaataccaagttggatagaccagacaggatgcaagacaatgcacatggaagaataaatgttgccaagggtggaattgtttattccaatattgtgacaactgtatcaccaacatatgctttagaagtgcgctcagagggtggtcgtggtctccaagatacacttaaaatgcattccaggaaatttgtggggatacttaatggaatcgacacaggaacatggaacccttccacagacagatttcttgctgtgcaatatagtgctactgatcttcaggggaaagcagcaaacaaagcatttctcaggaagcagctagggctgtattctgaggatgcctctcaaccactggtagcctgcattacgaggctagttcctcaaaagggtctacatcttatcaggcatgcaatatacaaaacagctgagttaggaggacagtttgtactcctgggttcaagtccagttccacatattcagagggaatttgagggtgttgcagaccaattccagaagaataacaatattaggttaattctgaaatatgatgaagctttgtctcattgtatttatgcggcatctgacatgtttatcattccatcaatgtttgagccttgtggccttactcagatgatagctatgagatatggttctgtgccaattgttcgacaaactggtggattgtgtgatagtgtttttgattttgatgatgaaactatacctgtggagctgcggaatggctttacatttgctaggactgatgagcaggatctaagcagttgcttggaaagggcattcagctactacagcagaaaacctatggtttggaaacagttagtgcagaaggatatgcagattgatttcagctgggattctccagcttcacagtacgaaaacctttatcagagtgctgttgctcaggcaaggggagcggctcaaacataa

SEQ ID NO: 3895 - DNA, 915 bp, Oryza sativa
atgactgcgggccagcctctccgggacgatccccagccacgccggcacagcccgccggcgctccacccggccgtcgtgccggcgtacccgcccccggagtcggacgccgacgagtcgtgggtctggtcccagatcaaggccgaggcgcgccgcgacgccgacgccgagccggcgctcgcgtcgttcctctacgccaccgtgctctcccacccctccctcgaccgctcgctcgccttccacctcgccaacaagctctgctcctccacgctgctctccacgctcctctacgacctcttcgtcgcctccctcgccgcgcaccccaccctccgcgccgccgtcgtcgccgacctcctcgccgcgcgctccagggaccccgcctgcgtcggcttctcccactgcctcctcaactacaagggcttcctcgccatccaggcccagcgcgtcgcgcacgtgctctgggcgcaggaccgccgcgcccttcgcgctcgcgctccagtcccgcgtcgccgaggtgttcgccgtcgacattccaccccgccgccgcgatcggcaagggcgtcctcctcggaccacgccacgggcgtcgtcatcggagagaccgccgtcatcggcgacaacgtctccatcctccaccacgtcacgctgggcgggacaggcaaggccgtgggcgaccggcaccccaagatcggcgacggcgtcctcattggcgccggcgcgacgatcctcggcaatgtcaggatcggcgccggggccaagatcggggccgggtcgctggtgctcatcgacgtgccgccgaggaccacggcggtggggaatccggcgaggctgctcggcgggaagaagggcgacgacatgccgggtgaatccatggaccacacctccttcatccagcaatggtcggactacagcatctga

SEQ ID NO: 3896 - DNA, 639 bp, Oryza sativa
atgtctctctccttggggtttagcgccggcgccggcgtcggtgccgatcgcctcgccgccgcgcccgcgctccaggccgccggtgctctgccgccacgcgtggacgtgtctctgtcgctggcgcgcgcggccaacgggcagccgtcgtcgtacctcccgctcaacgagaacgactcgctggacatggtcctcttcgacgtcctccgcgaggcctccgcggtggcggcgctgtcgtcgtcgtcgtcgtcgtcgccggagctgggcgcgcggacgacggcgccggtggtcgccggccaccccgccgggcgcaagggtggcggcggcggargcsgargcaggggagcggcggcraggggcggcgccgctggcgggcggcactaccgcggtttaaggcggcggccgtgggggaagtacgccgcggagatccgtgacccgacgcggcacggcscscggctttggctcggcacyttcggcacggccgaggaggccsccgcggcgtacgaccgcgccgcgttccgcatgcggggcsccaaggcgctgctcaacttcccgccggctgtcgccggtgacggcgcccgtcgcggcgccgccgcggccgcgaagcaggtcggcatgagcgacggtgagtgcgtgatatga

SEQ ID NO: 3897 - DNA, 2058 bp, Oryza sativa
atgtttgattctgcgcacaaagctcaatacatcgacggacaaagagaaatgtttaagagattggatgagtcaagccctaggtcatctgtaccttctgaagtgggagggaggagcaccctgaagtttagcatgcctagttttggttatgattcatttaatcccgtaagatctttcttgtcaggggtgagaaagggttctggaagacttaaatcacttcggcaatcacttacatctggtgctcctaagacagcttttgcggaagatcttaaatcttttaagaagactatatttgatccccaggaaaagtttctctttcaaatgaattggttttgcttcctatcatgtgtttttgctgttgccgtggatccactatttttcttcctacccattatcgacggcgacgacaagtccagttgcattgtgtttggaactggtgagcttgtgattgatccaatgaggattgctattcggtacttaaagagttattttgtaatggacttctttgctttgctaccacttccacagattgttgtttggagatatctccatactttggatggtccagatgtaccgtcaacaaaaaatgcattggtttgggttgtattgtttcaatatattccaaggttgctacggattttccctgtgaccaaagatttgaaaaggacggctggtgttttcattgaaactgcttggcttggtgctgcttactatcttctatggtttatgctggctggtcataatgttggtactttgtggtattttttgaccatagagcgggaagattcttgctggcgctcgaactgtcatagcaatgatggctgtaataaaagctacctgtactgtagtgataatcatactggcaactataccagttggcttagtaagagaacagaacttctcagtgcatgcagtactaattctttccaatttggtatttttgaacaagcgctggtgtctggaatacttcgtccaggaaattttatctctaaaatctgctattgcttctggtgggggctacaaaatctaagtacccttggtcaagggcttcaaacaagcatatatcctggagaggtgttattctctatcgcaatatgtgttattgggctaattctttttgctctcctcatcggcaacatgcagacctaccttcaatcagttgctatacggcttgaagagatgagagttaagaaacgtgatgctgagcagtggatgcatcatcgttcactgcctcctcaaataagagagcgagtaaggagatatgaacgctataggtggttggagaccagaggagtagatgaagaaaatttggttcaaacccttccaaaagaccttcggagggacattaagcgccatctctgtttgggtttagtgaaaagggtacctttgtttgagaatatggacgaaagattgctggatgcaatatgtgagaggttaaggcctacactatacactgaaaatgaatacattttgagagaaggcgatcctgtggatgagatgcatttcatcctccatggctgcttggagagtgagaccaccgatgggggccgaagtggattctttaacaaggtccagttaaaggagggcgctttctgcggtgatgagctgctcacatgggcattggatcctaaatctgctgctaacttcccagcttcaactaggacagtgaaagctcttactgaggttgaggcatttgcgttgtgtgctgaggagctgaaatttgtggccagtcagttcaggaggctccacagtaggcaagttcagcacacgttccggttctattcccagcactggaggacatgggcggcctgtttcattcaagcggcatggcgccgctattacaagaggaagatggccgagcagcatcgcaaggaagaagaggctgcaaaccggcaaagcagcagcagccaccaccctagcctcgcagcaaccatctacgcatctcgctttgcagctaatgcactccgaggagttcacaggctcagaagcagggccagcccgacaattgtgagattgccaaagcctccagaaccagattttgccgtcgatgaagctgactaa

SEQ ID NO: 3898 - DNA, 1794 bp, Oryza sativa
atgacggccggccaatcgcagagaacgaatcctggcgccggcaaccaaacgacaaccccctggaaaaaaacccccgcaaaagacagggattggaggtggaggattccgctctgtgctcacggttggtttggtttctgtttggcagtgctgaaatcaagaaggctcgttggtgtcgccgatgcgtggtccgtggatgatggtgcggatggcatcagcggattccccgacgcgatgagcgccgctgcacacaaacagatggtcactggtgccgaggaagccatgctggggaagctggaattggatagtcaatccaatctcttctccaatagtgatgattttcttctttccgggagcagtaagctgggaatttccgcatcagaagatatagatttgcctgggaaacagggattgcccgagtcgacaacagacaggcctggaagcaatggatcaagcagggttcccagactaagagtgcttggaacagccggcatggctggatttgggaaggcagttgatattttagacactataggctgcttggtaacaacaagccttagcacagatggcggctttatttccagggctaaaaccaaaggatgtccgatatcaattcttgcttttgaggttgcaaacacgatattgaaaggtgctactattatgcaatctctttcggaagacactgttacatacttcaaacaagtggtgcttccttctgaaggcgtgcagaatttaatttccagtgacatgagtgtgttgatgcggattgtagccaatgacaaaagggaagagctgaaaatattttcacaagagattgtcagatttggcaaccgttgtaaagatccccaatggcataacctggaccgctattttgtcaagctagaatcggaaaatccaccacagaagcagctaaaagaaacagcagttgcagagatgcaaaagttgatggatcttgttcatcgtacaactgatttgtatcacgagctgcatgcgttggatagatttgagcaagattatcgctgcaagctgacggtaaagggaaattcatatcagaaagataatcttccaggagaaaatattgaggtcgtgagaatagaattgaagagtcaaaggaactatgtgaaaagcttgaagaaaagatctttgtggtccaagacattggaagatattgttgagaagcttgtagacatcgtgcagtacttgcattttgagatcaacgcttcttttggatcttctgatgaaggtgaattgagttctgaatctactgaagactgtcagagactaggacctgccggacttgcattacactatgcaaatattatcatacagatctatagcgttgtttctcgatcaggatatataccaccaaatacaagagatgctctctaccaaggattgccaccaagagtgagatcggcactacctaatagattaagaacttcgtcagtgcctcaggagctcaatattgatcaaattagggctacaatggataaaacattgaaatkgcttgttccaatggccatcaataccacgtgtgcccgaggcttcttgcggtttagcgaatgggcgagatcagggactgagagggttggaaggaggccaggccaaccggacgtggtcgagacgctctaccatgcggacaaggcgaagaccgaggactacattctggacctggttgtctggcttcaccaccttgtcaaccagagtaaccggccggcaaatgcaaaagacaaagacaaagagcagtccacctcacctctaaccaaatctgatcttgacaaggcacaacaagaatag

SEQ ID NO: 3899 - DNA, 876 bp, Oryza sativa
atgcgcgctggccgcggcgaacctyaacacgggcgagttgcggcgcstggagggcccggggaaggggaggaggaggcgtggggcsggggcgtgccgttcttcgcgcggtgcgcggcggccggggacggacggcacgtcgccgtcgtcggcgggtgggagccggccgcgctatgcctgacacgcgacgtccgcgtgctggacgtccccgccggtgtgtggcggcgcggcgcggcgatgccggactcccggggcttcttcggctgcaccgggagcggcggcgtcgtctacgtcgccggcggccacgacgagtccaagaacgcgctccgctccgcctacgcgtacgacgtcgcctccgacgcatggcgcgcgctcccggacatgtccgaggagcgcgacgagccgcagctcgtcgcaaacccgggccgcgtgctcgccgccagcggctacccgaccgacgcccagggcgcgttcaagaagaccgccgagcgctacaccaccaccacaaccggcgacgcaaccgcctggtccagcgagggagacatggcgccgaacaccgcggagacgtgccttgccgcggtcggcggcaaggtgtgggccgtcggcgccgggaagggcggcktscgggaktgggacgggggcgcktggagggacktgscggacgggccgccaggcatgaaggcktgcgtgaaggcggtcggcgcgggcracggcracggcgccgccatgttcgtgttcgtgttcggcaaggtggaggacggcaagcagtacgcggcgtgggtgatggaggacgccggcggcgcggcgcggtggcgcggcgtggccgtgccgccggggtttggcgggttcgtttactcgggcgctgctgtgcgggtttag

SEQ ID NO: 3900 - DNA, 1317 bp, Oryza sativa
atggtgagccaagtggtcgccgaggagaagccgcagctgctgtccaagaaggccgggtgcaacagccacggccaggactcgtcctacttcctggggtggcaggagtacgagaaaaacccgttcgaccccgtctccaacccttccggcatcatccagatgggcctcgccgagaaccagctgtcgttcgacctgcttgaggagtggctggagaagaacccccacgcgctcggcctccggcgagagggcggcggcgcctccgtcttccgcgagctcgcgctgttccaggactaccacggcctcccggctttcaaaaatgcattggcgcggttcatgtcggagcagagagggtacaaggtggtgttcgaccccagcaacatcgtgctcaccgccggcgccacctcggctaacgaggcgctcatgttctgcctcgccgaccacggcgacgccttcctcatccccaccccatactacccagggttcgaccgcgacctcaagtggcgcaccggcgcggagatcgtacccgtgcactgcgcgagcgcgaacgggttccgggtgacgcgccccgcgctggacgacgcgtaccgccgcgcgcagaagcgccggctgcgcgtcaagggggtgctgatcaccaacccgtccaacccgctcggcaccgcgtcgccgcgcgccgacctcgagacgatcgtcgacttcgtcgccgccaagggcatccacctcatcagcgacgagatctacgccggcacggckttcgccgagccgcccgcgggcttcgtcagcgcgctcgagatgtccagcttcggcctcgtgtcgtcccagacgcagtacctcctcgcggcgctgctcggcgacagggacttcacccggagctacgtcgcggagaacaagcggcggatcaaggagcggcacgaccagctcgtggacgggctcagggagatcggcattgggtgcctgcccagcaacgccggcctcttctgctgggtggacatgagccacctgatgcggagccggtcgttcgccggcgagatggagctctggaagaaggtggtgttcgaggtcggcctcaacatctcccccgggtcgtcgtgccactgccgcgagcccggctggttccgcgtctgcttcgccaacatgtcggccaagaccctcgacgtcgccatgcagcgcctcaggtcgttcgtcgaatccgccaccggcggcggcgacaacgccgccctccgccgggccgccgtccccgtcaggagcgtcagctgcccgctcgccatcaagtgggcgctccgcctcaccccgtccatcgccgaccggaaggccgagagataa

SEQ ID NO: 3901 - DNA, 2010 bp, Oryza sativa
atgggcatcaagggtttgacgaagctgctggcggagcacgcgccgggggcggcgttgaggaggcggktggaggattaccgcggccgcgtcgtcgccatagacaccagcctcagcatctaccagttcctcattgtggtaggaaggaaaggaacagaagttctgaccaatgaggctggtgaagtcacaagtcatctgcagggcatgttgaaccgaactgttaggattctagaagcaggaataaaacctgtttttgtgtttgatggtgagccacctgacatgaagaaaaaggaactggcaaaaaggtctttgaagagagatggttcttccgaagatctaaatagagctattgaggttggagatgaggatttaattgaaaaatttagcaaaaggactgtaaaggtcacaaaaaagcacaatgaagactgtaagaggctgttaagcttgatggcaccaggggaggcagaagcacagtgcgcagcactctgtgaaaatcacaaggtctttgctatagcttcggaggatatggactctctaacttttggtgctagaaggtttcttcgccatttaaccgacctgagttttaagagatctcctgtaacagaattcgaagtgtcaaaggttttggaggaacttggactcacaatggatcagttcattgatttgtgtatccttagtggctgtgactactgcgagaatattagaggtattgggggacagagagctttgaaacttattcgtcagcatggttatatagaagaagtagtgcaaaatcttagccagacaaggtatagtgtcccagaagactggccttaccaggaagttcgggcattgtttaaggaacctaacgtttgtacagatattccagacttcctgtggaccccaccagatgaggagtctgtagaaaagataaaggctgctaatgataaattttcccttgggcgagggaagcttttggcaccagtagcgaacttaacaggatctacatcaactgcagggaagctgggcatctcttctgtacgtggagccttggggagttggaatgctataagtagagtgctagcttcaacaccattcatcaggagccttcaagccttcattgttttgaggcatgttgcagagtcccttccaatttttgctcttgagatcatattgtcattctataagttcctcataatggaggctatagttgaaggatcgaagtatgagtgcttgctgtttgatttggatgataccctgtaccccttcagctctggcatcaatctagcttgtcgcaaaaatatacaagattacatgcgtcgccatctgcgaattgaagaaagccaaattgcagatatgtgcctggaactgtacaaggaatatggcaccacgatggctggtcttaaggcattaggttacgagtttgataacgatgaatttcatgcaaatgtccatggtacactgccatatgacaatctgcatttcgaccctgttttgaggacccttctactttctattccacagagaaaaataatattcacaaactctgataaagctcatgcagaggaggttctgtgcagggtgggtatacaggactgcttcgaaggcataatatgcttcgagacactgaatccaccaaccccaacatgccatggtctacacaagcccctaagttctatctctgatgaactatcttctgatttggatgacctggatgaatctgatggcttcagacctaaatcaccaattctctgcaaaccctctattgaagccatggaagctgcgattcggattgcgaatgttgatcctgagaaaacaatcttctttgatgacagcgttcgaaacatagcgtcaggaaaagctgcaggctttcacactgtgattgttgggaggccaacgctggttccaggtgctgatcacgctcttgaaagcattcataacatcaaggaagcattgcccgagatatgggacggttggtctgaatctgatgttgttcttgcttccactgcttctgagacaacggttattgcttga

SEQ ID NO: 3902 - DNA, 1386 bp, Oryza sativa
atggagaagaaggcgtccatcctcatgaaccggtatgagctcggccgcatgctcgggcaaggcaccttcgccaaggtgtaccatgcacggaaccttgcatccaaccagagcgtcgccatcaaggtcattgacaaggaaaaggtattgcgtgtcggcatgattgaccagatcaagcgagagatctccatcatgcgcctcgttcgccaccccaacatcgtccagctgcacgaggtcatggccagcaagagcaagatatactttgcaatggagtatgtccggggtggtgagctcttcagcagggtagccagggggcgactcaaggaggatgctgcgaggaagtacttccagcagttgataggggctgtggacttctgtcacagccgcggtgtctaccaccgagacctcaagccagagaacctcctcgtcgacgagaatggcaacctcaaagtgtcggactttgggctgagcgccttcaaggagtgtcagaagcaggacgggctgctccacacgacgtgtggcacacctgcatatgttgcaccagagataatcaataagaggggctatgatggagcaaaagcagacatatggtcttgcggtgtcatactctttgttctgcttgctggctacctcccattccatgactcaaatctaatggagatgtaccggaagataagcaaaggtgatgtcaagttcccacagtggttcactactgatgtccgaaggcttctgtccaggctgcttgatccaaatccaaacattaggatcaccgttgagaagctagttgagcatccatggttcaagaaggggtacaaaccagcagtgatgctatcacagccaaatgaatcaaacaacctcaaggatgtccatactgctttcagtgctgatcacaaggacaatgaaggcaaggcaaaagaaccagcaagctctttgaagccagtgagcttgaatgcatttgacatcatctccctctccaaaggatttgatctgtcaggcctgtttgagaacgacaaagagcagaaggcagactcacggttcatgacacaaaaaccagcatcagcaatagtgtcaaagctagagcagattgctgagacagagagcttcaaggtgaagaagcaggatggactggtgaagctccagggatccaaagaagggaggaaagggcagctcgcgatcgatgcagagatctttgaagtgacaccatccttctttgttgttgaggtgaagaagtctgcaggggacacgttggagtacgaaaaattctgcaacaagggcctaagaccttctctcagggacatctgctgggatggtcagtcagagcatccatcactggcacagtcatcaactctgactcagtcctctaagtcaatctcgagacatgccatttaa

SEQ ID NO: 3903 - DNA, 1329 bp, Oryza sativa
atggcgatggcgggtggaggacgaggagactacggcgccttcatggagaggttcgtgctgccgccgccgccatcgcagcaactccctctccacggcctcaccttcgccatcaaggacatcttcgacatcgccggccgcgtcaccgggttcggcaacccggactgggcgaggacccamggggcccgccgcggcmacctcccccgtcgtcctcgccgcgctcgccgccggcgccaccagcctcggcaccaccatcatggacgagatggcctacaggattggtttgttgttgtcagcatcaatggggagaacacgcactacggcacgccgaccaacccttgcgcgcctgggagagtccccggaggatcctccagtggttcagctgtcgccgtcgccgccaacctcgtcgacttctccctcggcaccgacaccggcggcagcgtcagggtgcctgctgcctactgcggcatctttggactccgcccttcccatgggttggtttctgcagagaatgtcatccccatggcgcaaatgtttgatactgttgggtggttttccagagatttatctacgttgtctcgtgtaaccaaagtgctgttgccactccctgatgacattgtcaagcaacctactcaagtcacaattcctatggactgtttccagatcttaggctctctcgacgaccgcacctatcaaatcatcaatgcttcggtagcaaagagatttgatagtcagatattagacaataggaaccttggagatttcatctctgataatgttccaagcataggaaagttcatcactgacttctctgaaagcgaactcccttctgtgccagctctatccgtcatttcacatgtcatgcgaggccttcaaaggtctcagttcaaagcaaaccatgcagagtgggtcaacactgtaaaacctaacctaggccctggattacgggagagaatactggaggccattgcatctggggataatgaatccctggaggatttccaagctataagggctgaattcaagtctgcacttgctgctcttctgaaggatcatggaatccttgcaatccctacagttcctgggcctccacccaaggtgggcatggaagctgctcctctggaaaatttccgagcaagagcattttcacttctctccatcgctggattatccgggttttgccaggtgagtattccgctgggcatgcgcaatggtcttcctgtgtcagtttcgctcgtggcgcgacatggtgcagaccatttcctcctcaatgtggttgaggagctgtatcagacactcatagacgaagccactaaaacttggtcctcctga

SEQ ID NO: 3904 - DNA, 504 bp, Oryza sativa
atggcctcgccgtcagcgccggggccgaagctgcagaaggcgatggtggcggtggacgagagcgagttcagccaccacgcgctggagtgggcgctgcgcaacctcgcgccgaccatcgcgccgccgctgctcgtgctcaccgtgcagccgctcctccccctcggctacgtctccgccgcctccttcggctcccctctgggcacccccgttgtagccccggagctgatcaaggcgatgcaggagcagcagcagcagctctcgcaggcgctcctcgacaaggccaagcagatctgcgcgcagcatggggtggctgtagagacaatgatcaaagtaggagatcctaaggagatgatatgtcaagcagctgaggaatcaaaggttgatttactgatcgttgggagtcacagccgtggacctgtacaaaggttgtttcttggaagtgtcagcaattactgtatgcatcattcgaagtgcccagttcttgttgtgaagaagcaggagtaa

SEQ ID NO: 3905 - DNA, 2172 bp, Oryza sativa
atggcgctgcgggcgcggttgaggcggttgctggtggtggtgatcctcgtcgtggtggaggtggtggtggcgcagcagcagcagcaggagaggttggcgtcggggtcggatttggcggggctgttcagcctgcgggcgtcgctggggatacgggcgagggagtggccggcgagggtggacccgtgcggtggcgggtgggccggggtcacctgccgcggggggcgcgtcgtcggggtcaccgtcgccgggttccgccgcacgcgggtgggcgcacgggcgccgaggttcgccgtcgacggggtgaggaacctcacggcgctggaggtgttcaatgcctccgggttcccgctcccgggggaratgccggcgtggttcgggcgcggcctcccgccgccgctcgccgtgctcgacctccgctccgccgcggtcaatggcacgctcccgcccgatctcggcgtgtcagggaacctcacgagcttgctcctctcgggaaacagcctctccggcgccgtgccggggtcgctgctgtctgtcgccgggcttcggtttcttgacctctccggcaacaatttcaccggcgggctgccgaatgtcacccccgtcgccggtggtggagccgcctcgctgttcaacgtttctgggaattcgctgtatggtgtggtcagcgatgccattggggccctcaaggggaggttccaggtggtggacctgtcaagcaactacttcgatggggtttggaatgtgtctgatggaaatgtagatgttaggatgaattgcttctccggtgcgccaggtcagcgcaaccgtgttgattgtgaagagttctataggagggcaggggtgaggcttggtgatgctctagctcccgcaccttcgccggagacatcaccggggacgacgacgaagaataataacagtaggatatccaagggtgtactgattggagttattgctgccgcggcaacgctgatggttgtgttttttggtgcattggtattctgcttggcaaggcagaaggcgggaagaagaggcgcacgcgggagaggggtggatacaaatgaggaaagcacacgtggcgtgcgcaggagggatagtagtgtaaacccggtgacatcaccaccagtagcagtgtccccaagtgccaattctggacataaggatccggttgttgtttccggtgaatttacctttgagcagttggtccatgccacaggcgggtttggagatgacaacctcctcaagcatgggcactctggggatatttaccatggtgtctttgagagtggatcccaggttgttgtcaagaaggtcaacgcacagagcgtcaacaagcatgcaggtgaattggacttctataaaatgtattcccatgagaggattgttccgttgctcggacatttggcaaaggatgaagaggaatttatggcttacaagtatatgcctaagggggacttgaccaatgcattgcacaagaaacctgtggacacagaagatggcttgccatcattggattggataacaagactgaagattgcaacaggtgtggctgaggccatgtgcttccttcacgatgagtgccgcccgccattagtccacagagatatccaagcaactagcgttcttcttgatgataaatttgaagtgcgacttgggagtatgagtgatgtatgtgcccagcaaagtgggggaagccagagtgtcttctctcggttgttgagatcatcaaggtcgcttgataagaacatatcaggcccaccagcaacttgttcttatgatgtttactgctttggaaaggtgatgcttgaactagtaacaggcaactttggtgtaagtggatcaaacgatgctgcctccgaagagtggatgacaaacacactaaaccgcatcgacatgaacgacaaggagagcatttctaggatcatcgatcctttgcttattgtcgacgaggatcatctcgaagaggtgtgggccatggcaatcgtcgcgaagacatgcctgaattcaaagccatcaaggcggccttctgctcggtacgttctgagagccctggagaacccgctaaagattctgcgaatggcgtcccgctccaattcagcaagactcaggagctcatcaatcccggagctcctggcagtctgctttccttcaaggaaaccggtaccagagccttga

SEQ ID NO: 3906 - DNA, 1953 bp, Oryza sativa
atgccagagtgcgacatttctaaaagagtccctcgaaaaatatattttacgatccaatcccctctactcgaagcaatcaagcaaggagaggatagaggagagctcaagctccacctcccgctccaatggcggcagccactctcccaccctcccaccaccgcctccacctccacctccacctccacacccccaaaccctccccacctcgccgcctccgcctcgccgccgccgccgccgcgtcgcgcctccagaacccgacaaccacccactacccgaacctcccgccgcccgcgccgccggcctccaactccctcgtcgccgccgaggaggcctcccttgcggccgcgccgcacctaccgcttccccggctccgtcccctcctcccccacgctcccggacactgcggacggcggtctcgccgcggcggccgcggtggcggacgacgccgtcctgcggcgcgcgctcgaggtgcggcgcgcggtggccggggaggtgcttgtggcggcgctccgaggcgggaaggtgggcgggctgacctacatcaggaacctcacctcccggatggcgccgttcgtggaccgcgtcgtcgtcgaggccgccgccatgcggcgcgaccgccccgagctcgcgcaccagtcgttcaacgcgcgggcgcgcgtgtacatcgaggagtccggcctcgtcgccctagtcaagtggttcaagcacaactccatgacttatccccaaatcgccaaagtagtttgctcatcctctggcaatctggagaaagtgagaaggatgataaagtggttaaggtccattcatgtgaaaggagaatatctaggacgcgtgcttgcaaaaggtgatacttttttgagccgcagttttgaagaactggaagagattatttactacatggaaagctgcggtgttagaaaagattggattggtcatgtggttggtaggtgtccacagttactgaatctgtccatggatgaactggagactcgtgtgagattttatacagatatgggcatgaatgataatgattttggcaccatggtttatgattatccaaaagctcttggatttttcagcctagaagagatgaacagtaaggtacaatatctgaaagaatttggactgagcactgatgaacttggaaagttgatggctttcaagccacagctcatggcctgcagcattgaagaaaggtggaagcctcttgtgaagtacctgtatcatctaaacatttcacgggatggcatgaagcgtatgttggtggttcagcctacgatcttctgtcttgatttggaaacagtaattgcaccaaaggtacaatttctacaggatattggtgtgaggagtgatgccgttggaggtgtgctggtgaagtttccgcctgtactaacttatagcctatacaagaaaatacgcccagtggtaatattcctgatgacgaaagccgcagtaaaacaggaggacatcggcaaggtcattgccctggatccacagctcctgggctgtagcattgtgcgcaagctggaagtcagcgtcaagtacttgagatcgctgggcatctaccacttcgtgcttggtcagatggtcaccgatttcccaacgcttctcaggtacaacgtggatgttctaaggccaaaataccagtacctgcggcgcgtcatggtgcgaccgctgattgatctcgtcgagttcccccggtttttcagctactctttggaggacaggatagtgccaaggcaccaaacattggtggagaacaggatcaacatgaagctgagatacatgctaactggatctgacgaagatttttcacaaagggtacgagaagctgttgagaggagagccagatttgaagctggaaatgttgaggcatcagattcgcaggcgactaccgacggagcagaagccacagcaccagcatctcaagacggctgggaggcagatacatag

SEQ ID NO: 3907 - DNA, 1602 bp, Oryza sativa
atgacggaagatgactggagatggcatatgtatgacactgtcaagggtagtgattggcttggtgaccaggattctattcagtatatgtgcagagaagcaccaaaagcagttatagaacttgaaaactatgggttgccattttcaagaactgaagatggaaagatataccaacgggcctttggaggccagagcttagattttgggaaaggtgggcaggcctatcgatgtgcatgtgctgctgacagaacaggacatgctatgttacacactctgtatggtcaagcaatgaagcataatactcagttctttgtagaatattttgcgctagaccttatcatggacagtgaaggcacctgtcagggggttattgctttgaacatggaggatggcactcttcaccgtttccgtgctacaaatacaattctggccacaggaggttatggcagagcctacttctcagcaacctcagctcacacatgcactggagatggcaacgctatggttgcacgtgctggtttaccacttcaggaccttgagtttgtgcagttccatcctacaggcatttatggtgctggatgccttatcactgaaggttcccgtggtgaaggtggtatccttaggaacagtgaaggcgagcgtttcatggaacgatatgctcctactgcaaaagatcttgcttctcgagatgttgtttcaagatctatgacaatggaaatcagagaaggccgtggtgttgggccattgaaggaccacatctatctgcatcttaaccatctgcctccagaagttcttaaggagaggcttcctggtatttctgaaactgctgctatttttgctggtgttgatgtcaccaaggagcccattcctgtcttgcctactgtgcactataatatgggtgggatcccaacaaattaccatggagaggtagtgactatgaagggtgacaatcctgattctgttgttcctggtttgatggctgcgggagaagcagcatgtgcatctgttcatggtgcaaatcgtctgggtgcaaattcacttcttgacatagttgtttttggcagagcttgtgcaaacagggtagctgaaaccgctaagccaggtgagaagcagaaacctcttcaaaaaagtgctggagaaaagaccatagcctggttagacaagctgagaaatgcaaatggatcattgccaacttccaagatccgtctaaacatgcaacgtgttatgcaaaataatgctgctgtcttccgtacgcaagaaacactcgaggaaggttgcaaattgattaccaaggcatgggaaagttatcatgatgtgaagatcagtgaccggagtctcatatggaattcagatttgatagagaccattgagttggaaaatctcttgataaatgcatgcataaccatgcactcagcagaggctcggaaggaaagcagaggagctcatgctcgtgaagatttcacgaaaagagatgatgagcaatggatgaagcactcgctggggtactgggagaatgagaaggttcgcttggcatacaggccagtccacatgaacacattggacagtgaagttgagtcgttcccacccaaggcgcgtgtttattag

SEQ ID NO: 3908 - DNA, 2082 bp, Oryza sativa
atggccgctgctactccaccttcagcaacgggaccaagaacatcaccctccagggcagcgcggcgattcgccggcgatgggtggatcgagatcaccaccggcagcaacctgccgagcggcggcaccatgggacgcgtggcgtactcgccgccggtgcagctctgggaagccgccaccggcgaggtcgccagcttcaccacgcgcttctccttcaacatcaccccgacaaacttggacaacaagggcgacgggatggccttcttcctcgtcggctacccttcgaggatgccggacacggcggacggcggcgccctcggcctcaccagccggaccttcgacgccgtcatgtccggcgacaaccggttcgtcgccgtcgagttcgacaccttcaacaactcgttcgatcccagcgccacctacgaccacatcggcgtcgacgtcaactccatcgtatcggtgcagaccgagtcgctgcccagcttcagcctcaccgggaacatggccgccattgtcgactacaacagcagctcgagcatcctgtcggtccagctggtgaagacatggacgaatggctcgactacactttacaaccttagcaccaccgtcgatctcaagaccgccttgccggagaaggtctccgtcggcttctcggcggcgacgggctcatcccttgagctccatcagctgcattcttggtacttcaactcctcgttccagcagaatccaccaccggcggcgcagccttccccgaccacctctggtcccggacttgccggagttatagccggagccaccgctggtggagcactgttcgtcgtgctcctcttcgccatgatagttgtcctcgtgcggcgacgtcggagcaagaagagaagggaggcagaagaggcagaggaggcgagacacgtagggttggccggagatgacgacgatgacgatgacggcgagcccatcgtggagatcgagatgggcatggggccaaggcaaatcccataccacgagctcgtcgaggcgacgaagagctttgcggcggaggagaagcttgggcaaggtggcttcggcgccgtgtacaggggatacctgagagagcagggcctagccgtcgccattaagaggtttgctaaggattcctccaagcaagggaagaaagagtataggtcggagatcaaggtgataagccggttgcgtcaccgcaatctggtgcagctcatagggtggtgccatggccgcgacgagctcctactcgtctacgaactcgtccccaaccgcagcctcgacatccacctccatggcaatggcaccttcctgacatggccaatgagggttaagattgttcttgggcttggatcagcactgttctatctccacgaggagtgggaacagtgcgttgtgcaccgcgacatcaagccgagcaatgtcatgctggatgagtccttcaacgccaagctaggcgacttcgggcttgcaaggttcatcgaccatgccgtggggatgcagacgatgaccgccgtctctgggacaccaggctatgttgatcctgaatgcgtgatcaccggtagagcaagctcagagtctgatgtttatagcttcggcattgtcctattggaagtggcatgcggaaggaggccaatgagcctacaagataaccagaagaatggcatcttccggttggtcgagtgggtctgggacctgcacggacaaggagatgttatctcagcggctgatgagcggctcaacggtgactacgacgtgtcggagatggagcgtgtcattactgtggggctttggtgtgcgcatccagacccaagtgcacggccgtctatcagagcagccatggccatgctccagtctagtgggcaactaccggtgttacctgccaagatgcctgtgccaacatatgcgccgccagtggcctcagtggaggggctcttcacatcgtccactggaatgtcgtcctcaagtgcagcacaatcatcatcgacgaccagtggctacatcactcacacctcgagttcctctaacacatccacttcagctggttcaaaggactcgtcttcgttgctcaaacatcaatacttatga

SEQ ID NO: 3909 - DNA, 1194 bp, Oryza sativa
atgggcgagcaagttaagctcaacgacgacaaggaggagggcggcaaggagaagaattcgaagcaggtggaagaagtagcaccggcggcagagaagaaggaggaagctgcagcagcagcagatgcagggagcaaggaagaagagcaggtgccgccgccaccggcaccggtgatcctgggcgtggagcttcattgcaccggttgcgccaggaggatgaggcggtgcatcctgcggagcaagggcgtgcagggcgtggaggtggacatgggcggcaaccagctcaccgtcacgggcatcgtagaccctcaagccctctgcgctcgcctccgccacaagaccttgcgcaacgccaccgtcatctccccgccgccgcccccaactagtaccgaggaccaagaccagcaccagccatccccgcggccgccgctcgtccattcgcaggtgagcgatgtgacgacggtggagctcctggtgaacatgcactgcgaggcctgcgcccagcaactgcacaaaaagattctcaagatgagaggggtccaaaccgctgacaccaacttgagcaccggcaagctgacggtgaccggtaccgtctcaggcgacaagctcgccgagtacatccaccgccgcacaggcaagctcgccacggtcgtcgtgcccccgcccccaaagcccaaggaggaggaggaggagaagaccaacgacgacaagcctcctcctcctcctgcagccgaagctgacaagaaagatgaggaaaataagccggcggcggaagacggcagcagcaagctgcagaatgaagcagagggcaacgccaacaaggaagcagcagcagcagcagaggaggaggcgcccgaggaggagaaggcagcagcgattgcgaataataagcagcagcaggaggatggttcggtggtggtggaggggttcccgccggaggagatgatgaagcggatgcacttgtactggccgccgtacgggcacggctacacgagttactaccaccaccaccaccaccaccagggcggtcaggctcacccctgtgcaaatcttcactcgtgggtgcctccaccaccaccaccaccaccacctcctcctcctgtgtactacagcagctacgtcatgctggaccgaccgccaccgccgccgccgcagctcttcagcgacgagaacccaaacgcgtgcgtcatctcatag

SEQ ID NO: 3910 - DNA, 4425 bp, Oryza sativa
atggcttctcatcttggcatcatgcaaggattaggttggtcgattgcatcggcatgcgagcagcagcaggaggaggattctctgtgtttccaggctaacctgatcgatctcgccaacattcttctcctcgtcgtctacctcgcgacgctggtgatcgccggatgcgagaagcgattcttggttgcggcgaggtggggcggcctgcggctgcggccgccatggctgtgcctcgttgcttctccttgctgcgctgttcttggcgtcgcttgcgtgtgcttgggagcgctgaggtcgtcgtcgtcgtcggcgtcggcggcggcggcggtggcggtggtgagaggggttgtgtgggtgttcgtcgcggtgtccgtggtggttcggccgacgaggttgtcgagcgccgtggccatggcgtggtgggcggcgatggcggcgatgaggacggcgtacggcgtagaggtggtggcgaggggtggctcgctgccggttcttgatgtcgcggcatggggggtcagcttggtgctgctcctgtgcgtgttcgtggttggtcgagccggccgccgtgatgatgtcgccggtggcggcgacggcgagacgtcgaccgagccgttgctgtcggcgagaggcggcggcgagcggtcgtcggcgttcggcgaggctgggttcctgagcaggttgctgttcacgtggatgaacccgttgctgcggctgggttactccaagccgctcggcctcggcgacgtcccgccgcttgacgccgacgacgaggcggcgcaggcgtgcgacacgttcctgcgagaatggcaccggcggcggagcgcgacgccgggcggcggcggcgaggagaaggcggcgagcaggctggtgttcgcggtgctcgccgcgtgctacaagaaggacctcctcctgacggcgctctacacgctgctccggacggcggcgttcggcgccatgccggtgatgctctactccctggtgtcctactcctaccggcggcgggagcgtgggctcgccgccggcatggcgctcatcgccgcgctggtggtgatgaagctggtggagtcgctgtcgcagcggcactggttcttcgggtcgcgccgcctcggcatgcgcatgcgctccgcggccatggcggccgtgttcgagaagcagctgcggctgtcgggcgaggcgcggcggcggaactccgccggcgagatcgtcaactacatcgccgtcgacgcgtaccgcctcggcgagttcccgtactggctccacctcgcgtggagcatgccggttcagctcgccctcgccgtcgcgctcctcttctggaccgtcggcgccggcgcgctcccgggcctcgtccccgtcgccgcctgcggcgtgctcaacgtccccttcgccaagctgctgcagcgctaccagtcgaggttcatggcggcgcaggacgagcggcagcgcgccacggcggaggcgctcggcgccatgaaggtggtgaagctccagtcgtgggaggaattcttcagggggaacgtgcagcggctgcgcgacgccgaggtgcggtggctggccgacgcgcaggtcagcaaggcgtacggcagctcgctatactggatgtcgccgaccatcatctccgcggtgatcttcgccggcacggcggcgctccggagcgcgccgctggacgccgccgtcgtgttcaccatcctcgccacgctccgcgtcatctcggagccgatgaggatgctgccggaggtgctgtccatcatgatccagatcaaggtgtcgctggaccgcatcggcaagttcctcatggaggaggagttccgggacgacgccgtcctgccattaccaatgccaagctccgacatgatcaccatggccatcaacaatggcgtcttcagctgggagcctagcaaggccattgcaacactgaaatccatcagcatcgcagcaatgcagggcgagaagatcgccgtctgcggtccggttggcgcggggaaatcgtcattgctctgcgcaatgctcggagaaataccaagaatgtctggatcagtagctatgtccggctcgatcgcctatgtcccgcagacgccatggatccagagcggcacggtgcgcgacaacatcctattcgggaagccgatgaacaatgaggagtatgacagggccatcaggtgctgtgcattggacaaggacatggagaatttcccccatggcgacctgacggagatcgggcaacgaggcctgaacatgagtggagggcagaagcagaggattcagcttgcgagagccgtctacaatggcgccgacgtctacctccttgacgatcctttcagcgccgtcgatgcgcataccgctgcgacactgttcaatgattgtgtcatggcagctcttgagaacaagacggtcattcttgtcacacatcaagttgagttcctctccaaggttgacaagatcctggtcatggaaaatggggagataactcaggagggaacttacagtgagcttctgcaatccggcacggcattcgaacagcttgtgaatgcgcacaaggactcaaaaacaatactagacaccgatgatcgccgagaaggagcaaaagaactcggcgcgtttcagtaccaggtaccactgatacagcagaacagtgaggcagagatctcaaccggtaacctgaaatcagtccagctgacagaagaggagaggagggagctaggagacattgggctgaagccatacaaggattatgtctcggtatccaagggctggttcctcctttccatgatactagtcacgcagtgcgcgttcttcggcctgcaatgcctggcaacctactggcttgcagtagcaattcagaaccaacaattcagtgctggggttgtgattggagtctatgcggtgatggcaactgtaagctgcttgtttgcatatgttaggagcctcattgccgcgcattttggactgaaagcatcaagggagttcttctccaggttcatggattcggtgtttaaggcacccatggtgttctttgattccactcccacagggagaatcatgaccagggcttcatcagatttgagcatcttagactttgacatcccgtttgcaatgactttcgtgatctccggctcgatcgaaatagcaacaaccatagctatcatgatcttggttacatggcagcttgtactggttgctattcctgtcatagttgcacttctgtacatccagagatactacattgcctcagcaagggagctggtgaggatcaatggaactacaaaggcaccggtcatgaactacgcagcggagtcgatgctgggagtgatcaccataagagcctttgctgagacaaagaggtttattcagacaaatcttcagctcatcgacacagatgcgacactgttcttctacacaaacgcagcactggaatgggttcttttgcgcgtcgaggctctacagatcttggttattgttgcatcatccatcctcctcgtcttgcttccggagggagcagttgctccaggatttcttggcctgtgtctctcgtatgcgttaatgctttcttcagcccaagtgtttgtgacaagattttactcaaacctggaaaactacatcatatctgtggagagaatcaaacagttcatgcatctgccagctgagcctcctgctgttattactgacagaaggcctcccccttcatggccatctgcaggaaggatagaattggagaacttaagagtcaagtaccgccgaaatgcgcctacggtattacgcgggattacctgcacatttgcagcaggacataagattggagttgttggaagaaccgggagcgggaagacgactcttctgagcacattgttccgccttatcgacccgtacagcgggagaattctcatcgatgatcttgacatttgcaccatagggttgaaagacctgaggatgaagctcagcatcatccctcaggagccaacacttttcagaggcagtgtaaggagcaatgttgatcctctgggtctgcacactgatgaagacatttgggaggctttaaataagtgtcagttgaagaagacaatcagtgcccttcctggccttcttgaatcaccagtgagcgacgacggcgagaactggagcgccggacaacggcagctcttctgcctggcccgggtcctcctccgcaggaacaagatcctggtcctcgacgaggcgacggcgtccatcgactcggccaccgacgccgtcctgcagagagtcatcaagcaggagttctcagggtgcactgtgatcaccatagctcacagggttcccactgtcactgacagtgacatggtcatggttctttcatacgggaaactcatagagtatgataggccatcaaggctgatggagaatgaggactctgccttctgtaagcttgtagctgagtactggtccaactatagctga

SEQ ID NO: 3911 - DNA, 1107 bp, Oryza sativa
atggcggaggcggcgggtgatgggggttggccggagccggtggtgagggtgcaggcgctgtcggagagcggggcggcgacgatccccgaccggtacgtgaggccggagacggagcggccgtcgtcgtcgtcggaggcgaacgccgtcgccaacatcaacatcccggtggtggacatgtcgtcgtctccggggacggcggcggcggcggtggcggaggcgtgcagggagtgggggttcttccaggcggtgaaccacggggtgccggcggcgctgctccggcgtgcccgcggcgtgtggcgcgggttcttccagcagccgatggaggtgaagcagcggtacggcaactcgccggcgacgtacgaagggtacggcagccggctcggcgtcgacaagggcgccatcctcgactggggtgactactacttcctccacgtcagaccaccccacctcctctcccctcacaagtggccccacctcccccctgacctcagggagacgacgacagagtacagcgaggaggtgaggaggttatgcgagaggttgatggcggtgatggcggtggggctaggggtagaagaagggaggctacaggaggcgtttggtggtagagagggtgctggagtgtgcgtgcgggtgaactactacccgcggtgcccacagccggatctaacactagggttgtcctcgcactccgaccccggcgggatgacggtcctccttgtcgacgaccgtgtcaagggactccaggttcgccacgccggtgcatgggtcaccgttgaccccgtgcctgacgccttcatcatcaacgtcggcgaccaaattcaggtggtgacgaacgcattgtaccggagcgtggagcaccgggtggtggtgaacgcggcggaggagcggctgtcgatcgcgaccttctacaaccctcggagcgacctgccggtggcgccgctgccggagctcgtgtcgccggagcggccgccgctgtacagccccatgaccttcgacgactaccgcctctacatccgccgcaacggcccccgcggcaagtcccaggtcgatcgcctcgccgccgccgccgccacaatacctaattctactaccaccactcaataa

SEQ ID NO: 3912 - DNA, 999 bp, Oryza sativa
atggagttggggcggttggtgacggtggtgatggcggcggcggtgagctcggcgctggtgatggtggcgaggtgcgacccgcaggtgccgtgctacttcatcttcggcgactcgctcgtcgacaacggcaacaacaactacatcgtttcgctggcgcgcgccaactacccgccctacggcatcgacttcgccggcggcccgtccggccggttcaccaacggcctcaccaccgtcgacgtcatcgctcaactcctgggcttcgacaacttcatcccgccgtacgccgccaccagcggtgatcagatcctcaacggcgccaacttcgcctccgccgccgccggaatccgtgccgagaccggccagcagctgggtggccggatcccgttcgccgggcaggtgcagaactaccagacggcggtgcagacgctgatcagcatcctgggggaccaggacacggcgtcggaccgcctgagcaagtgcatcttcagcgtcgggatgggcagcaacgactacctcaacaactacttcatgccggcgttctacaacaccggcagccagtacactcccgagcagttcgccgactcgctcatcgccgactaccgccggtacgtccaggtgctgtacaactacggcgcgcggaaggtggtgatgatcggcgtggggcaggtcgggtgcagccccaacgagctcgcccggtacagcgccgacggcgccacctgcgtggcccgcatcgactccgccatccagatcttcaaccggcgtctcgtcggcctcgtcgacgagatgaacaccctcccgggggcgcacttcaccttcatcaacgcgtacaacatcttcagcgacatcctcgccaacgcggcgtcgtacgggttcacggagaccaccgcggggtgctgcggcgtcgggaggaacaacgggcaggcaataattgttgtcataaggattggtgtcttcctagtcgttttcaacctactgcgtgcctggaatcttgatgggtga

SEQ ID NO: 3913 - DNA, 3504 bp, Oryza sativa
atggccggccggagcggcgagaacggcggcgccggcggcggcgacctgtcggagcctctgctcggcaaggaggcgcctcgccggtactcggagctgtacggcgccggcgtgctcagccggctgtccttctcgtggctgaacccgctgctccgcctcggccgctccaaggcgctcgacctcgccgacgtcccgctcatcgcctccgaggacggcgcggcgcgcgcttcggagaggttcgccgaggcatggagcctccacggccatggcaaggacggcggcggttgcggccgcctcgtcggcktgctgctcagcagccacaaggcagaggaggaggagcgccgggacctcgccgccgccggcgcatcggcggcggtggcgctggtcggctcgctgctggcgatcaagctcgccgagtcgctgtcgcagcggcactggttcttcagctcgcggcggacggggatgcgcgtccggtcggcgctgatggcggccgtgttccggaagcagctccggctgtcggcgcgcgcgcggcggcgccamtccgccggcraggtcgtcggctacgtcgccgtcgacgcgtaccgcctcggcgaagccgtcagctggctccacacgtcgtggagctcgccgctgcagctcgccctygccgtcgccaccctcctctgggcgctccgcctcggcgcgctcccgggcctcgtgcccctcgtcgccttcggcttcctcaacgtgccgttcgccagggccctccagggctaccagtccaggttcatggcggcgcaggacggccggctccggtcgacgtcggaggccctcgccggcatgagggccatcaagctccagtcatgggagggcgcgttccggcgagccgtcgagtcgcgcctcggcggcgagttcgcgtggctgagggaggcgcagctgaagaaggcctacggcgccgtgctctactgggcggcgcccaccgtggtgtccgccgtcatgttcgccgccacggccgccgccggcagcgcgccgctcgacgccggcacggtgttcaccgcgctcgccgcgctcagggccatgtcggagccggtgaggatgctgccggaggccatgacgatgatgatccagtacaaggtgtcgctggaacgcatcgggaggttcctcgccgaggaggagatcaaacaggacgacgtgacgagagcggcgacgacgacgacgacgacgaagaattcggatgcgggaatcatccatgtccaggatggaagcttcagctggagtgggagtgaagctgagctgacactgaagaatgctcacctcagcattcgcagaggggagaaggtggcagtttgtggcccggttggctcagggaaatcttcactcctctgtgcattgcttggggagatacctagaacatcaggaatgagtggcactgttcgcgacaacatcctcttcgggaagcccttcgagaacttcgaccatggagacctgacagagatcggccagagaggaatcaacatgagcggtggtcagaagcagaggattcagctggccagagccgtgtacagtgatgcagatgtgtacctcctagatgatcctttcagcgcggtcgatgcgcacaccgctgcggttctgttctatgtaagagcactttcagagaagactgtagttcttgtgactcaccaggttgaatttctcaccgagactgatcggattctgccatatcaaagggtatcaaagatccttcagatgaatgatctgccattgtttcaacaggtaatggaagatggttatgtcaaacaacaaggtgtttacgcagagctaatggaatccgggacagcatttgagaagcttgtctcagctcacaagtcctcaatcacagcattggatgattccagccagcaaagccaagtccaggagcaaaatgtgactgatgaaaatacatcaggacaaccttctgcaaaatacatcagtgatattgattcaatctctgcaaaaggccaaccttctgcaacccagctcacagaagaggaagaaaaggagattggagaccttggatggaagccatataaggactacatcaatgtgtccaagggaatcacacatctctgtgtgatgggtgttactcaggtgctcttcacatccttccagatgatggccacattctggctggcagtggctgtccagatgaacgtcagtagtgctctcctggtaggggcatattcagggctgtccatcttgagctgctgctttgcctatatcagaaccctttatgcagctaagttggggctcaaggcctccaaagcattctttaccggcctaatggattctgtgttcaaggcccccatgtctttctttgattcaacaccggttggaagaatcttgacaagggcatcttcagatttaagcatcctggactttgacataccttactccgtggcttatgtcgtcgttggcgctacaagagatctagcaagaatcaatggaacaacaaaggcaccagtcatgaactatgcggcggaatcaattcttgctgtggtgaccatcaggtcttttggggaaacagacaggttcatccgcaataacctacttcttatcgataccgacgcgacattgttcttccacacagttgcggcgcaagagtgggttctcataagagtagaagcactgcagagcctgacactactaacagcagcactgctccttgttttggctcctccaggagcagtctcaccaggctttgcgggtctcagcctctccttkgctttgtcgctgacagcagttcaggttttcctgacaaagttctactcctacatggaaaactatattatttcagttgagagaataaagcagtatatgcaccttccaccagagcctccagccattataccagagaatagggctccaagttcatggccacaggagggacaaattgacctgcaagatctcaaggtcagataccgcccaaacatgcctcttgtcctcaaaggaatcacttgcacatttcctgctggaaacaaaattggggttgtagggagaacgggaagtgggaaatcgacactcatcagctcattgttccgcctcgttgatcctgcgggtgggaggatactcattgacaacttggatatcagctctattggtctcaaggatctaagaacaaaactgagcattatcccccaagaacctacacttttcagaggaactgtgcgcaacaacttggatcctcttggtctgcattccgatgaagagatatgggaggccttggagaagtgtcaactacagacagccattcgcagcacacctgctcttcttgatacagtagagggtcatcaggcagcaattctcaagttgcactgtggtaactatcgctcacaggttccaactgtaacagacagtgacaaggtcatggtactttcatatgggaagcttatagaatatgacacgcccgccaagttgttggaagataaacaaacagcctttgctaaacttgtggctgaatattgggctaattccaagcggaatgcaacatga

SEQ ID NO: 3914 - DNA, 762 bp, Oryza sativa
atggccgccaccgcactccaactcccagtggccagctcgcaacgtctgacgctgaggcgtttccccggcagcggctcgttgggtcggtactctgggttgcggtggcccgtcgcggcgcaggcgaggagggcggcggaggaggggtttcgtctccgtgtcgcgttcaacccctccgggaacttcgacctctccctctccaccgaccaagacgatgccccacaagttgagcctccaccaccacctacagaaggtcgctttgagattgtcatcaacaccgatatcatccggacgctcgacctttcgcctgttcatgaagtacttggtgacttgaattccctgacaccagctcaaacaagaaatctcttggatcgaacggtcgggtttactataaactatgagagggaggatccatatgatgtgagggagctgtcagagttccctgatataaggctatggtttgtgaggcttgatgcttgttacccttggttccctgttgtgcttgattggagagctggtgaacttgccagatatgccgcaatgctggcccctcaccagatgagcatgaggcttggtgtggtcttcaacccggaggcgctggagctgtttgtgatgaagaaggtgttcattgtttactcatggctaaagcagcaggaacatcctaaacctggactcaagacggctgacatggccaggatgcttggtttcggtataggagatgaattattcgacttgattgagaagtatcctgctggtccttcatga

SEQ ID NO: 3915 - DNA, 1437 bp, Oryza sativa
atgggggagcctgggggcgccgaggcggccgtctccgcgaggctgctcgagctggcggccgacgacaaacgcggcggggctcggggagctcctcgcggcgtggccctccctcgccgacgagcccgcgccgtggtaacaccccggcgcgggcccacggagaccgctgatccccgctacatggcctccgasgayttcaggatgtactcgttcaaggtgcscscctgctcscgggcctactcccatgactggacggagtgccccttcgtccaccccggcgagaamgcgcggcggcgcgacccgaggaagtaccactacagctgcgtgccgtgcccggagttcaagaagggggccgggtgcaggagaggggacatgtgcgagtacgcgcacggggtgttcgagagctggctccacccggsgcagtaccggamgsgcctctgcaaggacggcgtcggctgcgcccgccgcgtctgcttcttcgcccacacgcccgacgagctccgcccgctctacgtctccacgggctccgccgtgccgtcgccgcgcggggcgttggagatggcggcggcggcggcggcgatggggatggggctgtcgtcgccggggtcgtcgtcgttcacgccgccgctatcgccgtcggccggcgggggcgggggcgggggcgggggcagcggcggwcggcggmgcgtggccgcagcagccgagcgtgcccgcgctctgcctgcccgggagcgccggaacctccacctgagccggctgcgcacgtcgctgagcgcgcgcgacatggccgtcgacgagctgctcgccgcggcggcggckgcggcggactacgacggcctcgtcgcctyccccgcctccatccggtccgcgagggggaaggcgcttgtgccgtcaaatctcgacgagctcttctccgctgagctcgccgccgccgcggcttcgcgctcgccgcgctacgccgacaaggcggcgccgcagccggtctccccaatgagctcccgcctcctsgccgcgctggcgcagcgggagaagatgcagcagcagacgctgcggagcatgagctcacgggacctcggcaacgccgcgtcgctgctggtcggctcgccggtgagctcgagcatgtccaaatgggggttcccctccggcaacccggactggggcgccgacgacgaggagctcggccgcctcaagcgttgctcctcgttcgagctccggtccggagccgccaatggcaaccatgagcctgacctctcatgggtcaacaccctagtgaaggagccgacaccggagaagatgatgacgacgacatcggcaatggattccattggcatcttgggacagaacacaagccgtgatcacatcgtcggaggcgaggatgacactgccggagtcatcagcagctggcttgaacagctccagctcgatgagatggttgtctag

SEQ ID NO: 3916 - DNA, 1074 bp, Oryza sativa
atggggcgttcaccatgctgtgagaagattggcctgaagaaaggtccatggacaccagaggaagaccagaagctgcttgcatacattgaggagcatggacatggcagctggcgagcattgccttcaaaagccggtttgcagaggtgcggcaagagttgcaggttgcgatggacaaactacctgagaccagacatcaagagaggaaaattcagcttacaagaagagcagaccatcatccaacttcatgctcttcttggaaacaggtggtctgccattgcaacacatctaccaaagcgcactgacaatgagatcaagaactattggaacacccacctgaaaaagaggttggccaagatgggaattgatcctgtcacccacaaagccatcaacggcactctgaacaacacggcgggagacaaatcagccaaagtcacagccagtctcagccacatggctcagtgggagagtgcccgcctcgaggccgaggcacggcttgctcgagaatccaagatgcgcatagcagcttctacaccaagcaaactccatgcacagtcaaccaacccacctgcttcaacaccttctccatgcttcgatgtgttgaatgcatggcagagtgcaaagatagacctggagtcacccacctccacactgacgttcgcagggagtaatgctagcatgctgccattctcaacaacaaccgccctagaattatccgaaagcaactccaatgtgtggcagcaaagaagcgatgaactggagggtgaagaaagtgagtggaagtttgtcagtaagcaacaactgcagggaatgcatggtaaagagacagaagaacacttcattggctgtgaggagtcatggttcccagggacagccaatatcggagcaggcttcacaggcatgctgcttgatggatccaatatgcatgatacatcagaatgctgggatgagtccagcaatggccaagatgagcaaagaagccaggtgtcagaagatgcagagaataagaactattggaatggcatcttcagtatggtgaattcagagcagccacccctgcagccacctttgctctag

SEQ ID NO: 3917 - DNA, 1416 bp, Oryza sativa
atgggttcttgcgtgtcgacgacgaggcggcggcggaggtcgaggaagctgtcggtggcggcgaggaagttccgccggaaggtgtccgcggcgatcgccgacgcgcccatcgcccgctccggcggcggcggcggcgccggcggcgaggtggcggcggcgaactgcttcgcgcgccacgaggtcgtccacgtcgaggcgcccgtgtccaacgtgacgyttcacctcacgcagctgcagtggcagcacagccagatggacgcaggcagtgtgatctgtgaagaagcgtggtacgactccgtcagcatcctcgactcggccgactccgaagacgacgatctcgacaacgacttcgccagcgtcagtggagatcctctcccggatgtcaccgcgacggcgacgtcgacgtcgacgagcttgctcgacgccgtgcatcgcctgaggagcatcgcgagcgcagaggcatgccaggatgatgatcctcccgggaaagctgaagaatcaaacgctgctgctgctgctgacgagtgctgcagcagcagcggcggtggcctgaaggaatcggcggcgagctcgacgcggccgccattcccgccgtcgattccgagcaacaagatccagccgatgccgatcgtcagcgtcagcccgcacagccagaagaagaaatccgccgtcgtcaggctctccttcaggaggagatcatacgagggtgacgagatgactgaaatgagtggctctacgaactatctgtaccgtccaagagccggttcatcgttgccgtgctcgaccggcgaaaaactgtcagatggttgttggtcagctattgagccgtcagtgttcagagtccgaggggagagtttcttcaaagacaagaggaaatccccagctccgaactgctcaccatacatcccaattggagcagacatgtttgcctgcacaaggaagataaatcacattgcgcagcatctcgctcttccatctctgaaggctcatgagaccttcccatcactcctcattgtgaacattcagatgcctacctatccagcaaccgtgtttggcgagaacgacggcgatgggataagcctagttctttatttcaagctatctgacagttttgacaaggaaatttctcctcaactaaaagaaagcatcaagaagcttatgggtgatgaaatggagagagttaaggggtttccggtagacagcaatgtgccctacactgagaggctgaaaattctggctggtttggtgaaccctgacgacttacagctcagtgcagctgagaggaagcttgtgcaaacctacaaccagaaaccggtgctgtctcgcccccagcacaaattcttcaaggggccaaactacttcgagatcgatctcgatgtccaccggtttcagcttcatttcaaggaaagggcttga

SEQ ID NO: 3918 - DNA, 1653 bp, Oryza sativa
atgtcgtctgctgccattgccattagcccgatggtggaagagtttgctctcctgcccatctgcttcgacggcagccggtcgccccactgtttgtccgggtcacagctgcaggattcgattatcatctttcttgctgtgcctggtgccccaccgatgccgatgagtgtgctcggctcggagtccatcgcctcggtcaagctgcgcattcagcggttcaaggggttcgtggttaacaagcagaggcttgtgcttgatgggcacgagctggcaaggaacaactgccatgtgaaggattatgggcttgccgatggaaatgttctgcaccttgttatccgcttggctgatcttcgcttgattaacatcgagactaccagtggaaagaagtttcagttccaggtggaccagagccgcaatgtcaagtatctcaagagtaagctggcagtggagggagatgaggaccttggtgaggatcacaagcttgaatgtgatggcaaggagcttgaggaccaccagctgattgctgatattagcaagaaggatgatgctgtggatccatttgttcatccgcaagccagcaaagagaaagagaaccttcaaaatgaagctcatgctgtgaaccctgctaaaccagctggtgctaggcctgctcttgttgaaccaattatcgttaaccacaaggtgaagctatcacttgaagtgatgagaatgattagctcagccatagctggtcttgagaatggatacttgccagtgatgtcagctgaaggttcagggggtgtttacttcatgcaagatgcatcaggagagaagaatattgcagtgtttaagcccagagatgaggaacctatggctaaaaacaacccaagagggcttccagtgtcgactgatggagaaggcatgaagagggggacacttgtaggggaaggtgcatttagggaagttgctgcttatattcttgaccatccaattggtgatcatgaatctgaagaacgtatcgggttctctggtgtgcctcccacagcattggtccggagcttacacagggggaagagcttcaagattggatcactgcagatgttcattcagaacaatggaagttgtgaggatatgggtccccgagcatttccagtgaaggaggtccacaaaatagcagtgttagatcttaggttagcaaacgctgatcgtcatgcagggaacattttagtgtgcaaggatgaagaaggtggcaattacaagttggttccaattgatcatggttactgcttgccagagaagtttgaagattgtacctttgagtggctgtactggccccaggctcgtgaaccattcagtgatgaaaccattgcatacatcaaatcactagacgctgaagaggacatcaagcttctcaagttccatgggtgggagctgtctgcaagatgtgctcgtgtcctgtgcatcagcaccatgcttttaaagaaaggtgcagcacgaggcctcacaccgtatgacatcgggcgtatactgtgcagggaaactgtgaatagagactctgagattgaggacatcgtccaggaagccgagggccatgttctcccagggtcaagtgaagtaatcttcttagaaaccgtatctgaaatcatagaccgtcacctcgacaagaagttcgcttag

SEQ ID NO: 3919 - DNA, 1527 bp, Oryza sativa
atggaattctcctcgagttcaacgtctctcttcctcctcctctctatcctgcctctcctctactttctttgccagcgccacgaccccaagaagcagcctcacgcccatgggctcaagtcctaccccgtcgtcggcacactgccgcacttcgccaagaacaaggatcgcttccttgagtttataaccgaaatcatgaagcggagccccacgcacaccttgtcgttcaaggcgctcggcctcaccggcggcgtcatcaccgccaacccggccaatgtcgagtatacgctgaagactaactttggtaactaccccaagggcgagctcgccgtgtccatgctcgtcgacttcctcggccatggcatcttcaactccgacggcgagcagtggcagtggcagcggaaggccgccagctacgagttcaacaagcgctcgctgaggaacttcgtggtggacaccgtcaggtccgaggtcgtcgagaggctgctgccgctgctggagcgggcggagcgcgacggccggacgctggacgtgcaggacgtgctggagcgcttcgcgttcgacaacatctgccatgtcgccttcgacgaggacccggcgtgcctcgccgaggacagcatggcctcgccccagagcgcgaagttcatgcgcgcgttcagtgacgcgcagaatgccgtgatggaccggttcatgtcgccggtcaagtcgcggtggcgcttcaagaggctgttcaacatggagcccgagaggcagatgcgggaggcgctcgccacgatccacggcttcgccgagcggatcgtccgggagcgcagggagagaggggaggccgggctggcgcgcagtgacgacttcctgtcgcgcttcgccgcgagcggcgatcacagcgacgagagcctccgtgacgtggtgaccaacttcctcatcgccgggcgcgacacgacgtcgacggcgttgacctggttcttctggctactgtccggccggcccgacgtggaggacaagatcgtacgcgagatccacgcagtgcggcgcgcttccggtggcacaggcgacccgacgttcaacttggacgagctgcgtgacatgcaatacctccatgccgccatcaccgagtccatgcggctgtacccacccgtggccatggactcgcacagctgcaaggaggacgacttcctgccggacggcacgttcgtggggaaagggtggtttgtgtcctacagcgcgtacgcgatggcacgggtggaggacatctggggcgcggactgtgaggagttcaggccagagcggtggctagacgaggccggcgcgttccggccggagagcccgttcaagtacccggttttccacgcggggccgaggatgtgcctcggcaaggagatggcctacatacagatgaagtccattgtagcatctgtgcttgagaggttcagtctccggtatgccggtggcgagggacacccggggttcgtgctctggttgacgttgcgcatgaagggcggtttaccgatgcaagtgaccactagaggttga

SEQ ID NO: 3920 - DNA, 1212 bp, Oryza sativa
atgcccgggttcaggttccacccgacggaggaggagctgatcgagttctacctccggcggaaggtggagggcaagcgcttcaacgtcgagctcatcaccttcctcgacctctaccgctacgacccctgggagctccccggaattgagcatctaattaacaagctcgatgggggtgcagcaatggcggcgataggggagaaggagtggttcttctacgtgcctcgggacaggaagtacaggaacggggaccggccgaaccgggtgacggcgtcggggtactggaaggcgacgggggccgaccggatgatccgagccgagaacaaccgccccatcgggctcaagaagacgcttgtcttctactccggcaaggcccccaagggcgtccgcagcagctggatcatgaacgagtatcgccttccccccgccgacaccgaccgctaccacaagactgaaatctcactatgccgcgtgtacaagcgcaccggcatcgacgacggccatggccaggtatccacggcgcggtcgtcggcgcactcccgcggcggcggcgcggcaccggtacaggacaacaagcaaggctcctcgtcgacgtccacgccgacgccgcctccaactccgtccaagctccacctcctcagcagcgagtgcacgtcgccgcccgccatcgtcacggaccacgccgccatggtggcgcacaaggcaccgtcgccgcggcaccatcagcagcagcagcagctccacgctgccaagccttgcggcggctacctgcagaattcctcgatggcttccgctgccggcggcgatcagcagcagcaatttcagcaagacttcgcggcggcattgtaccagcagtactccaagaacacgagcggtgccttcgcctccacgtactcgctgctcaacctcgtcaacgcggcatccatgggcagctccgccgctgccattgatgagctgagctcgctggtgggccacggcacgccgtcctacattaaccccgcggccggcagccacaactatagtcaattccttcacctgcctacgacgccgtcgtcgcatcaaccaacgccggcgccgctcgggacgacgacggcggcagcggcggcgacgctgccgatgtcgctcgccgccttctccgacaggatctgggactggaataatccgatccccgaggccggaggtagggattacagcaccagtactggattcaagtga

SEQ ID NO: 3921 - DNA, 1820 bp, Oryza sativa
atggagagagagaccgatccgtgcgccatctgcctcggcgagatcgccggcgggcaggccatcttcacggcggagtgctcccacaccttccacaaccgctgcatcgcccggaacgtcgcgcacggccgccgcgtctgcccgctctgcaacgcgcgctggagcgacgtgccggcgctgtcctcgtcgtcggccgcggcggtggagcctgatgacgacgacgagcctcccctgtacgccgacgacgatccggtggagccggccggcgagcaggcggcggcgactgacggcgatgccgcggctggattggtggtcaaggcgcactgcgagtacccggccgtggcgaggggcgcgtcccgggacaagttcgccgtgctcgtgcacgccaaggcggccggggccgcggcggcggcggcgtcgcgcgcgccgctcgacctcgtgacggtgctcgacgtgagcgggagcatggcggggaggaagctggcgttggtgaagaaggccatggggttcgtcatcgacaacctcggccccgccgaccgcctctgcgtcgtctccttctcgactgaggcgagccgccggacgcggctcctccgcatgtcggaggtcgggaaggccacggcgaagcgcgccgtcgagtccctcgtcgatgactccgccacgaacatcggcgacggcctccgcgtggccggccgcgttctcggcgaccgccggcacaagaacgccgtctcgagcgtcatcctcctgtccgacgggaaggactcgtacgtcgtcccgaggcgcggcaatggcatgagttacatggacctcgtgccgccttcgttcgcgtcttccggcggccgcggccagctcgcgccgatccacacgttcggcttcggcgccgaccacgacgcggcggcgatgaacaccatcgcggagtcgacgggcggcacgttctccttcgtcgagaacgaggcggccatccaggactcgttcgcgcagtgcatcggagggctcctttccgtcgccgtgcaggacgcgcgcatcgccgtggcgtgctcgagcccgggcgtgctcgtccgggagatcaagtcggggcgctacgagagccgcgtcgacgcggacggccgcgccgcgtcggtcgaagtcggcgagctctacgccgacgaggagcggcgcttcctcctgttcatcaacgtgccgatcgccgaagccacggaggacgccacccagctgatcaagctcagctgcacgtaccgcgacacggtgaccgggcgaaccatcgaagttgccgccggcgaggacgccgtcgtgaggcggcccctggaagtgtccgcggcggaccaggaggtgtccatggaggtggaacgggagcgcgtgcgcgtggaggcaaccgaggacatcgcgatcgcgcgggcggcggccgagcgcggcgaccacgccgaggcggcgcggacgctccagcttcgccgggaggcggtggaggcgtcggcgccggggttcgccggcgacgtgatgtgcgacgagctggcggacgacctgtgcgagctcgaggaggaggtggaggacgcgccgcggtacgagcgcgccggccgcgcgcgcatgctcgccggcatgagctcgcacggactgcagcgcgcgtcggggacgacgtacaactcctccagaaggaagcaatgcgcacgcaaggagagggcgaaggagaggttatacgcgacgccggcaatggggatgatggtctccaagtcgcgcgacgagccgccgccggcagcgcagcggcagcagaaggggccaggccgcggcggcgacgagcagtcggagaagaagaagaagaagagtggagactg

SEQ ID NO: 3922 - DNA, 1086 bp, Oryza sativa
atggcgtcggagctgacctaccgcggcggcggcggcgcgacgctggccggcgaggcggaggcggcgccggcggtgagccggcggcagcagcagctgccggcgaggcagttcgtgggcgggaaggtgccgctggggctgaagcggaaggggctccgggtgctggtgaccggcggcgccgggttcgtggggagccacctggtggaccggctggtggagcgcggcgacagcgtgatcgtggtggacaacctgttcacggggcggaaggagaacgtggtgcaccacttcggcaacccaaacttcgagatgatccgccacgacgtcgtcgagcccatcctcctcgaggtcgaccagatctaccacctcgcctgccccgcttcccccgttcactacaaatggcacaagaccaatgtggttgggactctcaacatgctcggattggcgaagaggatcaatgccaggttcctcctcaccagcaccagtgaggtctacggtgatcccctgcagcatcctcaagtggagacttactggggcaatgtcaaccccattggtgtgaggagttgttacgatgagggcaagcgcacagctgaaactttgaccatggactatcaccgtggtgccaaccttgaggttaggatcgctcgtatcttcaacacatatggccctcgcatgtgcatcgatgatggccgtgttgctttgaggaaggagcctttgacggtttacggtgatggcaagcagaccaggagtttccaatatgtctctgatctggttgagggattgatgaggctcatggaaggtgagcacgtagggccattcaacctgggtaaccctggtgagttcaccatgctggagctggccaaggttgtccagsacaccatcgaccctaacgcaaagatcgagttccgtcccaacacccaggacgacccgcacaagcgcaagcctgacatcggccgtgccaaggagctccttgggtgggagccaaagatccctctccacaagggtcttcccctcatggtcaccgacttccgcaagcgcattttcggtgaccaagacagcaccgccacaaccaccggaggccaacaagggtag

SEQ ID NO: 3923 - DNA, 654 bp, Oryza sativa
atggtgggggacattgtgatactggcagcatgtggggtcgagctggccacggcgggttacggcgtgttcggcatcgattatgaggggcatggcaagtccatgggtgccagatgctacatccagaagttcgagcatcttgtcgatgactgcgacagattcttcaaatcaatatgtgagctggaggagtacagagacaagagccggttcctgtacggggagtcgatgggcggcgcggttgcgctgctgctgcaccgcaaggacccaaccttctgggacggcgccgtcctcgtcgcgccgatgtgcaagggcttggcacttggcagcaatctgatggcatatatgatatcggagaaggtgaagccgcatccgttggtggtgacgctcctgacgcaggtggaggagatcatccccaagtggaagatcgtccccaccaaggacgtcatcgactctgccttcaaagaccccatcaagcgcgaaaagatcaggaagaacaagctgatctaccaggacaagcccaggctgaagacggcgctggagctgctgcgaaccagcatcagcgtcgagcaaagcttgtcacaggtgagcatgccgttcttcatcctgcacggcgaggccgacaaggtgacggacccggaggtgagccgtgcgctgtam

SEQ ID NO: 3924 - DNA, 894 bp, Oryza sativa
atggcgccggcggagaagcagcgcgccgggccggcgagcccgctcgggtacggctgccggagcatcgggttcaacggcgacgtcggcgagctggagtacctgctcctccacgccaaccccgccgccgtcgcgcaccgggccaggaccatcgacgccatggacccctctcgcttcagtgagatatgcttacatatttctgcatctgagtactgctcaggggtgatgcaacgaagcatcagtgctattgtgaatgagtacattgaagccatgaagaagctcgcatgtgagatcctggacctgttaggagaggggctaggtctcaaggaccccagatacttcagcaagcttaccacaaacgctgacagtgactgcctcctgaggatcaaccactaccctccatcatgcaacattcacaaacttgaccatgatgaccaatgcaatatcaagagccttgttagcaccaaggctagcaatggtgggaatctgatggcaggtgggcgcattgggttcggcgagcactctgacccgcagatccttagcttgctccgagcaaacgatgtggaagggctacaggtgtttgtgccggaccacgagggcaaggagatgtgggttcaggctctgacaaatgggaggctgataagtatccggcacagggtaattgcaaccgcctgcaggccaaggctgtccacaatatacttcgcatcaccacccctgcatgcacgaatctcggcactcccagagacaatcacagccagcagcccacgccgataccgatcattcacctgggctgagtacaagacgacaatgtactcactccgcctgagccacagccgcctagaactcttcaaaattgacgatgatgacagcgacaatgccagtgagggaaaagcatag

SEQ ID NO: 3925 - DNA, 3168 bp, Oryza sativa
atggctctgctttggaaggtgcgagagttcatggttggcgctgggatttccccggatgtgtatacgtactcgactctgatcgaagcctactgcaaggtccgggaatttgatactgccaagaaggtgcttgtggaaatgcgtgagagggggtgcggcctgaacaccgtaacctacaatgtgctgattgctgggttatgcaggtctggggctgtcgaagaggcgtttgggttcaagaaggacatggaggattatggactagttcctgacgggtttacctatggcgcactcattaatggactgtgcaagagccgtaggtcaaatgaggcgaaggcattgttggacgagatgtcttgtgctgagctaaagcctaatgtcgtagtttatgccaatctgattgatgggtttatgagggagggcaatgcagatgaggcgtttaagatgataaaggagatggttgctgctggtgtgcagccaaacaaaattacctatgacaatcttgttcggggactatgtaagatggggcagatggacagggcttctctacttttgaagcaaatggtcagagatagccataggcctgataccatcacgtacaatctcattattgaaggacatttccgtcatcatagcaaaaaggatgcttttcggcttcttagtgaaatggagaatgctggtatttcccctaatgtatatacttatagcataatgattcatgggctatgccaaagtggtgaaccagaaaaggcaagtgatctccttgaggaaatgactacaaaaggattgaagcctaatgcatttgtttatgcgcctcttatctcagggtactgtagagaaggtaatgtttcattggcatgtgaaatttttgataagatgacaaaggtgaatgtactccctgatttgtactgctacaattctcttatatttggactatctaaggtgggaagggtggaggaatctacaaagtactttgctcagatgcaggagagaggattgctgccaaatgaattcacatacagtggcctcattcatgggtatctaaagaatggtgatctagaaagtgctgaacagttagtgcagcggatgcttgacactggactaaaaccaaatgatgttatctacattgatctcctagaaagctactttaagtcagatgatattgaaaaggtgtcctctactttcaagtccatgttagaccagggagttatgcttgacaaccgtatctatggaatcttgattcataatctgtccagttctggaaatatggaagcagcatttagggttctttcagggattgagaagaatggatctgttccggatgtgcatgtgtacagctcgttgatatcaggtctttgcaagacagctgacagggaaaaagcttttggtattcttgatgaaatgtctaagaagggagtagatcctaatattgtatgctataatgccctaattgatgggctgtgcaagtctggtgatatttcttatgcccgcaatgtcttcaatagcatattagctaagggattagtgccaaactgtgtgacatacacaagtttgattgatggaagctgcaaagttggtgacatcagcaatgcattctatctttataatgaaatgctagcaacaggtataacaccagatgcttttgtctatagtgtacttaccactggctgctctagtgctggtgaccttgagcaggcaatgtttctgattgaggaaatgtttcttaggggacatgcaagtatttcttctttcaataatttagttgatggtttctgcaaacgtggaaagatgcaggaaactttgaagttgttgcatgtgataatgggcaggggcctagtacctaatgccctgactattgaaaacatcatcagtggacttagtgaggctggaaaactcagtgaagtgcacacaatttttgttgagttgcagcagaaaacttcagaaagcgctgcccgccacttttcctcattgtttatggacatgataaatcaaggaaaaattcctcttgatgtggttgatgacatgattcgagatcattgtaaagaaggaaatctggacaaggctttaatgctgcgagatgttattgttgcgaaaagtgcaccaatgggctgctcgtcctatcttgctatagtggacaatctatgccggaagggaaaattaagtgaagcgttgaatttgctgaaagaaatggacaagagagggaaccttcagccaactttggttgctctgcttggcatcttctggttcaggaggcatcatcatatattgaacaagcttggtggcttgtacatatggacgcatacgtacagtcttatgaagaagaagagaggtcaaatgtatcaccagcctaacagcattcagggcctggacgacagcaatgaagaacatcatgctaagaaattcaaagcaaatggtgaagctgcttgcgccgatgaggaggcaactcttctggtgtcagctaaactggctgaacacaacgaggagaaccaaatggaagctccattgctgtctggagagagtgagattgctaagaaaggctcgtggacaacaacaaacttgaaggacaccatccaccatgttgtcgaggagctgatggcaccaccaactctatctgcgatacttggatttgtttttgggctagttccatggttgaaatctcttgtcatcggtgatggcgcccctctcagagtcatccaggactccatccaactgatgggaaatggcacgattccttgcgtctccctcatccttggtggcaatctgataaaagggctaaggaagttggagttcaagcatacggtgatcattgcgatcgtctgcatccgctacatgatccttcctctagtggggattgcagtagttcatggtgcatactgggtcggattcttgccacacgacccgctgtaccgctacgtgctgatgatgcagttcgcgctgccacctgcaatgactattggaaccatggctcaactgtttgatgttgcccaggaggaatgctcagtgatatttctgtggacttacctggtttcttccatttctctcaccacctggtccatgatattcatgtccatcccgtctttaggtcaaagtgcaatgatttcagcatttcagctaactcaaagggaggaggttgaagacaataatacgcctctagaaaagagtcgatccaactga

SEQ ID NO: 3926 - DNA, 2580 bp, Oryza sativa
atggaagtgggtatggctggattcctgtgtggtgctgggtccctcaattctgaaggaaaccttacctgcatggaagagggagacccccagcccagcatctccttggcacgcactccgtcggaaggcgcggcggcggcagtcgacttggatctccttgagcagcttctctcagccgacaacgcctggcttgaagtggcagcaaacacttcacgctcacccaacttctttgctaccccctccaactgcttgacagatgcttcggtcgccaccaccacacctgcaaattcatggtggattcagccgagcggtgcaagcacctcagttcgggaacggtttgaccaagctctagcttacatcagggagacacagagcgacgccgatgtgcttgtgcagctctgggtgccagtcaagggcaacgatggtcagctggtgttgacgacgagcgggcagccattcactctcgatcagaggtccaatagcctcatacagttcagggaggtttcgacaaagtaccagttctctgcagatgttgcttcaggttcctcacctgggctaccagggagggtgttcatcggtaggcttcctgaatggtcaccagacgttcgatacttcaccagctatgagtaccctaggatcaaccatgcacaatatttggatgtccacgggacgatggggctgccggtgtttgagagggggaactactcatgcttaggtgtcatcgagttgatcatgaccaagcagaagctcaacttcacctccgagctcaataccatttgcagtgctctccaggcagttaacctgacaagcacagaagtttcaagcattccgcgcgcaaagcttaacagtgcttcctacaaagatgctttaccagagatactagaagtcctgagagcagcctgcatcacccacaagctaccattagctcagacctgggtcacatgtgctcaacaaggaaagcggggcagtcgccattctgacgagaactacaagtactgcatttccaccattgatgcagcatgctatgtgaatgaaccccggatgcagagcttccacgaggcctgctccgaacaccacctgctacgggggcagggggttgcagggaaagccttcaccacaaaccagccatgcttcctaccagatattggatcctccactaaactggagtacccattgtctcaccatgctaagattttcaatttaaaaggtgcagtggcaatccgattgcgttgcacgcgcacagggattgccgactttgtgctagagttctttctgccaactgactgtgaagtacttgaggagcagaaggcagtgctggactcattatcaggcaccatgagaagtgtttgccaaactttacgtgttgttactgacaaggagatggaggatgaggccatgagagaaatgaatgagctgaactcatttagtcctcggggcaagaacaaagttgaggagttatcctttggagacaacacaagaggggatagagaggaggcatcttggacaaccttagtagggacttcacagaaaggatcagatttagctgaattgcatacacatggaatgttatcacatggagggcatggttcatctcaagctggtgatcaaacaagtaaagaaggtagcaaagtgaaaaggcgtacaaagacggagaagaccgtgagcttgcaggtccttcggcagtactttgctgggagcctgaaggatgcagcaaagagccttggaggtcaaccttcacatgcaccttatagtcagaatgtgagcattgttatcaccctattttttcgtgattcgtgctattgcatgaaggtacaagtgtgcccaaccaccctgaaaagaatatgcaggcagcatggcataaaccgctggccatcacggaagataaagaaagtagaccattctctaaggaaactgcagcaaatcattgattcagttcatggagcagagacagctttccagcttaacaccctctacaaggacctcacaaacacctctgtatcatctggacaacaatttgtcaggaaccaaagttccgattcaagcccttcctgcagtggaggagcaacaaaacattcaccccaggttggagctgatcaggtgaggtcaggatgtcttccacaacatagccctgtccagactctgcaaacagaagctgcttcaataaatgaacatttctcaggtcaggaagcaccaatagatctcttacaggatgttgctgaaaaggcaaatggtgaacagcacatgtctcaaagtccatcatcccccaagcagactgcaaatgtaggtatgagagtaaaggtcacttttggctcagaaaaggtgaggttcagattgaaacctgagtgtgactttcaagaactgaagcaggagatatcaaaacgtctgagtatagcagacatgaattccttgattgtaaagtatttggatgacgattcagaatgggtcttgatgacatgtgatgcagatttacacgagtgttttcatgtttataaactagcagatatccaaacaatcaagatttcagttcatctggctgctagtccaacaacaaggatcaccattggtcacactggtttctcatga

SEQ ID NO: 3927 - DNA, 1086 bp, Oryza sativa
atgctggccgtgccggagaacctggacgcgacgatgcggctgctgttcgcggcgtgccagggggacgtggccggggtggaggagctgctcagggacggggtggacgtcgacagcattgacctcgacgggcgcacggcgatgcacatcgccgcctgcgaggggcagggggaggtggtscgcctgctgctcagctggaaggccaacatgaacgcccgcgaccgctggggcagcacgccagcggcagacgcgaagcattacgggcactttgaagtttacaaccttctgagagcaagaggagcaaaaactccgggtcactatgttgccaggtggtatggatccaaagtgtttgttaagatacttgacaaagacagcttctcagacgccaatagcataaatgaatttaaacacgagcttactttactggagaaggcccgccatccaaatttggtccaatttgtgggagctgttacacaaaatgtaccaatgatgattgtttcagagtatcatcaaaagggtgatttagccagttatcttgaaacaaaaggtcgcttgcagccttacaaagctatcagattttcccttgacattgcgaggggattaaattatctccacgagtgcaagccagagccaatcatccatggcaatctgtcaacaaaaagcattgtgcgggatgatgaagggaaacttaaagtggcaggctttggctcacgtagtctgattaaagtctcagaagataatccacaaatggatcagacgacatcaaaatttaacagtgtatacaccgctcctgagatgtacagaaatggaacgtttgacagaagtgtagatgtatttgcatttggtctcattctttatgagatgattgaaggaactcatgctttccacccaaaaccaccggaggaggcggcgaaaatgatttgtttggagggtatgagaccaccgttcaagaacaaacccaaatactatcctgatgatttgagagagcttatacaggagtgctgggatccaacaccttcggtcaggccgacgttcgaagagataatcgagggcaagcagataatgaagtacatgaggaatataccttag

SEQ ID NO: 3928 - DNA, 4848 bp, Oryza sativa
atggcgggcgccgcgggagggttcgtcacgcgggccttcgaggccatgctcaaggagtgcacagccaaccgcggcaagttcgccgcgctgcagcaatccatccagtcctacctcgatgccatcaagggggcggcggcggcgggacaggaggagggcggcgacgcggcggcggcgcccatcacgcaggtgctggcgtcggcggggcgcgtgctggaggggactcaggccgagctggtgctgcagccgctccgcctcgccttcgagaccaagcacgtcaagctcgtcgagcccgcgctcgactgcctccataaacttatggcttatgaccatctagaaggcgaccctggtttagagggtggtaaaaattcccctctatttactgacatcctgaacatggtctgcggttgtgttgataacacctcctctgacagcactgttctccaagtcttgaaagtgcttctcaatgctgttgcttcaaatagatttagagaaattgcagttgtcttttacaaaaatcctgtttctgtaccacctgccagctctgcaatgaaagaagaaccatcatctagcacagaggaatcagagaatggtgaagtatccactggtaaccaagctgatgaaaaaattactcttggagatgcgctatccttgaatcgagctacagaagcatctccagcatctgttgaagagcttcagagtcttgcaggaggagctgatattaaggggttggaggctgttcttgacaaggctgttgaacttgaggatggaaagaaagtatcaggtggaatagacctggacactgtgaacataatacagcgtgatgcactattgctcttccggactctctgcaagatgagcatgaaggaagagagtgatgaggttgctacaaagacaaggctgctatcactcgaactgttacagggattgctagaaggagtcagtgattcatttaccaaaaatttccacttcatcgattcagttaaagcctatctttcctatgctattctgcgagcggctgtgtcttcatctgcggttgtttttcagtacgcttgtgggatatttgcagttctattgcttcgttttcgagagagtctgaagggtgagatcggtgtcttctttcctctgatagttttaaggtctctcgatagctctgacagtccactcagccaaagggccagtgtccttaggatgctggagaaagtctgcaaggattcacaaatgcttgcagacatgtttgtaaattatgattgtgaccttgaggggccaaacctttttgaacgcatggtcagtgcactctcaaggattgcacaaggatctcaaaatgcggatacaaacactgccgcatcttctcaaacagtttctgtgaaaggctcatctcttcagtgtttggtgagtattttgaagtcattggttgattgggagcaagctcgaagagattccttgaaacaggggagtgttgccgaagcttgtgaaaatgattcttctgcaaggagcataacaagtgatgaaataaagagccaagaggatggtcgcaatcagtttgagatagctaaagctcataagtcaacaatggaggctgcaatctcagagttcaatcgcaaaccagcaagggggattgagtatttgttattaaataagttgatcgaaaataatgcaacatctgtagctcactttctcaagagcaattctagcttggataaggctatgattggtgaatatttgggacaacatgaggagttccctcttgctgtgatgcatgcttatgttgattcaatgaaattttcgggattgaagtttgatgctgcaattcgtgagttcttgaaagggtttcgccttcctggggaggcacaaaagattgatcgcataatggaaaagtttgctgagcggtactgtgctgataaccctggacttttcaaaaatgcagatactggcttatgttcttgcttatgctgttataatgttgaatacttgacgcccacaacccaatggaatgtgccccaaaggagctcttggaggaaatttatgattccatttgtccaggaagagataaagatgaaagacgatttccctgattcagcaaaaactaataaacccagacgagaaacagaagaaaggggtgttgtcaatatcctcaatttagctcttccaagactgaagtcagcaagtgataccaaagcagaaagtgagaaaatcattaagcagactcaagcacttttcaaaaatcagggacagaagagaggtgtttttcatgttgctcagcaggtcgagcttgttaggccaatgcttgaagctgtaggatggcctttgcttgcaacattttcctgttaccatggaggaaggtttacatttttgcatgctcctaaggaaatgcgtagtaaaaatgttgaggctttacggaccctccttggcttagctgacacagatatggatgctttgcaagatacttggaatgctgttttagaatgtgtctccaggcttgaatatatcacttcaaatccttcaattgctgcaactgttatgcagggatcaaatcaaatatcgagagaatctgttgtccagtcactgaaagagttgtctgggaagcctgctgaacaagtctttgtaaacagtgtaaaactaccaagtgattccattgttgaattcttcactgctctttgtggtgtttctgcagaagaactgaaacagacacctgctcgtgtctttagcttacaaaagcttgtcgagataagctactataatatggctcggatacgtttggtgtgggcgagaatatggtctgtcttgtcacagcattttattgccgctgggagccaccacgaggagaaagttgccatgtatgcaattgactcattgaggcagcttggtatgaagtacttggaacgtgcagaattgaacaaattcacatttcagaatgacatattgaagccttttgttattttaatgagaaatagtcacagtgaaaaaatccgtggtctaattgttgattgcattgttcagttgatcaaatcaaaagttggcagcataaagtcaggttggcgttgtgtgttcatgatattcaccgcggcagctgatgatgagaatgaacatattgttgaaagtgcttttgaaaatgtagaacaagttatcttggagcattttgatcaagttgttggtgattgcttcatggactgcgtcaactgtcttattggtttcgcaaataataaatgcacacctcgaattagtttaaaggctatcgctctcctacgcatatgtgaagaccgtttggcagagggttgcattcctggtggtgctgttaaacctgttgatgatgttccagaggcccattttgatgttactgagcattattggtttcctatgctagctggcctatcagatttaactttagaccccagaccagaagttagacactgtgcacttgaagtgttgtttgatcttctgaatgagagaggtcataaattctcctcacctttttgggagagcatttttcatcgtgtattatttcccatatttgatcatgtaaggcatgctggaagggatggcctttcttctggggatgactggcttcgtgataccagcattcattctctgcagttaatctgcaaccttttcaatactttctacaaggaggtgtcatttatgcttccacctcttttgggcttgctgcttgagtgtgccaagaaaacagaccagactgttgtttcaattgctcttggagctttagttcatctcatagaggttggtggtcaccaattcagtgacagcgactgggaaacacttctaaagagcattagagatgcatcatacacaacccaacctctcgaactcctcaattcagtaggatttcagaaaccaaacaatcagcaatcactttcaagagaagcagagaccaacggtcttggtagtagttaccatgatagcagggaaggaggagcttcaataagtcatattgatgaacaggatggtcatcaggaaacaaatgcacagactagcctagacaattcagaaggtttgccatctccatcagggagagcacaacctgcagtttccccacggggtcagacctttggacaaagaattatggggaatatgatggacaatcttttggtcaggagtcttacttccaaatcaaaaggtcgtacagacgatattgtgccaccctcacctgtgaaggcacctgatgctgacggggctgacaaaactgacgatgaagagaatcctatgatggagactgttaggagtaaatgtatcactcaattactgctacttggggccattgacagcatacagaagaggtactggagcaggctaaaaaccacacagcagactgcaataatggatattttgctatcactcctagaatttgcttcttcctataactcaacttcaaatcttcgaaccaggatgcaccatataccccccagaaaggaactagctggaactgctatctatttggagattcttcagaaatcaactgtggaacatgatgggaatgacccaagtgaggatacaaatgggcacgtcatagaatctgatgaacatgaaaagctcaagagcctcgcagaagggaagcttgtttcgttttgtgggcagatcttgaaagatgcttctgatctccagccaagcactggggaagctgcaagtgcagacatacaccgtgtactggacctaagagcaccagttattgtcaaggttttgaatggaatgtgtatcatggacgctcagatattcaagaagcacatcagagagttctatccattaattacaaaacttatctgctgtgatcagatggatgttcgtggtgcccttggtgaccttttcagcaaacaacttaccccactcatgccctga

SEQ ID NO: 3929 - DNA, 960 bp, Oryza sativa
atggcggggcgctacgacagcaaccccttcgaggaggacgacgtgaaccctttctcggaacaagcgcgtggtaaggctggagggcagcccagctatggcggcggcgcgttctacatgccgaatccacggaatgtgccttctgtgtcgtcgaattcgcggctttcgcctcttccccctgagcccgcagcttttggggctacggtggatatccctcttgactcttccaaggacctgaagaatagggaaaaggagctgcaagctagggaagcggaattgaacaagagggagaaggagctaaaaaggagggaggaggctgcagcgcgagctggtattgtcattgaggagaaaaactggcctccatttctgccactcatccatcatgatatcaccaatgagataccgagtcaccttcaaagaatgcaatatgttgcatttgcatcatttcttggattggcttgctgtctcttctggaacgtcatagcagttacttcagcttgggtcaagggggaaggcgtgaagatatggttgctggcaatcatctacttcatctctggggttcctggtgcatatgttttatggtatcgacctctgtataatgctatgaggactgatagtgccttgaagtttggattgttcttcttggtttacctgttccatattcttttctgtgtattttctgctgtggctcctcctgttgtcttcgaggggaaatcattggcggggattttaccagcaattgatctcatcagcaagaatgctttggtggggatgcctaccgaaaaaactctttctgatcttgtcggtcaaatcttctactttgttggatttggattgttctgcgtcgaatcattgctcagcatctgggttatccagcaagtgtacatgtacttccgaggaagtggaaaagctgctgagatgaagcgtgatgcaactaggggtgctatgcgggcagctttttaa

SEQ ID NO: 3930 - DNA, 1656 bp, Oryza sativa
atggcggcagcaggggcaatgcccggtggccttctcctcacgttcctcctccttgctgtcgtcgcttccggcgcctacaatggcgccggcgagccgccggtcagccggagaagcttccccaaggggttcatcttcgggacagcctcgtcgtcgtatcaggttaagcttccacttcccttccactcctacagcaaagaaagcttccagttccatgcatatgtaactgtgcagaagaaattcagttctctcatgaacaaaaaggaaaaggagcaaaactacaaacagatttgtgcaacttttctccaccgagaatacgttggtacagattcacacagaaaggcaatgctactggagaaaatcgccgacagaagcaacggggatgtkgcttcggattcctaccatctctacaaggaagatgtgcgcctcatgaaggatatgggaatggatgcatacaggttctccatctcatggacaagaatccttccaaatggaagtctgaggggtggagtcaacaaagaaggcataaagtactacaataatttgatcaatgagctattatcgaaaggggtgcaaccgtttattacccttttccactgggactcacctcaggcgttggaagataaatataatggatttcttagccctaatatcataaatgactttaaggactatgctgaaatctgcttcaaggagtttggtgacagagtgaaaaattggatcaccttcaatgagccttggactttctgctctaatggctatgcaactggcctgtttgcaccaggccgttgttcgccctgggagaagggaaattgcagtgttggagattcaggaagggagccttacactgcatgccatcatcaactacttgcccacgcggaaactgttcggttgtacaaagcgaaatatcaggccttacaaaaagggaagattggaataactctggtctcgcactggtttgttcccttctcccgctccaaatccaacgatgatgctgcaaagcgtgctatagacttcatgtttggatggtttatggatcccctcattagaggcgactaccccctaagcatgagaggattggttgggaatcgcttgccacagttcactaaagaacagtctaagttggtcaagggtgcatttgactttattggacttaactactacactgcgaactatgctgataaccttcctccatcaaatggccttaacaacagctataccaccgattctcgagctaatcttaccggtgtacgaaatggcatccccataggaccgcaggctgcttcaccttggctttacgtctaccctcaaggcttccgtgacttgctactttatgttaaggagaactatggcaatcctaccgtctacatcactgaaaatggcgttgatgaattcaacaataagaccttaccactccaagaagccttgaaggatgacgctaggatagaatactaccacaagcacctcctttccctgctaagtgctataagggatggagcaaacgtgaagggatactttgcatggtcgctgcttgataacttcgagtggtcgaacggctacacagttcgatttgggataaacttcgtagattacaatgacggaaggaagagataccccaagaactctgcccattggttcaagaagttcctcctgaaatga

SEQ ID NO: 3931 - DNA, 2049 bp, Oryza sativa
atgtcggcggcgcccccgcctccccccccggagtccccggtcgccgccgccgccggcggaggcgacaaggtgctcgccgcggcgcagcacatcgtcaagtcgctggcgacatccaagaacgccgccgacgacatgatccgcatcctctcgggcttcgacaaccgcctctcccagatcacctccgacctcttcccctcccccgacctcgccgctgactccgacgaacgggggaaccccctgtgggggcagatctcggccgcggccttcgacgccgccgagcagctcatccaggtctgggacggcaccccggaggcgctcgtcttcgaggccaccgaggacgaggtcgccgagtacctctccgcggtcgacgtggccatcgagcacctcgcgcgcggcagcggcggcggcgccggcggcccggggtcctcctcctcctcaaccgcgggccgcgccggggtcgccgtgcagctcgccatggcgcgcctcgaggaggagctgcgcaacctcatgaccccaggggcctcttcttctccctgcgccgcctttcgctcggctccatggacgacctcgaaacctcctccgagttcgacgccgccaaggcggaaargcatcgacgtcgcgccggagaccgcgcgcggcgggcccctggtcaaccccttcgaggaccaggtgttcgaccccgtgcgccctgaggccgtcgacgacctccgcgccatcgccgaccggatggcgcgcgccgggtactcgcgcgagctcgccgacgcgtactgcggcatccgccgtgacctgctcgacgagtacctctccgcgctcggcgtcgagcgcctcagcattgacgaggtgcagcgcatcgagtggaagcacctgaatgacaagatgaagaagtgggtgcaggcggtcaagacggtcgtgcgtgtcctgctcgctggtgagcgacgcctctgcgatcaggtgctcagtgtgtccgatgagctcagggaggagtgcttcatcgaatcaaccaaaggttgtattatgcagattctcagctttggggatgctgtggctgtgtgtccccgctcgccagagaagctctcgcggattcttgacatgtatgaggcacttgcagaggtgatccctgagatgaaggatttgtgcttgggcagttctggggatggtgtgatcagcgatgttcaggcgaatcttgataggcttggggatgccattaggggtacacttttcgagtttgggaaggttttgcagctggagtcatcacggagggcaatgacagctggtgagatccaccccatgacacgctacgtcatgaactatttgaggcttctggttgtttacagcgacacacttgatgccctcttggatgacaatgccgatgaccaaattgatttggcaagagctgaggatcaggatcaggaacacttggagagcatgacccctcttggaaagcgccttttgaagctgatatcttatttggaggctaacttggaggaaaaatctaagctgtatgaagatagcgccctggagtgcatattttccatgaacaatttgctgtacattgttcaaaaggtgagggactctgagctcggcaagattttaggtgatcactgggtaaaaaggcgtaatggcaagatccggcagtattcaaagagctacctaaggatttcctggatgaaggttttatcttttctgaaggatgatggacatggaagtgggagcggcagcagcagcggcagtggcagtgggcattcaagttctcggatgtccatcaaggagaagttcaagaacttcaacctggcctttgaggaaatatacaggaaccaaacaacctggaaagttccagatcctcagctccgagaagagctgaaaatatccatatctgaaaatgttattccggcatatcgtgcttttttgggaagatatggtagccaagtggatgggggaagaaattcagggaaatatataaaatacaccccagaggacttggaaagtcagctttctgatttgtttgagggtgcaccggggccagccaaccactctagaagaagaacatag

SEQ ID NO: 3932 - DNA, 4179 bp, Oryza sativa
atggcatccaaagtccgctttactgtgggttctaatgtttgggttgaggatgctgatgtggcttggattgatgggctggtggagcaggtcactggggatgaactaattataaggtgcacttctgggaagaaggttactgcaaatgtatcaagtgtctatcccaaggacgcagaagcaaagcgctgtggtgtcgaggatatgacgagactagcttatctacacgaaccaggagttctccataacctaaagtatatgatgaattatggtgtcagccaagccatattagtgagtggtgaaagtggtgctggtaaaacagaaagcactaaaatgcttatgcaatatcttgcttttatgggtggcaaagttcaatcgggtggacggtcagtgcaacaacaagtgctggagtccaatcccgttcttgaggcatttggaaatgcaaaaacagtcaggaataataattcaagctatatgtcttcacacatttcctttgtctcacaatgcagtcgctttggtaaatttgttgagattcaatttgatcagagtgggaaaatctcaggggctgccataaggacttatcttttggaaagatctcgtgtttgccaaatatctgatccagagagaaattatcattgcttttacatgctatgttctgcaccagcggaggaacgtgaaaggtataagttaggagatcctgcatcatttcactatctcaaccagtctaattgcattaagcttgatgggatggatgactcttcagaatatattgcaactagaagagcaatggatatagtgggcatcagttctgatgaacaggacgcaatattcagagttgttgctgcaatccttcatttgggcaatgtagaatttgtggaaggaagtgaagcagattcttctgtacccaaagatgataaatccaagtttcatcttcggacagcttctgaacttttcatgtgtgatgaggaggctcttgaggaatctttgtgtaagcgtgtaatagcaacacgtggtgaaagtatagtaaaaaatttagatgcccgggcagcagctcttagtagagatgcattggccagaattgtctactcacggttgtttgattggcttgtaaataagatcaatacttcaatagggcaagatcctagttcaaagcttctgataggtgtgctggatatatatggttttgaaagtttcaagacaaacagttttgagcagttttgtatcaacttaactaacgagaagctccagcagcactttaatcagcatgtgtttaaaatggagcaagaggaatatacaaaggaagaaattgactggagttacatccaatttgtggacaatcaggagattcttgatctcattgagaagaaaccaggggggataattgctctactcgatgagacttgcatgttgcgaaattcaacccatgaaacatttgctgagaagctatatcaacaatttaagggcaaccaacacttcagtaggccaaaattttcacgttctgatttcactattcatcactatgccggacatgttacttatcaaacagatttgtttttagataagaacatagactatgctgtaaatgagcatcaagttctgttacatgcttctagatgttcattcgtttcaagtctttttccaccttctgaagaatcaactaaatctacaaaattcacatccataggttcaagctttaagcaacaactgcaagctttgttggaaactttgagttcagtagaaccacattacattcgctgtataaagccaaataatgttctcaagccagcaatttttgagaacagcaatgttctccagcaacttcgatgtggaggagtgctagaggcaataagaataagctgcctagggtacccaacaagaagaacatttgatgagtttgttgatcgttttggtgttttgctacctgaagttcttgatgaaagttatgatgaagttactgctacagaaatgcttcttgagaaagtcaatctcacaggctatcagatagggaaaacgaaagtgtttctgcgtgctggtcagatggctgagctagatgctcgaaggactgaggtcttgagcagttctgctagcaaaatccagagaaaagttcgatcatacttggctcacaaacacttcattcagttgcgattatctgctactcagcttcaggcagtatgcagaggacaaattgcaagacattattatgaagacctccgtaggaaggctgcgaccttgacaattcagacctattaccgtatgcattttgcaaggaaaaattatagagatctctgttctgcatcaactactgtccaatctggtctacgtggcatggcggctcgcaaggaactccagtaccgtcagcagacaaaagctgcagtgattattcagagttactgtcgcagttatttagcacactcacagtacatgggcttgaagaaagcagcgatcacaacccaatgtgcttggagagggaggttggccagaagagaacttcgaaaacttaaaatggctgcaaaagaaactggtgctctgcaagctgctaagaataaattagagaaacaagttgaagagctaacttggcggcttcagctggagaaacgcatgagggttgacatggaagaagccaagtcacaagaaaataagaagctgcaacagaaattgcaggaacttgaattgcagtccaatgaaacaaaagatttgttaaaaagggaacaagaaactgctaaagcagcatgggagaaagctgccttagtaccagaggtccaggttgatacaactcttgttaatgagctcacagctgaaaacgagaagctcaagacacttgtggcttctctcgagacaaaaattgatgaaacggaacagaggtttgatgaagtgaagaaagctagagaagagttgctgaagaaagccacagatgcagagtcaaagataaatggactaacgaacacaatgctaagtcttcaagaaaaactaacaaacatggaactggaaaatcaagttctccggcagcaggcactgtttcgttctcctgtgagaacaatacctgaaaacacgtctccaaaagctacacctcatggtacacctccagcttctaaagaatatgggaagttcgcacagccaagaccatccttttttgagaggcagcatgagagtgttgatgcactgataaactgtgttactgaaaacattggcttcagtgaaggaaaaccaattgctgcaataaccatatataaatgtctggttcattggaagatctttgaaacagagaaaacatctgtttttgatcggcttattcaaatttttggttctgcgatgcagaaacacgatagcaatgaggatcttgcatactggttatcaacttcatcaactttattgattatgttgcaaaagagcctaaaagctgctggctcatctggaggaactccacggaaaaaaccacagactcagtcatcattcctagggaggatggtgttccggttcgtcaaaacatcactgttgatatggaccttgtgcgccaaaattgagggccaagtcccaagaatcatgaaagccagtatggtcccggcaatttttatgaggaagatatttacccaaattttctcattcatcaatgcccaactttttaatagccttcttgtacgccatgagtgctgctctttcagcaatggagagtatgtgaaacaaggattagcacaaatggaggtgtggtgtggagaagtcaaaccagagtacgtaggatctgcattggatgaactcaagcacataaggcaagctgttggtttcttggtcatatttaaaaaattcaggatttcatatgatgagattgtcaatgatctgtgcccagtactaagtgtccagcagctgtacaaaatatgcacacagtactgggatgacaaatacaacacagagagtgtatctgaagagttgggtatcttttttctgggggttgcaagttgcaaaccatcagaaaaggtgacgtttatgaagaaatttccagtcagaaacatgcatacagaatatctaccagagtggtctgaggttcaggactttagggtgttctttgctgtaagctacatgcccatatcacttgaggagattggggattctatggattctaaagaatttcagcacatagccccaccaccagaacttgttgcaatccccgcattccaattcttgaagagctga

SEQ ID NO: 3933 - DNA, 1599 bp, Oryza sativa
atggaggccgccacggttgtcgctgctccgattccggcggcggatgctgccgccaaggcgctggagaagaagctccttgacctggagttgccgccgttcccggcgccggcgaagaaggccgccgccaaggtggtcgctgctgctcccaagaagaagctcgccggcggcgccggcgggtacgtcctcgaggacgtgccccacctcaccgactacctccccaacctcccctccttccccaaccccctccagaaccaccccgcctactccgtcgtcaagcagtacttcgtgaacgccgacgacaccggtggcgaagaagatcgtggtgcacaaggggagcgcgcgggggacgcacttccggcgagccgggccgcggcagcgggtgttcttccagcccgacgaggtgtcggcggctatcgtcacctgcggcgggctgtgcccgggcttgaacaccgtcatccgcgagctcgtctgcggcctccacgacatggcgggtaccgcgggttctacgcgcgcaacacggtggagctcaccccgcgctccgtcaacggcatccacaagcgcggcggcacggtgctcggcacgtcgcgcggcggccaggacacgggcaagatcgtcgacagcatccaggaccgtggcatcaaccaggtgtacatcatcggcggcgacggcacgcagaagggcgcggcgacgatccacgccgaggtgcagaggcgcgggctcaagtgcgcggtggtcggcgtccccaagacgatcgacaacgacatcgccgtgatcgaccgctcgttcgggttcgacaccgccgtggaggaggcccagcgcgccatcaacgccgcccacgtcgaggccgagagcgccgagaacggcgtcggcgtcgtcaagctcatggggcggaacagcggcttcatcgccatgtacgccacgctcgccagccgcgacgtcgacctgtgcctcatcccggagtcccccttctacctcgaaggcaagggcggcctcctcgagttcgccgagaagcggctgcgcgagaacggccacatggtgatcgtcgtcgccgagggcgccggccaggacgtgatcgccaggagcatgcgcctcgccgacgcgcacgacgcgtcgggcaacaaggtgctcctcgacgtcggcctctggctgtgcgccaagatcaaggatcacttcaagaagaaggcgaatttccccatcacgctcaagtacatcgaccccacgtacatgatccgcgccgtgccgtccaacgcctccgacaacgtctactgctcgctgctcgcccacagcgccatccatggcgccatggccgggtacaccggcttcaccgtcgcacccgtcaatggccgccacgcctacatccccttctacaggatcacggagaagcagaacaaggtggtcatcacggacaggatgtgggcgagggtgctctgctcgacgaaccagccgtgcttcctcagcacggaggacgtcgagaaggcagggcaggacgacgaggagccgatcgtgccgctcgtcgagggcgagaactcgctcgtcaaggcgccgccgctgctggccaacgccggcgatcgcgccgccctctgcaacggcgccgcctga

SEQ ID NO: 3934 - DNA, 933 bp, Oryza sativa
atggagatgcgtcgccttcttgtcttgttcgctctcctctccgtcaccgccgtcgtcccggtgttcttatggcccgacaagaagggcggtgctagtgacgtcgccgtcgtcgtcgcggcgcctccgttcaatgcgtccagcgtcaccattatctcctggaaaccgaggatatttttttacaagggcttcctttcagatgatgagtgcgaccaccttgtcaagttggggaaggagaagctgaagaggtccatggtggcagacaatgagtcgggaaagagtgttatgagcgaagtgcgcaccagctctggcatgttcttggacaaacaacaggaccctgttgttagcggtattgaggagagaattgcagcttggaccctgcttccgcaagagaatgctgagaacattcagatactccgatacgagaacggacaaaaatatgatcctcattttgattattttcaagacaaagtcaatcaactgcagggcggtcaccgttatgcaacggtgctgacatatctatcaactgttgagaaaggaggtgaaaccgtcttcccaaatgctgaggggtgggaatctcaacctaaagatgattcattttcagactgtgcaaaaaagggcttggcagtgaaagcagtgaagggtgattctgtgctgttctttaatcttcagcctgatggcacaccagacccgcttagcctccatggaagctgcccagttatagagggcgagaaatggtctgcgccaaagtggattcatgtgcggtcttacgacaatgcatcaagcatgaagcaaagtgaagaatgttctgatttgagcgagaattgcgcggcttgggctgcatcgggtgaatgcaataacaacgcagtctacatgattggaacggaagatgcacccggtcagtgccagaagagttgcaatgcttgcagtttatag

SEQ ID NO: 3935 - DNA, 795 bp, Oryza sativa
atggctcaggaggacgtcggtcacctgagcgacgccggcctggcgctgggcctgtccctcggcgggggaggaggagggacgaccgacgcggcggcggcgcaccgtggcggctgccggcggccgtcgccgtcgtcgcagtgcccgccgctggagccgtcgctgaccctgagcttgcccgacgacgcggcggccggcgcggccgcgaccgcgaccgcgaccgcgtccggcgggggcggccctgcgcacagcgtgtcgtcgctgtccgtcggcgcggcggcggcggcggccgtgaagagggagcgcgcggaggaggccgacggcgagagggtgtcgtcgacggcggccgggcgtgacgacgacgacgacgggagcacccgcaagaagctccggctgaccaaggagcagtccgcgctcctggaggaccgcttccgggagcacagcacgctcaacccgaagcagaaagtcgctttagcgaagcaactgaacctcaggccaaggcaggtggaggtctggttccaaaacagaagagcaaggacaaagctgaagcagacggaggtggactgcgagttcctgaagcgctgctgcgagacgctcaccgaggagaaccgtcggctgcagcgcgagctgcaggagctccgcgcgctcaagttcgccccgccgccgccgtcctcggcggcccaccagccgtcgccggcgccaccggcgccgttctacatgcaactcccggccgccacgctcaccatctgcccgtcctgcgagcgcgtcggcgggcccgcgttccgccgccaaggctag

SEQ ID NO: 3936 - DNA, 1338 bp, Oryza sativa
atggctgcagccattgccgtcgtctacctctccctactgctgctgctgctgcatggcgcggcgccggcagttcttggctacacgcgaggggatttcccggaggatttcgtcttcggatccgccacctcgtcgtaccagtatgagggtggttttgatgaggatggtaggagcccaagcaactgggacatcttcactcatcaagggaaaatgccgggcagaagcacagctgatgtcgccgccgacgggtaccacaagtacaaagatgatttgaagctgatggttgacaccaacctagaggcttatagattatccatctcctggtcgaggattattccaaatgggaggggtgatgtcaatccaaaagggctacaatactacaatgacatcatagatgggctagtgaaaaatgggattcaagtccatatcatgctttatcagttggacctacctcaggttctggaagacgagtacgatggatggttgagtccgagaattttggaggatttcaaagcatatgcagatgtgtgcttcaaggagtttggagacagggttgcacactggattacaattgatgaacctaatgttgcttcaattgggtcttatgattccggacaattggcccctgggcgttgctctgatccttttggaataagaaaatgtacagtagggaactcatctgtggagccatatatagcagttcataacatgttactggcacatgcatcagtcacaaaactgtacagagaaaaataccaaagttgtggtgctctttctagggtactaagacccttggtattcggtgattacccacaagtaatgaagaacattgtcggttctcgccttccatccttcacaaaagcccaatctgaagatgtcaagggttctctagatttcattggaatgaatcactactactctctctatgtgaatgatcgtcctttgggtaagggcacacgcgactttgtagcggatatatcaatttactacagaggttccaagacagatccaccacctggttatggatcaagcaatgacactgtccatgacaatgacagggttgattacctgaagagctatatagggagtatcctgactgcactaaggaatggcgccaacgtgaaaggctacttcgtgtggtcattcgtggacgtgttcgagtacctgacggggtacggccaatcgtacggcctctaccgcgtcgacttcgccgacgagtcgcggccgcggcaggcgaggctctccgctcgctggtactccggcttcctcaagaacagggagatggatgttgatcagagtgagctcgccatggcagcagcagagtcacgagctcagcaatga

SEQ ID NO: 3937 - DNA, 990 bp, Oryza sativa
atggacatggcgcacgagagggacgcgagcagcgaggaggaggtgatgggcggcgacctgcgtcgcgggccgtggacggtggaggaggacctcctgctcgtcaactacatcgccgcgcacggcgagggccgctggaactcgctcgcccgatcagcagggctgaaacgcacaggcaagagctgccggctccggtggctgaactacctccgccccgacctccggcgaggcaacatcacgccgcaggagcagctgctcatcctggagctgcactcgcggtggggaaaccgctggtccaagatcgcgcagcacctcccgggacgcaccgacaacgagatcaagaactactggcgcacgcgggtgcagaagcacgccaagcagctcaagtgcgacgtcaacagccagcagttcaaggacgtcatgcgctacctctggatgccccgcctcgtcgagcgcatccaggccgccgccgccgggcagcagcagcagcaggaaggcggcaccgacacgccgcccctgtcgtggcagcacggcggctccgacgggctctacgagtcgccggagctcccggcgcccgatgccagctgctggccagccgagtactgcgcggcggccggcggcgcgcagtcgggcggcacgcctgcaccggagctgtcgagcacmacggccgggtcgtcgtcgctgtccacggactccggcgccggggcgcagcccagctggcccacgcaggccgacggcgccgagtggttcaccaccgcttgcgacgcctccagsgccaccggcggcttggccatgcgcgacacggagctggagctggcccagccgccgtgccagggcgggcagacstggacgacgtccgagtcgtcgctgcctggcctmacyttccccgacctygccgtcgcggacttcgagatcggcggcttcgacgtcgatagcttctggacgagcatggaggacgaccagctgtggtgccccacccaggccgccctgtga

SEQ ID NO: 3938 - DNA, 2052 bp, Oryza sativa
atgccgcttcggcggcggtgggcggcgcttttgttaggcgtcgccgtcgtccttgccgtcgccgccgccggcgcgcgtgcgcaggactacaacaatggcggcggcggagacggcgaggatgaggaggaggaggagaagccgtcgttcaaggcgcaggaggcgtgcaacggcgcgttcctgacgtacacgttcacggagcgcgagaaggagtacccgcggaccaagaacgcgacggcgcaggcgttcgcgttcaaggcgacggcgacggtgctcaacaccatgaccgaggacctcaaggcgtggcagatgttcgtcgggttccagcacaaggagatcctcgtgaccgtcggcggcgccgtgctcctcgacggcaccgacctccccgccaacgtctccggcggcgtcaccttcgccgggtaccccatggccaacctcctcaactccatcgagaccgccggcgacctgacgcagatccaggcccagatcgacatcaccggcacccagttcggcgtcaagccgcccacagcgcccatgcccaggaccatcaagctgtccaaccccgggttccgttgccccaagcccacacacaagcagagcgtcatgtacgtgtgctgcgtcaaggacccaaaattcaaggccaagaaggtgaacaccaccacccgctacctgccgcggcagaaggccgacctgaccatcgcctacgacgtcctccaagcgttcggcaacaactacatggtgcaggtgaccatcgacaactggagccccatcggccggctcgacaactggaacctcacctgggagtggaagcgcggcgagttcatctacaaaatgcgcggcgcgtacacgctcaacaaggaaggccccgcctgcgtgtacagccccgccgccggctactacaaggacttcgacttcacgccggcgtacagctgcgagaagcggcccatcgtcgtggacctcccgccggagcgcgagaaggacaaggacgtcgggaacatccccttctgctgcaagaacggcacgctgctgccgcccaccatggacgagtccaagtcgcgggccgtgttccagatgcaggtgttcaagctgccgccggacctcaaccggacggcgctgtacccgccgcagaactggaagatcatcgggaagctgaacccgcagtacgcgtgcaggcagccggtgagggtgagccccgtggtgttccccgaccagacggggctcatgtcgtccaccccggccgtcgcgtcgtggcaggtggcgtgcaacatcacccgccccaagaggcgcgccgccaagtgctgcgtctccttctccgcctactacgacgactccgtcgtgccgtgcaacacctgcgcctgcggctgcggcggcggcggcggcggcggcaacgacacggcgacgtgcgacgcggacgcacgcgccacgccgctgccgcccgaggcgctgctcatcccgttcgacaaccgcacggccaaggggcgcgcctgggccaagatcaagcaccgccgcgtgcccaacccgatgccctgcggcgacaactgcggcctcagcgtcaactggcacatcatgaacaactacaagtccgggtgggcggcgcggatcaccatcttcaactggcaggactacacgttcaaggactggttcgccgccgtcaccatgcgcgaccactacagcggctacgagaacgtctactccttcaacggcaccaagatgggggcgccgttcaacaacagcatcttcatgcaggggttgcccgggytmacctacctcgagccgatcaccgacgggaggacgccggaggacccaagggtgcccgggaagcagcagtccgtcatctccttctcgcggaaggacgcgccgaacgtcaacattgccaagggggaaggcttccccaagaggctctacttcgacggcgaggagtgcgcgctcccggacacgatacccaagccgtcgagcgcgcaccggcgggccgccgcggcggcgagcctcgggcagattgtcatggcagtagtgcttgtgatggttgtggcggttgtggactccttgtgcttatga

SEQ ID NO: 3939 - DNA, 510 bp, Oryza sativa
atggcgtcgatgaagcggaagtgccccgatgacgagacggcctgcggctccggcgccggcgccgccatgtgcgtcaccggctgcggattcttcggctccgaggccaccaacaacatgtgctcccggtgctaccgcgagcactccgcggacaacgacgccgtggaggaggcggcggcagccaacagcgacctcgagctggttggcgtggcggagacgacgacgaagaaggccaggatgagcgccgtcgtccccgtcgccgtcgcgtcatcttcatcggcggcggcagagcagccggcggcgaaggctgctacggcgccgaaccggtgcgcggcgtgccggaagaaggtggggctgacggggttcaagtgccggtgcggcggcaacttctgtggcggccaccgccacgccgacgcccacggctgcggcttcgactacaagagcgccgggaaggagcagatcgccaagcagaacccgctcgtcgtcgccgacaagctggccacccggatttga

SEQ ID NO: 3940 - DNA, 3372 bp, Oryza sativa
atggatggagtcgttgcccttgcgcggcccgccggcgaaggagaagagccagggccgcgccgctgcgcgcacccggcgctgccacgcggccacggcggcggcggtctccaggtggaagtaggtcgggtaagggacggcagggttgttccgattccatgggctcgcctcgacgaggatcgctgttatgttttggacggcggggtaggtgagcagcttgctgcccaattcccagccttcgttgcggtgtcgccggaagtcccaagtggtgcggccgacgacgaagaaatggtcgcggcctcccatggcgtgccactccggcggtccggccgccacgtcagccacccgccgaggtcatcgaagagcgtgtccttcaccgacgcgttccggtggaagagctctgaaagctctgaagaggcagtaggattgactgtgttgactgttagaattagtggatggagaggttgggtcaacgctggtttggttttgggtgtaaaatcttggccgtggcattgtccagcgcaccagaggggctgtgaatttgtgatcatggagattttagaactagtttcacaaagctacagatttaatgtcttcgttatcacaaactacaggattatggggaagaagaatagtgtgaacaaggatgctttgctatatttctttcacatgtcagccacatctaataatgctggaggggtaggtactatcagcaacgagaattctggtactgatctgaagaacttgcgagtgaagttggtattgcttggagattcaggtgttgggaaaagttgcattgttcttcgctttgtccgtggtcagtttgaccccacttcaaaggtgactgttggtgcatcatttttgtcacaaacattggcgttggaggattccacaacagtaaagtttgaaatatgggatactgctggtatgctgcattggcaccttctttactaccggggagctggtgccgcaattgttgtgtatgacataacaagttcagaatcatttaacaaggcacaatactgggtgaagatgtatgttgaccatggtctacatttgacttcgataaatcatgaacttcagaaacacggtagtccagatatgatcatggctttggttggaaataaggctgatctacatgacaatcgtagtgtatcctctcaggatgcacaagagtatgcagagaggaacactatgtttttcatcgagacatcagcgaaaacggctgataacataaaccaactattcgaggtatgcatcaggagtatctccgagtcagttggcttgaacagaaactggagcatgacagtagaaaccatgattaacttttcttgcgttcaattcttgagctgttctctaagagcctttatttccagtgccaaattggttcttttacatctgaaaaattctgaaacctacggtttgccattgatgattgatgatccatccatgcatctcaagcctcactccatcgtctccttccttgtgctgttgctactcttccacgcggcggcggccggtggtgatggcgatcagttcaggtacgacggcttcgccggcgcggcgctcgacctcgacggcatggccgtggtggagccggacggcaagctcatgctgacgaacgtcacgtcccagatgaagggccacgcgttccacccggcgccgctccggttccaccacccgccgccggcgaacggcaccgccgccgcggcaaggtcgttctcgaccgccttcgtgttcgccatcgccgccgactacgtcacgctcgacaccatcctcaacccggagttccgggacatcaacagcaaccacgtcggcgtcgacgtgaacggcctggtgtccgtcgccgccgagcccgccggctactacgacgacgccaccggcggcgcgttcaagaacctgacgctcttcagcggcgccgccatgcaggtctgggtggactacgacggccgcgccgcggtggtgaacgtgacgctggcgcccgtcgaggtggccaagccgaggaggcccctcatctccgtcgccgtcgacctctcgccggtggtgaacggcacggcgtacgtcgggctctcgtcgtcgacggggccgttccacacgcgccattacgtgctcggctggagcttcgccatggacgggcccgcgccgccgctcgactacgcgaagcttcccaagatgccggtcgtgagcgccaagcggcggtccaaggcgctcgacgtcgtcattccggtggccgcgccgctcctcgcgctcgccgtggtcgccggcgtctccttcctcgtgtggcggcggctccggtacgccgagctccgggaggactgggaggtggagttcggcccgcaccggttcgcgtacaaggacctgttcgtcgccaccgccggcttcgacggcaagcggctgctcggcgtcggcgggttcggccgcgtgtaccggggcgtgctcccggcgtccgggacggaggtcgccgtgaagatcgtgtcgcacgacgcgaagcaagggatgaggcagttcgtcgccgaggtcgtcagcatcggccggctccgccaccgcaacgtcgtgccgctgctcggctactgccgccggcgaggcgagctcctgctggtgtacgactacatgcccaacggcagcctggaccggtggctgcacgaccacggcgcgccgccgctcggctgggcgcagcggctgcacgccgtccgcggcgtcgccgccggcttgctctacctccacgaggactgggagcaggtggtcgtccaccgcgacgtcaaggcgagcaacgtgctcctcgacggcgagatgaacgcgcggctcggcgacttcgggctggcgaggctgtacgaccgcggcgccgacccacagacgacgcgggtggtgggcaccatgggctacctcgcgccggagctcgcgcacacgcggcgggtcacgccggcgaccgacgtgttcgcgttcgggtcgttcgtcctggaggtggcgtgcgggcggcggccgatcgagcgcggcggcgccatgaccgccgccgccgacgaggacggccagctcgtgctcgccgactgggtgctcgaccggtggcacaagggcgacatcgccgccgcggcggacgcgcggctgtgcggcgactacgacgccaaggaggcggcgctggtgctcaagctgggactcctctgctcccacccggtggccgccgcgaggccgacgatgcggcaggtggtgcacttcctcgacggcgacgcgccgctgccggagccggagcccacgtaccggagcttcaccacgctggccatgatgcagaacgccgacggcttcgactcatgcgccgtgtcgtacccgtcgacggcgacgagcatcgacggcgcgtcctccgtcctctccggcggacggtga

SEQ ID NO: 3941 - DNA, 1197 bp, Oryza sativa
atggcggcggcggtgacggtggaggaggtgaggagggcgcagagggcggaggggccggcgacggtgctggcgatcgggacggcgacgccggcgaactgcgtgtaccaggccgactacccggactactacttcaggatcaccaagagcgagcacatggtcgagctcaaggagaagttcaagaggatgtgtgacaagtcgcagatcaggaagaggtacatgcacctgacggaggagatcctgcaggagaaccccaacatgtgcgcgtacatggcgccgtcgctggacgcgcggcaggacatcgtcgtcgtcgaggtccccaagctggggaaggcggcggcgcagaaggcgatcaaggagtgggggcagccgcgctcccgcatcacccacctcgtcttctgcaccacctccggcgtcgacatgcccggcgccgactaccagctcgccaagatgctcggcctgaggcccaacgtgaaccgcctcatgatgtaccagcaggggtgcttcgccggcggcacggtgctccgcgtcgccaaggacctcgccgagaacaaccgcggcgcgcgcgtcctcgccgtgtgctccgagatcacggcggtgacgttccgggggccctccgagtcccacctcgactccatggtcgggcaggcgctgttcggcgacggcgcggcggcggtgatcgtcggctccgaccccgacgaggccgtcgagcggccgctgttccagatggtgtcggcgagccagaccatcctcccggacagcgagggcgccatcgacggccacctgagggaggtcgggctgacgttccacctgctcaaggacgtgccggggctcatctcgaagaacatcgagcgcgcgctgggcgacgcgttcacaccgctggggatctcggactggaactccatcttctgggtggcgcaccccggaggtccggcgatcctggaccaggtgragccgaaggttgggctggacaaggagaggattagggcgacgcgccacgtgctgtccgagtacggcaacatgtcgagcgcctgcgtgctcttcatcctcgacgagatgcgcaagcgctccgccgaggacggccacgccaccaccggcgagggcatggactggggcgtcctcttcggcttcggccccggcctcaccgttgagaccgtcgtcctccacagcgtccccatcaccgccggcgccgccgcctga

SEQ ID NO: 3942 - DNA, 3018 bp, Oryza sativa
atgttccgccgcctcctcctccccctccggcgctgcttctccacctcgacgtcctcgagcgcgacgccaaccctctactcgagcggcaccaccccggtgtccatcctgtcctggggccgcggcgcgtcggggcagctcggcggcggcaaggaggagcgccgcctctacccgtcccccgtcgcgcacttctccctccccgaccccgcgccggtgctctcccccacgcccggacgcctccctgacgccgccgccgcggggacggcagcggggggcgtggaggtggggatctcctgcgggctgttccactccgcggtcgtcgtcgacggcggcgcctgggtgtggggcaagggcgacgggggccgcctcggcctcggggacgagtcctccgccttcgtcccgcgccacaaccccaacctcagcgagctccgcgtcctcgcgctcggcggcatccactccgccgccctgaccgcctccggggaagtcttcacctggggttatggtggatttggtgctttggggcattatgtttaccatagggaattgttgccaaggaaagtgaatggtccttgggaagggaagatatcacacattgctaccagtggagcacatactgcggcaatcactgactcaggtgagctctacacttggggtcgtgatgaaggcgatggtaggttggggcttggaagtggaggtggtcctggtgaagctggatctctcagtgttccttccaaggtgaacgctctgcctgtttcagttgctgctgtggcttgtggtggttttttcactatggctctgacttcagatggtcagctatggagttggggagcaaattcaaacttcgaattgggtagagggagcaattccagtgactggaggccacagcttatccctagcctgaaaaatctccatgtaatccaagtagcatgtggtggatatcattctttagccctgactgatgaaggtgtcgttctctcatggggacatggtggacacggccaacttgggcatccaacccttcagaatcatagagtcccactagctatcaaagctttgtctgaagaacgaattgtctatatagcctgtggaggttcgacttctgctgcaatatcagagaaaggtgacttgtacatgtggggaaatgcaagagattgccagttaggtgtccctggtttgccagaaattcagccgctaccgcttatgctctcatttgcacgcactagctttgggggtcagactgcacatctgcctaagtctaaaagttcaggatataaacattttgtgtccatctccagtggtctcccatgcttcctcgccatcaggcggcaatctcctggctatagttcagttcacacagcttccttcagttcacaacacaatcaattgagcacggataggtcaggtactgttatggcagaaagggagctaatcgacaaggataaacttatacttagaggtttgcagttccatggtttccatggagtgaaacaagaagagaagactctgggccaaaagtttgttgtggatgttgatgcgtggatggatttgagtgctgctggggaaactgacagcatatctgatacagttagctacacagatatttacaggattgccaaggatgttgttgaaggcccatcgcggaaccttttggaggcagtagctcatcgcatcgcgagtgccacattgctgaaattccctcaaatctcagccgtcagagtgaaagttgggaaacctcatgttgcgttacctattctctttgcatttctcaagagcagttgcaggagaggagtcttcttcttcactgaggcaagttcttggccggagacaagaatgccaccagtgaatagcgacggagcaggaccaagctccggcgaggatggctctgcagccgccgtgaagaagcgcaacaggcctaagtaccatcggtttacgcagcaagaacttcaagcatgcaagcctatactgataccccagactgttattcttgtactagtgtttgtgggcctaattttcattccaattggtcttgcttgcattgcagcctcaaataaggtcgttgaattggttgatcgttacgatacaaaatgcgtgccacggaacatgcttcgcaacaaagttgcttttatccaaaactcatcaatagataagacttgcacaagagtcttcaaggtccctaaagatatgaagaagccgatttacatatattatcaacttgacaagttctaccagaaccacagaaggtatgtgaagagcctcaacgatatgcagctgagaaatccgaagaaggtggccgacacgcaatactgcagccctgaagctactgcgaatggcagacctattgttccttgtggtctcatagcttggagcctgttcaacgacacatacagcttcactcgtggtcatggcaacgagacattgagagtgaacaaggatggcatttcgtggaagagtgaaaggaatcgcagatttggcaagaacgtgtatcctaaaaactttcagaatgggactttgattggtggagggcagttaaatccaagcaaacctctgagtgagcaggaagatctgatcgtctggatgagaatagcagcactgccaacattcagaaagctgtacgggagaatcgacatggatctgcaggccggtgaccgtgtagaggtgacgatgcagaacaactacaactcgtacagcttcaacggcaagaagtcgctggtgctgtccaccgccgggtggctcggagggaagaacgccttcctcggccgcgcctacgccatcgtcggcttggcctgcttcctgctggcactgctgctcgcattgctctacttcgtcttccccatgtcagtatctgcaactgcagaattaaaccctcagttcttcatccccttcatgaaatgttcatggattcttatattggaatacatgattcagacatggttgctgaaagaattttttaatacagtgagtgctgtgcaaagtgcaaatttgggagttccaggtgccccatttgttaaagacaccacatga

SEQ ID NO: 3943 - DNA, 1962 bp, Oryza sativa
atggccaccgccaccgccaccgccgcgctcgcgctcctctctcctccgctccccgcctccccgamccctcctcctcctcctccamtccgcgccattctcctcaagcagcctttcctccgcccgatacgccagcggcggcgtctgtctccgcgtcctctcctgcgccgccgcgaacccgtygccgcctgcgcacccaacgccgatgcagagaccgccttcaactcgcgttcctacgacgcgctggaggccgagcgcgccgtcgcggagctcctccgcgagcacggcgcctccccggctgatgcggcttccatcgccgcgcgcgcgccggggtacgccgccatgctcgccgacggcgtccgcgagctcgacgagctcgggctctgggagtcgtggagctccggggcsggggcgggccgcgaggtggagatggccgggctcgggttcgggaggaaggtgtactacatggggaaggcgaagagcaggcgcgaccgcggcgtggtgccgctgctcgagagcgtcggggtgcggctctcctccgcgaagctcatcgcgccgtatgtttcggcggctggtctcccggtgctgatcgataggatcaagtttttgaaggaaattctattttcaagcaatgtctatgaaacattaataagtagaaatgctaaacgcatgatgatgcacttatcaatacctgcagatgagtcactccaaagtactttatcatttttcgaaaaaatggaggccaggtatggcggtcttaatatgttgggacatggagatgtgtcgtttccctatctcattgaatcatttccaatgcttcttctctgctcagagaacaatcatcttaaaccattaattgattttcttcagtacattggaattcccaagccaaggattgcatctgtgctgctgtcatttcctcctatcatcctttctgatgttgaaaatgatatcaaaccaaggattaatgcatgggaaaaggttggcattgaacaagaatatattggtaggatgttgctgaagtatccatggattctttcaacatgtgtgctagaaaactatggccaaatgttaatgttcttccaaagaagaaagatttccagtacagtccttggtgttgcgatgagaagttggccccatattctgggttgctcaacaaaaagaatgaactcaattgtggagctgtttgatgatctgggtatcagtaagaaaatgttggttccagttgttacatcaagtccacagttgttgctgagaaaaccaaatgaggttatgcagattattctctttttcaaagatatgggtcttgataagaaaacagtggcaaagattttgtgtcgttctccagaaatatttgcttcaagtgtggagaatacccttaagaagaaaataaactttcttattgactttggtgttcccaagcattatctccctcgcatcattaggaagtatccggagcttttattgttggacataaatcgcacaatgctccccagttcttgtgaacatgtaactgactttaactcatctatgtattccaatgtttacagaatcaactacctcttggatatgggattgtctaagaaaaatgtgtgctcgatgatctatagattctctccacttctgggttacagtattgaacttgttatgaaaccaaagcttgaatttctgttaagaaccatgaagaagccacttaaagctgttgtagaatatccaaggtacttcagttattcactggaagggaggataaagccgcggttttgtgtacttcagagtagaaagatagactgcagtctgacagacatgctkgcaaaaaatgatgaactttttgctgaagagtacctgggagtaggaagatcacttgagacagatwtacawtcaagcraaggtgtcarcagcgtgcttcatatgaggaaatccacttctgcagtgctcaagcattgtgaaggtctggaatacagataa

SEQ ID NO: 3944 - DNA, 2016 bp, Oryza sativa
atggactccggcggcggcggcggcggcggggcgctgaggccgtcggcgctggacctggtggcggcgctgctcacggggccgggacgaccggaggaggaggggtggccgccctcgctcgccgagaaccgccacctcatcgtcctgstcaccacctccctcgccgtcctcgtcggctgcggcgtcgcgctgctcgtccgccgctcctccatctccgcgcccgccgtgagggcgcaggagccgcagccgcgggcccccgcccccgcgaagaggaagcaggaggccgagcctgaccccgacgacggcaggcagagggtcgccgtcttcttcggcacgcagaccggcaccgccgagggcttcgccaaggcgcttgcggaggaggccaagtcgaggtacgacaaggccgtcttcaaggtgctcgatctggatgagtatgctgcggatgatgaggagtatgagcagaagcttaagaaggagatcatcgccttgttcttcgtggcaacgtatggggatggggaaccaactgacaatgcggcgaggttctataaatggtttggagaggggaatgagagaggtgaatggttgagtaatcttcggtttggggtctttggcctcggaaataggcagtacgagcattttaacaaggttggaaaggtggttgaccaactcctcgctgaacaaggtggaaaacgcattgttcctcttggtcttggagatgatgatcaatgcattgaggatgacttcaatgcatggaaggaacttctatggccagaattggataaattgctccgtgttgaagatgataaatcggcagcaccaactccctacacagctgctattcctgaatatagagttgtattggtcaagccagaggaagccatgcatatcaacaaatcctttagtctcagtaatggtcatgctgtatatgacattcagcatccttgcagagcaaatgtggctgtgcggcgggagcttcacacgccggcttcttaccggtcctgcattcatttagagtttgatatttcagggactggtcttacatatgagactggagatcatgttggtgtatatgcagaaaactgcacagagactgtagaggagagtgctttaattgctttggcttcccatgcatctgatcccaaagatgctgagaggctaagacatctagcatctcctgctggaaagttttggcttcacatgagcttcatttggcagaaggagtattctcaatggatagtttcaagtcaacggagtctcttggaagttatgacagagttcccatcagcaaagcctccacttggtgtcttctttgcagccattgctcctcgamtgcagccgagatactactcgatatcctccytaaccgagktmccttggatgactccaacaagaattcatgtaacatgtgcgctagtgtatgggcaaacccctactggaaggatccataaaggagtttgttctacttggatgaagaactcgattcccttggaagagagccaagaatgtagctgggctccaatttttgttaggcagtcaaacttcaaactgcctactgatcctactgtgcctattataatgataggtcctggaactggtcttgcaccttttaggggcttcttacaggaaagattagctctaaaagagactggtgtggaactaggccatgccgtcctattctttgggtgcagaaatcgaaagatggacttcatatatgaggatgagctcaacaattttgttgagaccggtgcgctgtctgaattgattgtagccttttctcgtgagggtccttcaaaggagtatgttcagcacaaaatggcagagaaggctcccgagatttggagcatcatttctcagggtggttatatttatgtctgtggtgatgcaaagggcatggcaagagatgtacaccgcacactacacaccattgtgcaggaacagggttctttggacaactcaaacacagaaagctatgtaaagagcttgcagatggaagggagatacttgagagatgtctggtga

SEQ ID NO: 3945 - DNA, 1640 bp, Oryza sativa
atggagaaggtacgggcggcggggctgctccggacgcaggggctcatcggcggcaaatgggtggacgcctacgacggcaagaccatcgaggttgtgaacatgcaatttgctcttggaaatccctgtgagcagttcgttgagctaatttattttctgcaagatgctttgtacctggttcaaaatccagcaactggagagactcttgccaatgtgtcctgtatgggcagcaaagaaacatctgatgcaatagcttcagctcacagtacattctattcttggagcaaactcactgcaaatgagaggagcaaggctctaagaaaatggcatgatttaattatctcacacaaggaagaacttgcacttctcatgacactggagcaagggaaacctatgaaagaggctcttgttgaggtcacatatggtgcaagttttattgaatactttgctgaagaagcaaagcgtatatatggtgatattattcccccaactctatctgatcgtagattattggttttgaagcagcctgttggagtagttggagctgttacaccatggaattttcctttagcgatgataaccagaaaggttggaccagcattggcttgtggctgcactgtcgttgtcaagccatcagagttcacacctttgacagcacttgctgcagcagatcttgctcttcaagctggaataccagctggcgcaataaatgttgtgatgggtaatgctcctgagataggtgatgctctactccagagtacacaggtcagaaagattacattcacagggtcaacagctgttggcaaaaaactgatggctggatcagcaaatactgtgaagaaggtttctttggagcttggtggcaatgcaccttgcattgtttttgatgatgcagacattgatgttgccattaaaggcagtcttgctgctaagttccgtaacagcggacagacatgtgtatgtgcaaacaggatattggtgcaagaaggtatttatgaaaaatttgcaagtgcgtttatcaaggctgttcagagtttgaaggttggtaatgggcttgaagagagtacatcacagggccctctgatcaatgaagctgctgttcagaaggtagagaagttcataaatgacgccacttcaaagggagcaaacatcatgcttggtggtaaaaggcacagccttgggatgtcattctatgagccaactgtagtagggaacgtcagcaatgatatgcttcttttcagggaagaagtctttggtccagttgcaccacttgtaccattcaaaactgaggaagatgcaatccgtatggccaatgataccaacgcaggcttagctgcatatatcttcacaaagagcatacctcgttcatggcgcgtttcggaagctcttgaatatggactagtcggtgtgaacgaggggatcattctcaacagaggttgcgccgtttggcggcgtcaagcaatctggccttgggagagaaggatcaaaatacggcatggacgagtacctggagctcaagtacatttgcatgggaaacctgaactgatccacttgagagtaccgtgcgtcttaaaaccgaagtacctggctggtgatgaatcgaagccgggggcaagagtagctgcaagaactgaagagcactg

SEQ ID NO: 3946 - DNA, 1893 bp, Oryza sativa
atggccaggagaggaggagcagcagcatcgtcgtccatggctaatctcctcggcgtcgccttggtgctcgccgccacggcgcagacgtcggcgcgtggcggcggcggcggcggacgccatgactaccgcatggcgctgagcaagagcatcctctacttcgaggcgcagcgctccggcgtgctccccggtaaccagaggatcgcatggagggccaactccggcctcgccgacggcaaggccaacggcgtggatcttgttggtggctactacgacgccggagacaacgtcaagttcgggttcccgatggcgttcacggtgaccatgatggcgtggagcgtcctcgagtacgggaagcagatggcggccgccggcgagctcggccacgccatggacgccgtcaggtggggcgccgactacttcgtcaaggcgcacccggcgcccaacgtgctctacggcgaggttggagatggtgactcggaccacgtctgctggcagcggccggaggacatgacgacgagccgtcaggcgtatcgccttgaccctcagcatcctggctctgacctcgccggagaaaccgccacggcattggccgccgcgtcgctcgtcttccgtagctccaacccgggctacgcaaaccaactcctgcaacactccaagcagctgtttgatttcgccgacaagtaccggggaaagtacgacgacagcatgcctgtcgtgaagaaattttacgggtcattcagcggatacggggatgaactactgtgggcatcggcatggctataccaggcgaccgacaaccgccgctacctagattacttggccaacaatggtgacgcactcggcgggaccggttgggctaccaacgaattcggctgggacgtcaagtaccccggagtgcaagtcctagctgcaaagtttctcctgcaagggaaggccgggccgcacgccgccgtgctgcggaggtaccagcggaacgccgacgtcttcgcgtgctcctgcctcggcaagggcggcggcggtggcaacgtcgggaggacgcccggcggcctgatgtaccaccagggctggaacaacctccagttcgtcaccggcgcgtcgttcctgctggccgtctacgccgaccacctygccgccgccggccgcgggcaagccgtcgtgcggtgccaggccgggccggcggcgcgggcgtcggagctcgtcgcgctggccaagtcgcaggtggactacatcctgggtagcaacccgagggggattagctacatggtcggctatggcgcgaggtacccgcggcgcgcgcaccaccgcggcgcgtccatcgtctccatcagggccaacccgtcgttcgtgagctgcaaggatgggtacgcgagctggttcggccgcgccggcagcaacccgaacctgctcgacggcgccgtggtcggcggccccgacgggcgcgacggcttcgccgacgagaggaacaactaccagcagacggaggtggccacctacaacaacgcgccgctcatgggcgtcctcgctcgcctcgccggcggcggccgcggcgggctcgccgaagcagcgatcaagaggccggacaaccagaccttgctgccacctctcgcagctgcggcttcgccggtggagatcacgcagctgaacgcgacggcttcktggaagaaggacgggaggacgtaccgccggtacgcggcgacggtgagcaacaggtcgccggccggcggcaagacggtcgaggagctccacatcggcatcggcaagccgcacggcccggttttgggggctcgagaaggcggcgaggtacggctacgtgctcccgtcgtcgctggccgccggcgagagcgccgccttcgcctacgttgtccgcggccgcgccgcgccgccgccggctga

SEQ ID NO: 3947 - DNA, 1755 bp, Oryza sativa
atgacgacgacggccgccggcggagccaccctgtgcgcggcgagggaggagcaggagctcctggccacccgcctgaatgtgaacggcatccggccgccgcattgcgccgcggaatctatcctcatctacctcaccgcgccggggctctccatgatgcccatgcgggtgatggcctccgactccatcgcctccgtcaagctccgcgtccagacctccaagggcttcgtcgtccgcaagcagaagctcgtcttcgatggccgggagctcgcccggaacgacagccgcatcatggactacggcgtctcccacggcaacgtcctccacctcgtcatccgcatctccgacctccgcctcatcaccgtccagaccgtccacggcaacaagttcaggttccgcgtcgagcccggccgcaccgtcggctacgtcaagcagcagatcgccaagaactccacccacgacgacgaccaccacagcctcgtcctccagggcgaggtgctcgacgacgcccacctcatccacgacgtctgcaggaccgacggcgccgtcatccacctgctcgtccaccgctccgccaagctcgccgccaggcccgtcgaccgggacttcgaggtctccatcgtcgcgcgcaaccgcaacgccgccgccgacgctgctcaaccgacgttgcacctgcagagggacttcgccatcgagccggtcatcgtcaaccccaaggccgcgcttccgccagtgatcgagaacctggtgggcgccgtgctggccgggatggagaaggggaacgccccgatcatgtcgtcggagggcaccgggggggcgtatttcatgcaggacgcgtcggggcaggagcacgtcgccgtgttcaagccggtggacgaggagcccatggcggccaacaacccacgcggcctcccaacctygcccaccggcgaggggctcaagaaggggacacgcgtcggcgagggcgccatcagagaggtcgccgcctacatcctcgaccaccctcccggtggccgccgttcgttcgcaggacatcatggctccgccaccgtgggcttcgccggtgtcgcgccaaccgcgctggtccgttgcatgcacaggagcttcaagcaacctgcagcttccgaacaaggtcctccattgttcaaggtggggtcattgcaagcgttcgtgaagaacagcggcagctgcgaggacatgggacctcgtgcgttcccggtgcacgaagttcacaagatctgcgtgctggacatcaggctggccaacgccgacaggcacgccggcaacatcctcacctgcagagacgaacaaggccatggcctcaccctggttccgatcgaccatggatactgtcttcctgagagttttgaggattgcacattcgagtggctctactggccgcagtgtcgggagccattcagcgaggagacggtggagtacataaggtcactggacgcggaggaggacatcgccattctgaggttccatgggtgggagatgccagccaagtgcgagcgcgtcctgcgcgtcaccaccatgctgctcaagaagggcgtcgactcgggcctcgccgcgttcgacatggggagcatcttgtgcagggagacgctcaccaaggagtctgtcatcgaggagatcatccgtgaggttgaagacgatgttggtgatgaagctgccttcctgcagtctgtctctcaatccatggatcgccgtctgggtgaattatccaagaaaaaaaaaagtaatattttcycgtaa

SEQ ID NO: 3948 - DNA, 2373 bp, Oryza sativa
atgaaactcaattcagatttggaagatgcggaagtctccaggttaagcacaatttccaatagtgctgccatggatctcaagccagctatctcgtaccttcaacctgaagaattgaactttgtacacgatgctctgaagttggcatatgaggcacataatgggcagaaacgccgaagtggggaacctttcattattcatcctgttgaagttgctcgtatccttggggagcatgaacttgactgggaatcaatagctgctggtttattgcatgacactgttgaagatacagacatggttacttttgaaagaatagaaaatgagtttggtgtaaccgtacgccgtattgttgaaggggagacaaaggtatctaagctaggaaaacttcagtgcaaaaatgagggtaattcaaaacaggacgtcaaggctgaagatttaagacagatgtttcttgccatgacagaagaggttcgtgtaatcattgtgaaactggcagacaggctgcataatatgcgtacactcacacatatgcctcagcacaagcagtatgccattgccatggagacactgcaggtttttgcacccctagctaaacttctcgggatgtatcgaataaagtctgagctagaatatctgtccttcatgtacatgaatcctggtgatttcgctgaactaaagaaaagagttgaggacctctacaaggcccatgaacaagaattggaagaggcaaatcaaatcttaggggaaaagattgctgaggatcaatttcttgatcttgttagtgttgaaacacaagtgcgttcagtctgcaaagaactctacagcatttataaaactgcgctgaagtccaagagttcaataaatgagataaatcaggttgcacagctgcggatcatcataaagccaaaatcctgcaatggtgtggggccattgtgcactgcacaacagatctgctaccatgtccttggtcttgttcatggtatctggacacctatacctcaagctataagaacagaggatatggatctcatagcagaaagaggcattgctgcgcactacagtggaagaggggttgtttcagggcctgttcgtcctggaatatcaagtggaaggaattcaaatgggaaagtgatatgtctgaacaatacaggctttgctctgaggattggttggctcaatgcaatccgtgaatggcaagaagagtttgttggtaacatgagttctagggaatttgttgatactatcacccgagatcttctgggaagccgtgtctttgtgtttacaccaaaaggcgagattaaaaacttgcctaagggggccactgtggttgattatgcttacctgattcacacagaaattgggaacaaaatggtagctgcaaaggtgaatggcaatctagtttcaccaatccatgtacttgcaaatgctgaagttgtggagattataatttatgataaattatctgctaaatatgcattccagcgtcaccagcagtggcttcaacatgcgaaaactcgcagtgcaagacacaaaattatgaaattcttgcgggagcaagctgctctttctgctgctgaaataactgccgacgccgttaataactttgttgccgatcttgaagatgaaagtgactatgagcagtcgattccaagctctgaaaataaggactatacattcaactggcagaagatattgaattctgacaaactatcctttggaaacaagaagagcgactgctttttacctgttaaaaatgtctctgtgccaaaggttaatgggaagcacaacaaaactgtcaaagaactgggcatcaaaattaatggttcaacatttcgtggtgatagcttcactgattttattcaccctggtgtttccagcagtaaagaagttctccctagtgtggataactggaaagctggtatggttgcggaagtttcatcagctctaacagcgtgtggaatcaccatatgctcgtgtgtggcggagcgagataagagaaggggaataggtgtgatgttgttccactttgagggggcatatgagaatgtggtcagtgcatgctccggtgttgatatgattcttggggttcttggttgcggacaacaggcatcacgctgcatcagttcaccatctccagcaaaaaggagagacaattttgaagcaccaagaaatcagtccgctcaatggttcaggagcagtccgatcttggttgatgatgctgtgcaacccataacttgtccttcaaagaagaatgtggacaatgtggaccaagccaagccattttctcacgtcttaccgagacgaatcgctcgtgccaaggactcattgacccttgattcagttgagaaatgggagatatttctgtttggcatttga

SEQ ID NO: 3949 - DNA, 795 bp, Oryza sativa
atgcacccgccggccgccgccggaggagaccacgccacggcggcgccggcccccgcgaccggcgcagccgcagcaacagcgtcggactacgcgcactacccgaggctttcgccggaggacgtggccccgcccccccctccgtcctaccacgctgccgcctcctccgcgccgccctactcgggcaacccctacgtctcctcacccgccggcggcgtcgcgcccgcctccaagaatacaatggatacggtgaaggatgttctcggcaagatggggaagaggtttggagaggcggctcgcaagacggagaccctcaccggcaacttctggcaacacttgaaaactggaccaagcattacagatgcagcaatgggcagggtttcccagatcaccaaagtcatagcagaaggtggatatgataaaatcttccatcaaacatttgatgtcctccctgacgagaaactgaagaaaccatatgcatgttatctgtcaacctctgctggtcctgtcatgggtgtgctatacctgtccaataaaaagctggcattctgtagcgataatccacttgcttacaaggttggagacaaagatgagtggagctactataaggttgtcattccccacacccaactgagatcagtgaatccttcaacgagcagaacaaatgcatctgagaaatacatccaggtggtttccgttgataatcatgagttctggttcatgggcttcgtgtactatgacagcgccgtaaagaatctgcaggaagcacttcaggaggctcagaatctacgagcttag

SEQ ID NO: 3950 - DNA, 1200 bp, Oryza sativa
atggccaccattactgctgctagtcccagacccagtgctgctcctgcagccatggaagagaccagcaaggcgatgcctactagcgagtggcctgccgccagcggcggcaatgcgtcgccgccggcgaggtcccggccgtcgctgctggtcatattcagcgcgtgcctcgtcctcctcggcgccggcgggccgctcctcctccgcgtctacttcgtgcacggcgggacccggctgtggctgtccgccaggctccagatctccggctggccgctgctgctgccgccgctgtgcgtgtcgctctaccgcggccgcaggcacgggatcggcaacctcctcctcccgcggcgcctcgtcggcgccgccgccgtgctcggcgggctgtacgccgtgtcgtgcttcgtgtacgcgctggggtcgcaggcgctgccgctgtccacgtcgtcgctgctgctggcgacgcagctggccttcaccgccgtgttcgcgttcctcttcgtgggcctccggttcacgccgttctcggcaaacgccgtcgtgctgctcacmatcggcccggcggtgctgggcgtcgggccgtcgtcggggaagccggcgggggagtcctccagggcgtactggacggggttctgcgaggccatcggcgcggcggcgctagccgggctggtgatcccgctcgtcgaggtcgccacggcgaggtacgggcgccgcacggggcccgcggcgagggtgccgcctccctacgcgacggtgatgcagatgcaggcggtgatgggcgcggcgggcacggcggtgtgcgtgctcggcatggcgatcaagggcgacttccaggcggtggcgcgggaagcggcggcgttcgggctcggcgcggccaactactacctcgtcctcgcctgggacgccgtgtcgtggcagctgctcaacctgggcatcatggggctcatcacctgcgcgtcgtcgctgctcgccggcatcatgatcgccgtgctcctgccgctctcgcaggtcctcgccgtcatcttcctccacgagaagttcgacgggacgaagggcatcgcgctcgtgctctcgctctggggattcgcctcctacctctacggcgagaaggcgcagaagaagaaggaggcgcagaagatgcgcgagcgcgagcaggaggtggcgctggcacagaagaccgcagacgtggagtcagcggcgccttag

SEQ ID NO: 3951 - DNA, 2622 bp, Oryza sativa
atggattcacggatggatcaatacgaggttatggagcagattggccgtggcgcctttggtgctgccatcctcgtgaaccacaagaccgagaagaaaaagtatgtgctgaagaaaattcggctcgcgaggcaaacagagcgctgtcgcaagtctgctcatcaagagatggcccttattgctcgcctgcaacatccttacattgttgagttcaaggaagcatgggttgagaagggctgctatgtttgcatcgtgacgggatactgtgaaggtggtgatatggctgaactgatgaagaaagcaaatggaacatactttccagaggagaaactactgaaatggtttgctcaattggcattagctgtggactatctgcattcaaactttgttttgcatcgtgacctcaagtgctcaaacatatttctcacaaaagatcaggacatccgtcttggggattttggcctggctaagactttaaaggcagatgatttaacctcttcggttgtgggaacaccaaattacatgtgcccagagctgcttgcagacattccttacggattcaagtcagacatatggtctcttggatgttgtatgtacgagatggctgctcatcggcctgccttcaaggcatttgatatggctggactaattagtaagataaatcgctcctccattggccctttgcctccatgctactctccatctatgaaatcacttatcaaaagcatgctcaggaagagtcctgaacatcggcctacggcatctgagattcttaaaagcccataccttcaaccttatgttaatcaataccgcccatttgctgatatatcacatcccattcactcactggagaaacccattaccagttcacggagcagtcagaaaagcatgtctggtagtcagtgtagtagtatttctggaagcgatattgacagtatacagtcaagtgaaaggaacacatcagggccatctacaagttccaacaacacgattgatactgaaggtgctgaagctactgatcatgtatcagtgaaaaactgttcaagatctgatgatgttaaaagcaataaggaaactgtgggtcctgaattagagaggcaagattcatctaaatccatccatgttgatcagcggcctagaaacgagattaagcagccaaaaatcatcaagaagatattaacaactctaagagaagagagcaagctcaggcaaaataattcacctattagagctagccgtgtaaaactaaattcaccaaaccctgccaagcaggcaatggaagatgttgatgcagctgttggaaaggtcaagaacaggacaccaccaagttattctagacgccttagtatcccccctcgtaggccactgggagcagagagtccacttcatgctgacacaaaacgagctcacaataaggtcatcaaggagcgtgcaaaaagtccttgtcgacctgtccatggtccagataatgatatcattgagcctccaggttttccaatggctcccccaagtcctcttgggggtgttcaaatgaaagttggcaatgcacgggcaaaatctgctccaccgagggctgtatctatcaaggaagacagcagtgattgttccagttccacaattgcttatgctgaaaataccgagctgtctgaaccatcaaaacaagattcatcagcccagttggtttcatcttgtaagtgctcaatccctgacgctgccatacaaaaacatgacctaacagcaatgcctagctcggagctaaacaccaccaatttccagaagagtatggctagtaatgatgatgtttgtgaaaacttagccttggagccatcttctgatatatctgagcaggtgagtattttcaaggacaacgtgccctgcagtaagatatcacagagcactgccaatgccattgtacagaatgatgaggataagttcacagtgcaagaattgctttcatcagtagcagatattgccccatttgtttcaacgaaaaacttcgcactagaaaaaggatcccctcctattcaatcactggaaagaacatcatctccccatttgaaccctccaattgaggatgtcatacatgtcataagacacagcagcttccgtgtctgcggtgaacaggcagttgcagagaacgctgaaatgggagtccaaagttcagatgttggcaagcttctcaacgtggtaagagaagaggtggattcgagaagcatcccatcaaataatcttgtgcctcacagacttcctgattgtgctgcacccaagcccaatatttcggaaactaataccatcagctcgaaaacagcctgttcagatgttgtaaaatttcttactgtccctgaagtaaattctactactactgctatcaacaatggattcaaggaggaggcaagcccaacgaaggaaattctagatgtcaagtctttcaggcagcgagccgaggcccttgaaggactcctggagctttctgcggatctactgcaacacaataggctggaggagcttgcggttgttctaaagcctttcgggaaggataaggtatctcctcgagaaacagcaatctggttggccaaaagttttaaagggatgatgaatgatgaagcgagtcgcagttcaatgtga

SEQ ID NO: 3952 - DNA, 402 bp, Oryza sativa
atggcgtccaaggcgttcgctctgttcctggccgtgaacctcgtcgtgctcggggtggcaagcgcctgcggcggcagcccgtcgtgcccgacgccgacgccgtcgaccccgaaaccgtcaacgccgaagccgacgccgtcggctttcgggaggtgcccccgcgacgcgctgaagctgggcgtgtgcgccaacgtgctgggcctgatcaaggccaaggtgggcgtgcctccggcggagccgtgctgcccgctgctggaggggctcgtcgacctcgaggcggcggtgtgcctctgcacggccatcaggggcaacatcctcggaatcaacctcaacctccccatcgacctcagcctcatcctcaactactgcggcaagaccgtccccaccggcttcaagtgctaa

SEQ ID NO: 3953 - DNA, 2556 bp, Oryza sativa
atggcgagccgggaggagagcggcaatggcsgttgccgttgcgcgaagccggcggcggattaccggagctcggacagccggagctcgagccggcggagcacgcggttcaaggaggacaacgagtacgtggagatcacgctcgacgtcaagggcgacgacacggtcgccatccagagcatccgcaacggcgccgacatgcccgaggtcgccctcttggcgcgcggcctcgcgcagcagccgccgcmgtccgcggcgcccggccccggcgggctctcgtcgcggctcaaggcggtgaggaccgagctgaggcggatcgcgtcgtggaagttccccagcggcgttctcagcggcggcggcggcggcggcgacgcgccgggcaacggcaacgaccgccgccctygcctcgaccggagcatgaccggcgccgcccgcgcgctgcgcgggctccagttcctmaactccagcgccgtcaccaatggctggccggaggtggagaagaggttcgagcgcctcgccgtcgacggcttcctcctccgctcccgcttcggccagtgcatcggaatggttggatccgaggagtttgcggttcagatcttcgactcgcttgcgcggcggcgagggatcacggctcagttgctgaccaaggatcagctccgggagttttgggagcagctctctgatccaggatttgatgccaagctgcagactttctttgacatggttgacaagaatgcagatggtcagatcactgaagaggagctcaaagaggtcctcaccctgactgcctctgcaaacaagctgtccaagatcctggagcgcgtcgacgagtacaccgcgctgatcatggaggagctcgatcccgatcaattaggctacatagatctggtgacgcacagctccaacatcagccagctgatcagccagaagctggtgccgacgcacgaccggaacccgctccggcgggggctccggcggctgtcctacttcatggaggacaactggaagcgggtgtgggtgatggcgctgtggctggccatcaacgccggcctcttcacctggaagttcatggcgtacaagcgccacccgacgttcgacgtcatgggctactgcgtctgcgtcgccaagggcggtgccgagaccaccaagttcaacatggccctcatcctcctccccgtttgccggaacaccatcacctggctccgttctcgcaccaagctcggcgccgtcatccccttcaatgacaacatcaacttccacaaggtggtggcagggggagtggtggtaggggtggcgctgcacggggtgactcacctgacgtgcgacttcccgaggctgctgcacgcgagtgatgcggcgtacgagccgatgaagaagtacttcgggcagacacggatcccggactactggtggttcgtgcgcggcgtagaggggatcaccggcgtgatcatggtggtgctcatggccatcgcctacacgctggcgcacccgtggttccgccggagcaagcttagtgacagcaacccgctgaagcggctcagcggtttcaatatgttttggtactcccaccacctcttcgtcatcgtctacatcgccttcgttgtccatggcgtctgcctctacatcaaccggacttggtggaagcagacgacatggatgtaccttgccatccctatcctgctctacgccggtgagcggattttccgggctctgaggtctcatggcttcaccaccgtaaggattgagaaggttgcaatctatcctggcaacgtgatagccatccacatgaccaagccccatgggttcaagtacaagagtggccagtacatctatgttaactgcggcgagatatkcaggcctccgatgaacggccagagcggcctcctccgggctgactgcatgtccatggagcaccattcaaggttccccaagctcctgatcgacgggccgtacggcgcgccggcgcaggactactggaagtacgacgtcctcctcctcatcggcctaggcatcggcgccacccctctcatcagcatcgtcaaggacgtcctcaaccacatctacgacgaccccgagtccgccgcctcgccgcacaccaccaatggcggcggcgccgcggccgcggcgaggagggcgttcatgacgaagcgcgtctacttctactggtgcacgcgggaggagggctcgttcgagtggttccgcggcgtgatgaacgaggtggccgaccgcgacgccgggcgcgagttgatcgagctccacaaccactgcaccagcgtgtacgaggagggggacgcgcggtcggcgctggtgacgatgctccaggcgctccaccacgccaagaacggcgtggacgtggtgtccgggacgcgggtgcgcacccacttcgcgcgcccgagctggcgcgacgtgttcaagcgcgtcgccgtgaaccaccaggggcagcgcttcggcgtcttcttctgcggcgaccaggcgctmacgccggagctccgcggcctcgcccaggacttctcccacaagaccaccaccaaattcgtcttccacaaggagaatttctag

SEQ ID NO: 3954 - DNA, 1506 bp, Oryza sativa
atggaggtggagttgccatggggcgcgcggtgcgcggcggcggcgttcttcgtgtcctcgctgtgcgtggcggcgctcggcgtcgtgctcctgctcctcaggcggtggccgtggtgcggctgccatgtctgccgcgcctacctggccgggtcgtggaggagggagttcgccaacctcggcgactggtacgccgacctgctccgccgctcgccgacgggcaccgtccacgtccacgtcctcggctgcaccgtcacggcgaacccggcgaacgtggagtacatgctcaagacgcgcttcgacaacttccccaaggggaggccgttcgccgcgctcctcggcgacctcctcggcgacggcatcttcaacgtcgacggcgacgcgtggcgccaccagcggaagatggccagcctcgagctggggagcgtcgccgtgagatcctacgcgtacaagatcgtcgcccaggaggtggaggcccgcctcatgccggtgctcgccaacgccgccgacagcggcgccgtggtcgacctgcaggacgtgttccgccgcttcgccttcgacaccatctgcaagatctccttcggcctcgacccgggctgcctcgaccgggagatgcccgtgtcggagctcgccgacgcgttcgacgccgcgtcgcggctgtccgccatgcgtggcgcggcggcgtcgccgttgctgtggaagatgaagcggtttctcaacgtcgggtcggagagggagctcaagaaggccatcaagctcatcgacgggctcgcggcggcgatgatccgggagcgccggaagcttggcgtcgcgaacagccacgacctcctgtcccggttcatggcctcctccggcgacgacgcgcgcggcgccgccgacgacaacttcctcctcgccggccgggacacggtgtcctccgcgctcaccactctgttcatgatcctgtccaagaaccccgacgtggcggccgccatgcgcgcggaggccggcgccgccgccggcgagagcgccgccgtcagctacgagcacctgaagcggctgaactacacccacgccgtgctgtacgagaacatgcggctgttcccgccggtgcagttcgactccaagttctgcgccgccgccgacgtgctccccgacggcacctacgtcgacggcggcgcgcgcgtcatgtaccacccctacgccatgggccgcatgccgcgcatctggggcgccgactgcgacgcgttccggccggagccgtggctaaccggcgccggcggcgcgttcgtgccggagagcctcttcaagtacccggtgttccaggccggcctccgcgtgtgcctcggcaaggagctcgccatcaccgagatgaaggcggtcagcgtcgccgtcgtgagggcattcgacgtcgaggtcgtcggcgagaatggccggtgcggcggcggcgccgccgccgcgccaagattcgtgccggggctcaccgcgtccatcagcggtgggctcccagtgaagatcagacgcgtttag

SEQ ID NO: 3955 - DNA, 1032 bp, Oryza sativa
atgaccatggaggcggagcgccacggcwaggaccagcgcggccccttcctctcctcctcctctcggcggccacggtcgccaggtaggcgtactgccacsgccttcgccgtccgccctcgttctctccccgatcccccatttcaggctccgtctcgtgatcgtctcaccctgcctgcctcgtttcgtcgaattccgttccctgcagcggcggaacatcagcatcagcaccagcagcagtaccagtacctgggccgcagcagctcgtcggcgctgcgcggcggcggtggcggaggaggaggaggagccgggctggggcgtggggccggaggaggattagcaattgttcctcaagggccgtacccgtatggcggcgaataccagccttctcatgatggcagaagggatgtactggatgaggtagagatccggcagctccttattgatcatgttgggcatcggtgctgctggggaagtaggcctgctcgcacatggaaaattacctctattgaggattgcaatgtatatgttggaactttggaaactttcatcgaggaaagggacactgtaactaacaaggaaccctatgatggtgggaaaatagatggaagagacaagggtcctgtgcttgcagtgtgggaacttgatctgaggaagacactgtcagcaagaaaagtgagcgcaactaggggagctgcctctgtgcctgacgaagtattccacagagcccaggggattcagctatgcaacatacaggcgtaccagtgcactcctgcattcttcgccgattcgtaccagctcaaccagttctcctcagaagtcgtagctagccggcttccagttccacsgtccgcgagggtcatttccgagaggcacatcatctccgtcgtgcctgtgatccgtgtcacaatggctcatcgcaagcaatgtttcagcttctacgtcgtcggctacaatagggatgttttcataagagattatccttcgaaattctgctggggcctctgctgttgctttgagtggctgcggaactag

SEQ ID NO: 3956 - DNA, 1344 bp, Oryza sativa
atggcttgcaatgtgctccttttctctgcatttgtcgttgtcatgtccttcttcttgtgtagtgttcatgccaaggtcaacatgaatgcatcctctttgactaatggagatgatagtctgagaggaaagtcgtctctcgagtcgaagaaggctgtgttcgatgtgcgcaaacatggctcttacggagatggacaacatgatgatacaaaggcattgtcaaaggcatgggctgcggcttgctcctctttgcaaccttctattgttcttgttccaaagggcaagagatacctcaccaagcacattacactatctggcccatgcaaatccagcatcacgttcatgatagagggtactttggtggctcctccaaagaggtcagattggagcaaggaaactattaggcactggattatgttcaatggtgtaattggtcttactgtcgctggcggtgggacggtcgatggaaatggcaagatttggtggcaaaattcttgcaaaacgaatgcgaaacttgcatgcactgaatctccaacggccttgacattctactcctgttcaaatctgaaagtggagaacttgaagctactaaacagccaacaaatccacatgtcagtggaggattgcacaaatgttaggatctctggcctgacaatcacagcaccaggcactagcccaaacaccgatggcatccatatcaccagaagtaaaaatgtacaagtgacaggctgcacaatcaagaccggggacgattgcatgtcgatcgaggatggaactgagaacctccatgtcaagaacatggtgtgcggaccaggacacggcatcagcatcgggagcctaggcgatcacaactctgaagctcatgtcaacaatgtcaccatcggcactgtcaggctatatggcacaaccaacggagctcgcatcaagacatggcagggtggtcgggggtacgcgaagtacattgttttccagaacatgatcatggaaaatgtttggaaccccgtcattatcgatcaaaactactgtgactctgcaacaccatgcaagaaacagttgtccatttgtgtgaataatatggaagcttataatttagtgtttttgtctcagacatctgcagttcagattagcaatgtggtcttcaagaacatcaggggcacaagtgcttccaaggaggctatcaagctggactgcagcagaaatgtaccttgccaaggcataaccttgaatgatgtcaagctcactgtcaagggaggtggtggtgatgcgaagagcacttgccgaaacgcaaaatggaagaaatcagggacagttgttccacagccttgtgcttccacaacaactgtatga

SEQ ID NO: 3957 - DNA, 1875 bp, Oryza sativa
atggaagacgccagcaggggagaagaagaaaattcgatgttcgagaccagccacgtcctcggcgcgctgctcgcctcctcgccgctgctggcgcgggcgtgggaccggcggcgctgtcggcggcggcgggcggcggccggggcgccgagatcttcaagccggtcgggctccgcggggacgccgccgggcggctgttcgcgccgctggtcgccgccgagccggaggacgccggcgaggaagccggtcgccgtgcaggcgctggcgctgcaggggttcttgaggctgtgcagatcccctgaattccaggtgctgctgaaccagatcagaggcaaggcagtagtgttcactggccactccctcggtggtgccattgctgcccttgtggcgctgcactacctttgcacatcatcgtcaagctcagcatttgcccctgctcctccggtgctttgtgtcacattcgggagcccgctgcttggcaatcaggccctgtctagggctatcctgcgtgagcggtgggccggcaacttctgccatgtggtctcacagcatgatgttgtcccaaggctcctcttctgcccactcaatgtcatccctgtgcacattgttgttggtatgcagctgcaccagttgccggtgcgcgcgcgccgtgcagccggtgtggtggccacggtcactgcccgcatggctgacaccaaccaggagtcgctgcggcagctgatccaagagcacgccggtgaggcagcaattgagcagaagcttgctgctccggaaatacccagtgggagcccataccggccttttggggcgtatgtcctgtgctctccggatggtgcggcgtgtgtcgacaatccaacagcagcggttcagatgctatatgcaacatttgctgcaaggcgtgctccagagacaggcgcggtgccacctgaggctgcacactcctgctacggtgacctcgtgctgagcatgccgcaccacttgctgctcaagaggcgccttggtgccacagtcaccgcacctgccgcgtccaactacgacgtcggcatctccattgcactggaggcatcaggtatcaccggtgaagctacagaggcagcaccggcacggcagtggctgaagacgtcgaagcgcgtgggccggagcccgagcctgaactgtgcgagcctcgcaacgcggttgggacggatcacgccgtgccgagcgcagatcgagtggtacaaggcattgttcgatgccaacaccgggtattacgacgcattcaagcagcggctatcacctaagaagttcagcaaggccaacatgtaccgcatcaagctcgcacagttctgggatggcgtcctctccatgcttgacaccagccagctcccctacgacttccaccgccgtgccaagtgggtcaacgctgcccacttctaccagctccttgttgagccacttgacattgccgactaccaccgaaacaacctacaccgcacacgcggctcttacatcacccatggccgggagagaaggtatgagctgttcgacaagtggtggaaacagaagggctgcacagatcccagcactggtgacacctctgccaccacgacagcgaggaggagcaagttcgctgggctaacgcaggacccgtgcttctgggcgagggtggaggaagcgcgcgagcagacagagagtgccaagagcgaacgcgacatgacatcgctggcgaggatgctggaggacttgcacaagtttgagcgccattccagcgagctggtggagaacaaggaggtctccattgatgtcgttgcgccacagtcgagctactccctgtgggtgaaggagtggaatgagctcaagctccgggaagaagttaggacaatattgtttcaattttga

SEQ ID NO: 3958 - DNA, 702 bp, Oryza sativa
atgaggaagtcaagcatcaacggcgtccatgtcatcggagtcccggtgaccgccaaggcgtttggcatagaggaggaggtgtcgttggccaggggccagtcgttcaggaaggccgacggcgatcaccttgcggtctcgttgtcgcaccccagcccttatacgtctttcggctataagcacagcagcaagggtcaggttatccactgggtgagcaagctgagcagaagggcacagggcttcagggagcatgtgaccttggggccaaagctgtcggagacggtgaaggggaagctgagcctgggcgcgaaaatcctgcaggccggcgggatcgagcgcgtgttccggaaggcgttctcggcggagaaaggcgagcggctggtgaaggcgctgcagtgctacctgtacaccaccggcgggcccatcgccgggatgctcttcgtctccaccaagaaggtcgccttccgcagcgaccggccggtcacggtcacctcggccaagggcgacgtcgcgcgggtgccctacaaggtggtggtcccgctcaggaggatcgcccaggtgcggccgagcgagaatgccgacaagccggaggagaagtacatccacgtcgtcacggtggacggcttcgagttctggttcatggggttcgtgagctaccagaggtcgtgcaagtacatgcagcaagccatctcggagctgcaatga

SEQ ID NO: 3959 - DNA, 1497 bp, Oryza sativa
atggcgtctaaaccaagcagccgagcggaaagcaaccaggcggcggcggcggtgccgtcgctgtacgggcgcgccctgccgtcgccgccggcggtggagttcgcgtcggcggaggggcggcggctgttcgcggaggcgctccaggggggcaccatgcaggggttcttcagcctcgtctccgtcttccagacgcagtcggagccggccttctgcggcctcgccacgctcgccgtcgtcctcaacgcgctccgcatcgacccggggcggcggtggaagggcccctggcggtggttcgacgagtccatgctcgactgctgcgagcacctcgacacggtcagggcggaggggatcaccttcggcaaggtcgcctgcctcgcccamtgctccggcgccgacgtccgcaccttccgcgccgcccaggccacgctcgccgacytccgccgccacctcctgcgctgcgcctcctcccaggattgccatctcgtcgcctcctaccaccggaagcttctcggccagactggaacagggcatttctcgccgattggcggctaccatgctgggcaggacatggcgctgatcctggatgtcgctcgcttcaaataccctcctcattggattccgctgccgcttctttgggaagccatgaacacgattgatgaagcaactgggcttctcagggggttcatgcttatctcaaggaatactgaagctcctttattgatccgtgcagtgaattgcagggatgaaagctggcaaagcatggcaaagtattgcatagaagttgtcccaaatcttttgagggataacagcgtagacaatgtcctaacaattctttcccgtttagtgaatcatcttcctcccaatgctggaaattttatcaaatgggtcattgaagttaggagacaagaggaaggaggatccagcccaagtaaagaggctaacgaaatgcctttcctgaaggaaaaggtcctacagcaaatccgtgatactaagctttttcagctggtccacaaactgcaatgttctaagcagccctgttgtagttgctcgtctttaacggacgaagattccatttcccagattgcagccagtgtgtgctgtgaagcaaccgcattgctaagtgggaatctgtcatcaagagatggattatttttcagtgaaacttgttccggatgtacacaagtgaatgatgaggggcttaaaaatgtcattacaggcaaagtggtatctgaaggcaatggacatgttgataagctttcaccgatatcctcgactgaaacatgcttctgcaattcaactctgagcaatgaaactgtcaattatccatcaaacacagacattctaactgttctattactgtcgttacatcctagcacatggttgtgcattgaagatgagaagttgaaagctgaatttcagagccttgtttctacggacgatcttcctgatcctcttaaactggaggtgtgctgtctcactcctagaaccttgcattga

SEQ ID NO: 3960 - DNA, 522 bp, Oryza sativa
atggaacacaaggaggctggctgccagcagcccgagggcccaatcctttgcatcaataactgcggcttctttggcagcgcggcgaccatgaacatgtgctccaagtgccacaaggagatgatcatgaaggaggagcaggccaagcttgctgcctcctccatcgatagcattgtcaatggttgtgacggtgggaaggagcatattgttgctgccagtggtagcacggcggtggcggtggctcaggtcgaggcgaagacgctcgttgtgcagcctaccgatgtcgcgggcaccagcgaggaggttgctgtagtccccaaggtcaaggaagggccgaaccggtgcgctacctgtaggaagagggttgggctgacgggattcaactgccggtgcggtaacatgtactgtgcgttgcaccgctactccgacaagcatgaatgccagttcgactaccggactgcggctagggatgccatcgccaaggccaacccagtggtgaaggctgagaagctcgacaagatctaa

SEQ ID NO: 3961 - DNA, 1515 bp, Oryza sativa
atgggcaactgctgcggcacgccggcgacggcggaggagggcgggaagaggaggaggagggggaagcagaagaaggcgaaccccttcaccgtcgcgtacaaccgcgcgccgtcgtcggcgggggcggcggcggggaggcccgggctgatggtgctgcgggacccgacggggcgggacctcggcgcgcggtacgagctcggcggcgagctggggcgcggcgagttcgggatcacgtacctgtgcacggaggcggagacgggggacaggtacgcgtgcaagtcgatatcgaagcggaagctgcggacgccggtggacgtggaggacgtgcggcgcgaggtggagatcatgcgccacatgccgtcgcatccgaacatcgtcagcctccgcgccgcctacgaggacgaggacaacgtgcacctcgtcatggagctctgcgagggcggcgagctcttcgacaggatcgtcgcgcggggccactacaccgagcgcgccgccgccgccgtcacgcgcaccatcgtcgaggtggttcagatgtgccacaggcatggtgtcatgcaccgcgaccttaaaccagaaaacttcctatatgctaacaagaaggatagttctcctctgaaggcaattgattttgggctatctgtgttcttcaggcctggtgagcggttcactgaaattgtaggcagtccatattacatggctccagaggttttaaagcgacactatggccctgaagttgatgtctggagtgcaggagtgatactttacatacttctttgcggtgtaccaccattttgggcagaaaccgagcagggagtagcgcaggcaattatacgctctgtggtagatttcaaaagagaaccatggcccagggtatctgagccagctaaagatcttgttaagcggatgttggacccaaatcccatgacaaggcttactgcagaacaagtacttgaacatccatggttacatgattctaaaaagatgcctgacattcctcttggtgatgctgtccgagctagactgcagcaatttgctgcgatgaacaagttaaagaagaaagcccttaaggtcattgctgagcatttgtctgcagaggaagcagctgacataaaggacatgtttgataaaatggatgctgatattgacaaaaatgggatcctggactatcaagaatttgttgctgtgtctatccatgtgaggaaaataggcaatgatgaacatatccagaaggctttctcatattttgaccaaaataagagtggttacatagaaattgaagagcttagagaggccttggttgatgaaatagatggcaatgatgaagacattattaatagcatcatccgtgatgtagatacagacaaggatgggaaaataagctacgacgagtttgccgtcatgatgaaggccggcactgactggaggaaggcatctaggcagtactcaagacaaaggttcagtaacctcagtctgaagcttcaaaaggacggatccatcagtgacgacacgcaatag

SEQ ID NO: 3962 - DNA, 5300 bp, Oryza sativa
atggcgtgcctcgcgccgcagctcaagtggcccctttccacccgcgcggcggcgttccgggagcacggcggcgccggaatcggcgggttccgtaccgttaggctccactgcgcggtgtccaccaccgcgctggtagaggccgagagctcggattccttggcccccggggcaaggcgtctcgtcgtctacgacggagccgtcgcgccgccgcctcttccgggaggtttcggtgaggcgattctcaaccaagaagccgtggtggcggccgcagcggcggaggccgtcgctctagcaagggcagcggcggaggtcgccggagaggtcgtccggatgtcgcaaaccgagcaacggcaccggcctgacttcgtcacgacgcacgacacggaggacaactacttggccagagagatcctccgcgccgaggcgggattgggggcgaggtacgccgatgcctgtctgtcggaggatgcggggttctccagtatcttcagcgatgaatccgaggtagatgacgatgagcagtgcgtccagggcgtggctgtgaaatcggtgcgccagtccgagaggagagctcggagggtgagggcggcgatgaaggcggccaaatcgttcagcggccggaatcccgtcgcggcgtcgtcgtcggcgaggaagaagaggttgaagggttgccggagtcctctcggctgcttctacaagatgaccggccggaggcttctgacagcaaaacaagaagttgagttctcacaaggcattcaggatctcctgaagttggaagctatccaaaaggagcttgctcactacaacggcggtgaaccaaccttctcacagtgggcagaagcagctggaactgacgagaacactttgcgaaaacgtctgaactatggaatttcctgcaagaacacgatggtaaagtctaacgtgagacttgtaatctcaattgctagagagtttgaaggtcctggaatggaattttctgatcttattcaggaaggaatacagggccttgtacgaggcgctgaaaagtttgatgcttcaaagggttttcgattctctacatactctcactggtggatcaaacaagcaatacgcaaatccgttttagaacaaacccagattattcgcttgccgcaagttccccgggtgaaggaatgccgacggcggctccgccggcagctgaagaggctacccaccaacgaagagatcgcatccgacaccggcatgccgctcaggcgcgtcgaggcggcgatgagcctcccaaaatacaccgtttccctcaccagcaaggtcgggtgcactgacatgacataccaggagatcacgccggacacgagcacggagacggcggaggagatgctgcaccggtggctgatgaaggaagacgtggacagggcgctggacgggctgagcccgcgggagaggcaggtgatcaggtacaggttcgggatggacgacggccggctgcggacgctgcacgacatcggtcggctgatgggggtgagcagggagaggatccggcagatcgagctggtcgcgttccggaagctcaggggcaggaagaaggttcagtcgctgcagcattatctgcagcctgtggagagctgccccacggccacccccaacaacccctcgccgtcgcgtcgtccagctccaaatccgaatctaagggctcgaaaaccttcgccctcgcctccgccatcactgccgccgcctctggtgcattccttctcgcgtcatctggtggcgggttcgggggcggcgccgggggtcctctcggcggtggaggcggtggatggggcgccggaggaggaggaggtggtggtggtggtggcggcggcggcgggttctggtcgcggatcttctccggcggcgcggcgcacgcggaatgagaagtcgtcgggggattgggacccgcacgggctcccggcaaacatcaacgtgccgatgacgaagctgagcgggctgaagaggtacaagatctccgagctcaagttcttcgaccgcgccgcggaaggggaaggcgcgttcacggggcccgaggattccttcttcgagatggtgacgctgcagcccggcggcgtgtacaccaagtcgcagcttctgaaggagctcgagacgctcgtgtcctgtggcatgttcgagagggtcgacctcgaggggaaggccaagcccgatggcacccttggcctcaccgtgtcttttgtcgagagcgtgtggagcgctgctaagcagttcaagtgcatcaatgtggggctaatgtcgcagtcgggccaggttgacttcgaccaggacatgacagagagggagaagatggattacctccggaagcaggagcgtgattaccagcagcgtgttcgtggtgccaagccgtgcatattgccagataacgtgcgtggggaggtgctaggaatgatgaagaagcaggagaaggtgagcgctaggctcctgcagaggatcagggaccatgtccagaaatggtaccacaatgaggggttcgtctgcgcccaggtggtgaactttggaaacctaaacaccagtgaggttgtttgcgaggtggtcgagggggatataaccaaagtggagtaccagttccaggataagcttggaaattttgttgaggggaatacccaaattcctatcatagacagggagctcccacagcagcttcgacctggccatatctttaacattggagcagggaagcaagctctgaagaatataaattcacttgctttattctccaatatagaggtgaatccacgccctgatgaaacaaaagaagggggcattgtggttgaaatcaagcttaaagaattagaaccgaagtcagctgaagtaagtacagagtggagcatcgtacctggacgtgaaggccgaccaactctggcatccattcaacctggaggaactgtgtcatttgagcaccggaacatctatggtctaaacagatccattgttggttctgttacatccagcaacctgctcaaccctcaggatgatctctcattcaagcttgagtatgttcatccttatctggatggtgtggatgaccgtaataaaaaccgcaccttcaaaactagctgcttcaataccaggaaattgagtcctgtctttgttgctggccccaatatggatgaagctccacctgtttgggttgacagagttggattcaaagccaacataacagagagcttcacacgtcagagcaaattcacatatggccttgtggtagaggagattacaacgcgtgatgaaaccaacagcatctgcactcatggttctcgagcaatgcctagtggtggcctgagtatggatggacctcccacaaccctcagtggtactggcatagatcggatggcttttctgcaagcaaatataactagagacaatacagaatttgtaaatggtgcagttattggcgacagatgtattttccagttggatcaaggtcttggcattggaagcaaaaacccattcttcaaccgtcaccaacttactttgacaaagtttgttaatttaaacaagcaggagaaaggtgctggcaagccacttccagctgttttggttcttcatggtcattatgcaggttgtgtaggagatctgccaagctatgatgcatttacacttggaggaccttactcagttaggggctatggtatgggtgaactgggtgcttccaggaatgttcttgaggttgcgagtgagttgcgtattcctgtgaggaacacatatgtgtatggatttgttgaacatggcactgaccttggcagttccaaggatgtgaaagggaaccccacagagttcttccgacgggttggtcatgggtcatcatatggtcttggcgtcaagcttggcttgccacagcgttacaccggttcggatcagcggcaaatgtgcccggcgaaaaccagctcatggatgaggcagctcacaagctcttcacggcaaggccaccacggcgacgtcctccgcctcttcttcaccggggtcagactccaagctggcagccgtggcacggtggacccctggccgggggccgtgcccacggccctccgcgcctgcgcgcacctcgccgacgtcgcctccggccgcctcatccacgcgctcgtgctcacccgccccgccctcgcctcggacgccgtcgccgccaccgcgctccttgacatgtactccaagtgcggcctcgtcgccagcgcccgcaaggtgttcgacgaaatggcgtcgcgcggggacccggtcgtctggaacgcgctgctcgcgtgctacgcgcgccagggcctcccggagcacgcgctggcgctggccgtcaagatgcggggcatcggcctgtgtcccgacctggtcacctggaacatcgtcgtctcaggcttcgcgctggcgggcgatgacctgatggccggcgatttagtcggcgccatgaaagacgacgggttccagccggacgtggtcacatggacatcgcgcgtctccggctctgtactgaactttcagtacggcagagcacgcgcactgttccgagcaatgatggttgccggcggccgtgtcctgccaagctcggcaacgatcagtaccatcctgcccgcgttcgccaatgtcgctgacgtgaagcatggcaaggaagtccacggctactctgtcgtggccggcgtcgagcaagagctcaccgtcagcagcgccctcgtcgacatgtacgccaagtgcggtctcgtgctcgaagcgcgccggctattcgacaagatgccacagaggagcacggtgacatggaactccatgatcttcgggctggcgaactccggccactgccaagaagccgtcggcctcttcgaccggatgctgcgcgacggcgcaaagcccgaccacctgacgttcaccgccgtcctgacagcttgcagctacggcggcatggtcgaggtcgggaagatcctgtaccgagccatgcaggtggagtacggcgtcgagccgaggctggagcactacgcctgcatggtccacttgcttggccgcgccgggaggctcgacgaggcgtacggtttcatcagggcgatgcccctggagcccgaccgcttcgtctggggcgcgctgctgggagcgtgccgaagccatggaaacatcgagctcgcggagcttgcggcgtcgcgcctgcttgcagtcgagccagacaatgcggcgagctgcctcctgctctcgagtgcgctggcgaacgctggcaagcaggatgatgtcttcaagatcaagaggttggtgaagagacggcgtctgaagaagcttgatagctatagttgggtggagacttctttgta

SEQ ID NO: 3963 - DNA, 1500 bp, Oryza sativa
atgaccaagatcgtggggacgctggggccaaagtcgcgctccgtcgacaccatctcctcctgcctcaaggccggcatgtcggtggcccgatttgatttctcgtggggagacgccgagtaccaccaggaaacccttgagaacctcaaggtcgccatcaagtccaccaagaagctctgcgcggtcatgcttgacacggtcggcccagagttgcaggtggtgaacaagagcgaagcctccatctccctcgaggagaacggcactgttattctcacccctgaccaggggcaggaggcctcctcacaagtgctgccaattaacttcgctgggcttgctaaggctgtgaagccaggtgacacaatatttgttgggcaatacttgttcacaggcagtgagactacttcagtttggttagaggtttctcaaattaaaggagatgatgtggtctgtgtgataaaaaacacagcaactctggctgggtcgctcttcacattgcattgctcgcagattcacrtcgacttacctaccctatctgatgaggacaaggaggttatcagaaaatggggtgccccaaacaagattgacttcctctctctttcttatacaagacatgtagaagatgtgcgacaggcacgtgaattcctctcaaagttaggtgaccttagccagacccagatttttgcaaaaatcgagaatgtggaggggttgaataattttgatgaaatcctccaagaagctgatggtatcatcctgtcaagaggaaaccttggaattgatcttccacctgaaaaggtgtttttatttcaaaagtctgctctgcacaagtgcaacatggctggaaagcctgctgttgttactcgtgttgtagacagtatgactgacaacctcaggcctactcgtgcagaggctacggatgtggcaaatgcagtgcttgacgggagtgatgccattctccttggtgctgagactctgcgtggtttatacccagttgagactatttcaatagtgggtaaaatttgtgctgaggctgagaaggtcttcaaccaagatttatacttcaagagaactgtgaaacatgtgggggagcccatgacccacttggagtctattgcttcctctgcggtgcgagctgctattaaagtgaaggcgtctgtcataatttgcttcacatcatctggacgtgctgcaaggctaattgccaagtataggccaaccatgcctgttctatctgttgtcattcctcgtctaaaaacaaatcaactgaggtggagtttcactggcgcatttgaagcaagacaatcgctcatagttagaggcctctttccgatgcttgctgatccgaggcatccagctgaatcaaccaacgctacaaatgaatccgttttgaaggttgctcttgaccacggtaaagtttctggtgtgataaagtcgcatgatcgcgttgttgtctgccagaaggtgggagattcctcggttgtgaagatcattgagctggacgattag

SEQ ID NO: 3964 - DNA, 627 bp, Oryza sativa
atggtgaacacggcggcggtggcggcggcgaagggcagcaggggcagcgggctgccgctggcgtcgctgaaccacatcagcatcgtgtgcaggtcgttgcaggagtcgctcaccttctacaccgacgtgctcggcttcttccccgtccgtcgccccggatccttcgacttcgacggcgcatggctgtttaattatgggattggtatccatctgcttcaggctgaagatcctgacagcctgccagggaaaacagagatcaatcctaaagataatcacatctccttccagtgtgagagcatggtggcagtggagcggcggctgaaggagctaggcatcccttacatacaacgatgtgtggaggaaggtggcatctatgtggaccaaatcttcttccacgatcccgatggcttcatgatcgagatctgcaactgcgacaacctccccgtcgtccccctcggcgccgaccagccgctcgtcatggccgcctgcaagagggccgccgtcatcaagcagcagcagcaggcgtcctcttctccggcgacggcggcggcggcggcacagtgcgccgtgccatcgtcgacgaaggcgatccacgtcggcgaggaggcacacatctcgtgcgcctaa

SEQ ID NO: 3965 - DNA, 2175 bp, Oryza sativa
atggagtcgtcggcgccgccgctcagccgcaagagggggaaacctatgggctatggcgccggatttacgccaccggtggcgtggcggcctctccgatcggttcacaccgtcgaccgccgctttgctttcgagcgcgcgattccgctgcggcgacgcccgcgccgatgtccaaatgtcctccagttcataaagggaatcatgcaaagtcagtcaggcatgggaggtccggaaaaggagaatatcagtggttgggaaaagacttcttttcttttcatgtctcttgaaccgtttatgcggctgccagcttgcgatagtggctggtttccgggcgtcgtttgttctggtcatcctataaattggcagagtatcaaaagcagcgacgggaagagccccatagtggttggcccttggggtggcacaggaggatacccttgggatgatggtgtatactcaacggtacgccaggtcatcatcacccatggtgcagctattgactccataaggattgaatatgatctgaaaggaagttcagtctggtcagagacacatgggagcaccgatggaggttctgaaacagataaggtgaagctagatttccctgacgaaatccttgtgtctgtaagtggctattacgggtcagtctgtggaactccagttatcataagatcattgacatttcaaagcaatcgttccatatacgggcctttcggtactgaagatgggacacctttctcactcccagtaagcagtggtaaaattattggttttcatggaaggtcagggtcgtatctcaactcaataggcttttatctgaagcaagtgaatgtttcagatcgatcaaattctccagtcttgcctcagagtagaagtattacaagtgcatataacaaaaatggttatagctttcctgagggtgcttcaggatatgacatggtccttgcagtgagagataggggtgacagctatgctgtttatactagcaattaccctaatcagcagtatacaaatccatccccagattacaatgatggaatccgctggaataaggtgccacaaactagtccatcactgcagatggtatcttttcctagtggttacggagatagaggaggtgcagctctgagtagccacgagacctatggtccttggggtggaagtggtggcaccatgtttgatgatggcatgtacaccggtgtgtggcagatcaatttgactcgtgcagtgggaattacttctataaaggtactttatgatcgaaatggccaagcagtgtggggaaacaagcatggattcagtggagctgtttcaccagacaagatagtatttgattttccctcggaggtcttgactcatataaccggctactatggcacgacaatgatcatgggtccaacagtggtcagatcactcacattccacacaaacaagcggagatacggaccatatggggatgagtgtggcacgtatttctccaccagtttttctgatgggaggatagtaggattccatggtagggagggatggtacattgatggcatcggggtccatgttcaggaaggtaacttggctgcaccgcgagttagtagtagatcaacgattgagatgaacccctctttgcgctacgacatgcttgcacaatcaaggagtgaaacatacaatgaggttccttatagcatggtgaaagaaccagttccaatggggccagggccatggggtkgcgaaggaggccggccatgggatgatggtgtctacactggtgtgaagcaagtctatgtgatgagaggcacctttatcggctcgatacagatcgagtacgacaggggtgaccaatccgtctggtctgcaaggcatggaaccagtggccacataacccataggattaaactggactacccacacgaggtcctgacatgcgtatacggctactacaacaccaacagggaggaagggcccagggttctgaggtcgatcaccttcatcagcaaccgagggaagtacgggccattcggagaggagttcggggcatacttctcgtcggcgaagacggaagggaaggttgtgggcttccatggccggagcgggcaacacctggacgccattggggtgcatatgcagcactggatgggagacaggaggcctgctcccaagtacgtgctatcaaagtacctcttctga

SEQ ID NO: 3966 - DNA, 366 bp, Oryza sativa
atggcggcggcctcagcggcggcgcaggcggagggaacggtgatcgcgatccacagcctcgacgagtggaccatccagatcgaggaggccaacagcgccaagaagctggttgtgattgacttcactgcatcatggtgcggaccatgccgcatcattgctccagtttttgccgatctagcaaagaagcacacaaatgctgtttttctgaaggttgacgtcgatgaactgaagcctattgctgagcaattcagtgttgaggctatgccaacattcctgtttatgaaggagggagatgttaaagacagggttgtcggtgctatgaaggatgaactggcgagcaagcttgagctacatatggccatgtag

SEQ ID NO: 3967 - DNA, 2390 bp, Oryza sativa
atggcgtgcacggctccacgggaggaggacctcctcatggaggaagacgagcaccggccgcctctcaaccgggccctgctccaccgcagcgccaccaacaacacctcccaggttgccatggtcggctccaacccctgccccatagagagcctcgattacgagataatagagaacgacctgttcgatcagaactggaggtcgagagggaaagccgaccaggtgcggtacgtggtgctcaagtggaccttctgcttcgccatcggcatcatcaccggcatcgccggcttcgtcatcaacctcgccgtcgagaatgtcgccggcctcaagcacaccgccgtgtccgccctcatggagtccagcagctattggacagcgttctggctgttcgccggaaccaacctggccctgctgctgttcgcgtcgtccatcacggcgttcgtgtcgccggcggccggcgggtcggggatcccggaggtgaaggcctacctcaacggcgtggacgcgccaaacatcttctcgctcaggacactcgctgtcaagataatcggtaacatcgcggccgtgtcatcctcgctgcacgtcggcaaagctggcccaatggtacacacgggcgcgtgcatcgccgccatcttcggccagggcgggtcgcgcaagtacggcctcacctgccgctggctgcgctacttcaagaacgaccgcgaccgccgtgatctcgtcaccataggcgccggcgcaggtgtcaccgcggctttccgcgcccccgtcggcggcgtcctgttcgctctcgaatcactctcgtcatggtggcggagcgcgctgatctggcggtcgttcttcacgacggcggtggtggcggtggtgctgcggatgttcatcgagctgtgcgcgtcggggaagtgcgggctgttcggcaagggtgggctgatcatgtacgacgtcagcaccaagtttgatgacctcatgacctaccacctcaaggacatccccatcgtcgtcctcatcggcgtgatcggcgccatcttgggcgccctctacaacttcctcatgatgaaggtcctgcgcgtctacagcgtgatcaacgagaggggcaacgcgcacaagctgcttctggcggcggtggtgtccatcctgacgtcgtgctgcgtgttcggcctgccgtggctggcgccgtgccggccgtgcccgacagccggggcgccgtcgccgccgaacgggacgtgccattcgctgaaccgattccggcggttccactgcccggcggggcactacaacgacttggccagcctcttcctcaacatcaacgacgacgccatccgcaacctctactccacgggcaccaacgacgtctaccacccgggctccatgctcgcctttttcgtcgcctcctacgcgctcggcgtgctcagctacggcgtcgtcgcgccgtcggggctgttcgtccccatcatcctcaccggcgccacctacggccgcctcgtcgccatgctgctcggcggccgctcaggactcgaccacggcctcgtcgccatcctcggctccgcctccttcctcggcggcacgctccggatgacggtgtccgtgtgcgtcatcatcctggagctcaccaacaacctgctcctcctcccgctcgtcatgctcgtgctgctcatctccaagaccgtcgccgactccttcaactccagcatctacgacctcatcctcaatctcaagggcctcccgcacctcgacggccacgccgagccgtacatgcggcagctcaccgtcggcgacgtggtggccgggccgctgcggagcttcaacggcgtcgagaaggtgggccacatcgtgcacacgctccggaccacggggcaccacgcgttcccggtggtcgacgagccgcccttctcgccggcaccggtgctgtacggcctcgtgctgcgcgcgcacctgctggtactgctcaagaagcgggagttcctgacggcgccggtgcggtgccccaaggactacatggccgggaggttcgaggcgcaggacttcgacaagcgcgggtccgggaagcaggacaccatcgccgacgtggagctgtcgccggaggagatggagatgtacgtcgacctgcaccccttcaccaacacgtcgccgtacacggtggtggagaccatgtcgctggccaaggcgctcgtcctcttccgcgaggtcggcctgcgacacctcctcgtcgtgcccaagtcctgcgacaggtcgccggtggtggggatcctgacgaggcacgacttcatgccggagcacatcctcgggctgcacccggtgctggtgggaagccggtggaagcggctccggtggcagaagggcgccgtcgccaagaaattccggtcgctcctcgactggctagccaacgacagcggctg

SEQ ID NO: 3968 - DNA, 1340 bp, Oryza sativa
atggagggcgcggaggcggaggagcggaggctggcggcgtcgctgacggcgcggtactcggactgggtggtggaggcgctggacgagctcccggggagcttcatcctcacsgacccggccatgccgggccaccccatmgtctacgcctccagggggctcgcctcgctcacggggtacccgccgcgggaggtgctcggccgcaacgcgaggctcttccagggcgccgacaccgaccgcgccgcggtggccggggtgcgggaggccgtgcgcgggcagcggccgcaccaggtctccatcctcaactaccgccgcgacggggaagcccactgggtgctgctccacctcgcgcccgtcttccacgcctccgacggccgggtgctccacttcctcgccgtgcaggtgcccatcgcgccgcccgcgtcccggcgccgcacgccgccgtgccgggccgcccgcccgttcgtggtgttcgcggcgtgccgcgaggaggccagggtggaggaggagtgcccctgcgcgagccacgcggggraggtgttcgtggatgtggataagagagggcaggatgctgaggaaccgcgggtagctagcgaacatgagaaagaaaaagcactgagtacagctaacagcatcttctctgcgttgaaccgctacagcaaactcactggtctagtggtctgcgggaagagatgtgattctgttggcatcccagcactcagttcttcattaaatctttctcttggtagaatcaaacaaagctttgtattgactgacccccatttgcctgacatgccgatcatctatgctagtgatgcttttctatcactaacaggttactcaagagaagaaatcttgggctgtaactgcagattcttgaatggtcctggcactagtgtggaggttttagaacagataaatcaacatatttgttctgagcaagcttgcacggttcatctactaaactacaggaaaggtggaagctcgttccgtgatcttctacatatatctcctatacgaaatgcatcgggcaaggtagcatttcacgtgtgggttcaccttgatgagggtgcaaagtatgattttaatgggctgacccccgaggtatggcagcttggtgctgttggtgcggtcaggcgaacggtggcgtcaagaatgtcttgtcaagacggacacacgacgcggcgatcaatcaacatatcgattgcgccgttgggagagcagagaacagatatgacggatgagcaaaagctgccgaggcgagcgaacctcccctcaactcacgttcacgtcgtcgtcgcgccacccctgacgccgagggaggggaagatgatggggaagtw

SEQ ID NO: 3969 - DNA, 2625 bp, Oryza sativa
atggccccgatcatgagtggggcggcggcggcggcggggggcacgggcggcgcggtcccgctcatcaagaacgccacctccgcgtcccagatgtcgcgtggcaaggccggcaccggcgccggcgcggtcgtctgctactccccgatgatggtcaccgcctacggcatctggcagggcgcctcccctcttgacttctccctccccctcttcctcctccaggtcgccatcatcgtcgccaccacccgcctcctcgtcatcctcctcaagcccttccgccagcctcgcgtcatcgcggagatcctcgctggcgtgatactggggccgtcggtgatggggcaggtttcgacgtgggcggtgaaagtgttcccggagcggagcttgctgacgctggagacggtggcgcacctggggctcctctacttcctcttcctggtcggcctcgagatggacgtgaacaccatcaggaggtcggggaagaaggcgctcatcatcgccgtcgccggcatggcgctgccgttctgcatcggcacggcgacgtcgttcatcttccggcaccaggtgtccaagaacgtgcaccaggcctccttcctgctcttcctcggcgtcgcgctctccgtcaccgcgttcccggtgctggcgcgcatcctcgccgaggtcaagctgctcaactccgacctcggccggatcgccatgtccgccgccatcgtcaacgacatgtgcgcctggatcctcctcgcgctcgccatcgccatctcagaggtcaacagttcggccttctcctccctctgggtgctcatcgccggggtggccttcgtgctcgcctgcttctacgtcgtccgcccgctcatgtggtggatcgtccgccgcgtccccgagggggaggccatcggcgacgtgcacatcacgctcatcctcaccggcgtcatggtcgccggcgtctgcaccgacgccatcggcatccactccgtgttcggcgcgttcgtgtacggcctcgtcatgccgagcggcccgctcggcgtcgtgctaatcgagaagctcgaggacttcgtcaccggcctcctcctgccgctcttcttcgccatcagtggcctccgcacgaacgtgaccaaggtccgggaccccatcaccgtgggcctcctcgtgctcgtgttcgtcatggccagcttcgccaagatcatgggcaccatcctcatcgccgtctcctacaccatgacgttccgcgacggcgtcgccctggggttcctcatgaacaccaggggcctcgtcgagatgatcgtcctcaacatcgggagggacaaggaggtgctcgacgacgagtcgttcgccgtgatggtgctggtgtcggtggccatgacggcgctggtcacgccggtggtgacgacggtgtaccggccggcgcggcggctggtcgggtacaagcggcggaacctgcagcggtcgaagcacgacgcggagctccggatgctggcgtgcgtgcacaccacccgcaacgtgccgtcgatcatctcgctgctcgagctctccaacccgacgaagcgctcgccgatcttcatctacgcgctccacctcgtcgagctcaccggccgcgcctccaacatgctcgccgcgcaccactcggcgtcgaacccgggcggcgccagcgaccacatcttcaacgcgttcgagagctacgaggagatggtcggcggcgtgtcggtgcaggcgctcacggcggtgtcgccgtaccagacgatgcacgaggacgtgtgcgtgctggcggaggacaagcacgtctcgctcatcgtgctcccgttccacaagcagcagaccgtggacggcggcatggagcccatcaacgcgtcgctccggggcttcaacgagagcatcctcgcgtcggcgccgtgctccgtcggcatcctcgtcgaccgcggcctcagcgccgccgcggcgaggatggcggccgtgcaccacgtcgcgctcctcttcttcggcgggcccgacgaccgggaggggctcgcgtacgcgtggcggatggtcgaaaacccgggcgtgtgcctcaccatcgtccgcttaatcccgccggggtacacggcgccggcgatctcgccgccgcagccgccggtgcccgccgcccactcccgcgccatcaacgtcgtccccgaggtcgccaagagcgagcggcagatggacgaggagtacctcaacgagttccggtcgcgcaacctcggcaacgacgccatcctctacgtcgagcaggtggtggccaacagcgaggagacggtcgccgccatccgcagccagctggacaacgcgcacgagctgtacatcgtcggccgcaaccccggcgaggcgagctcgccgctgacgtcggcgctcgccgagtggatggagtcgccggagctcggccccatcggcgacctcctcgtctcctccgagttctccaagatggcgtccgtgctggtcatgcagcagtacgtcatcacggcgccgctgccgccgccggtggcgctcgccgggccgccgacggatgaccccgtccggcagtatttgaccaacgccaaccagcggccgtcggtggcgatcggcggcaaccagatgggcgccgccggccgaggcggatggagcggcggcgccggcgggtactga

SEQ ID NO: 3970 - DNA, 1730 bp, Oryza sativa
atggcgatcgccgcgccgcttttccggctcgccgccgccgccgccgtggtgatgggcgtggtgtcgccggcggtgaaggcggcggggggcgggaacagctcgacggcgtgcccgctcgacctcgggacacgcttcgtttcccgcctgctggcccgtcttcgtcccagctcgccattttcgccgtcctactgcgccggggtcaccaccgccaagcagtacgtcgccaccgttggcaacgccgcggttcttggcagcctcaactcctcctgtggctccgacctcgccgacctgtcgctctgctccagctgcctcgccgccgccatcgacgcctcaggtcgactcgtcgccgccgccgcaaagggaaccaatccgcagaactgcttctacctcaccgtcctttacgccgccggcgtctccagctctgccggcccgacctcccccggcaccgccaactgcgccctcggcctcgctctctccaccccttcgtcttcttcgtcgccggcgtccagttccaaccacaccaacatggcggtagccaccgccatcccggtygcttccgcgctactcgtctccgtcatagcagcgctgcttgtatggaggaggaggcaggacagcatcaggagcaagagccgccgactctccggcgagcggcggttgtcgcgcccgcggccgaacgtcggctcggttctgttcagcctcggcgagctggcgaaggcgacctgcgggttcgccgagcggaacctcatcggccgcggcgggttcggcgtcgtgtaccgcggcgtgctcgacgacgggtccgtggtcgcggtcaagaagatgctcgacccggacatggagggcggggacgaggagttcaccaacgaggtggagatcatcagccacctccggcaccggaacctcgtgccgctgcgcgggtgctgcatttccgacgacgacgccgacgagggcaagcagatgttcctcgtctacgactacatgccgaacggctcgctcgaccactacatcttcaaggacggcggcgatggcggacgccggccgccgccgctgtcgtgggcgcagcggcgcggcgtggtcctcgacgtggcgagggggctggagtacctgcaccacggggtcaagccggggatctaccaccgcgacatcaaggcgaccaacatcctcctgggcaccgacatgcgcgcgcgcgtggcggacttcggcctggctcgccggagccgggaggggcagtcccatgtcacgacgcgcgtcgccggcacgcacggctacctctcgccggagtacgcgctgtacgggcagctaaccgagaagagcgacgtgtacagcttcggcgtgctggtgctggaggtgatgagcggccggcgcgcgctcgacctgtccgacccctccggcgtcgtgctgatcaccgactgggcctgggcgctcgtcagggccgggcgcgcggcggaggtggtcgccgcggcgctgcgcgagcgggagggccccgccggggtgcacgccatggagaggttcgtgctcgtcgggatcctgtgcgcgcacgtcaccgtggcgtgccgccccaccatgccggaggcgctgaggatgctggagggcgacatggacgtgcccgacctgccggaacggccgcagccgtacggccagaggatcgcgttcgacgaaggcgaagccaatttcagcgcctcgtccgtgctgagcggccccccgttcatggacttcggcgacatgctccggtg

SEQ ID NO: 3971 - DNA, 1010 bp, Oryza sativa
atgccttcctccgccgcagccgccgccgacggcggcgacatcgaggaggtggaccgcctcaagaagaggatcaggaccctcgagatggaggagacgaagttgaaccagcatatggaacgcgtcatccagggaatcgaagcgaacgaggcgtacctcgtcggcatggtcctcaggattatggaaaagggcccagaggatgagactgctgaggatgattgtgatgttggctttcatttgcagcgaaaaattatattccgtcctattgctggggtagtgtaccctagcaaacttaagcctggagatttaattggtgttgacagtacatcaaatgaacactactgtggcattggtggtctcgaaaaacaaattgaggagcttgtggaagcagttgtgttgccaataatccacaagaactgcttccagaggttgggaattcaccctccaaaaggtgtacttctgtatggaccacctggaactgggaagacactcgttgcccatgcatttgcttcccagacaaatgcaacatttcttaagctaactggtccacaacttgccgtgaagcttattggtgagggagcaagacttgttcgtgatgcctttcagcttgctaaagagaaagccccatgcattattttcattgatgaaattgatgcaattggaagcaagcactttgatagtggtgatagggaagtgcaacaaacaattgtggagcttcttaatcagttggatggcgtcgggagctatgagagtataaaggtaatagctgcaactaatcggccagaagttcttgatcctgcttttctgcgatctggccgtttagatcaaaagattgaattccctcatccatctgaacaggctagaatccactcccgaaaaatggacaaaaaccctgatgtaaactttgaagagttggcttgctgtacagatgattttaatggtgcacagctaaaggctgttcggcatgaggactttgtcagagcaattgcgcaagtaaaagacgggaattactg

SEQ ID NO: 3972 - DNA, 2358 bp, Oryza sativa
atgatgagcttcagggactggatctcgtaccggctcggctcgtcggtgctgtcggcgaggcccttctcgctctccgcccaccacgacggcgccgccgcccagcccgggggcgatggggatggcgtgatgcaaaatgagattgtagaaactgtgtctgccaatagatttccatctaatgatatccgcgcatcagattcagaggtcacatccagtccatcttatgaaccagatcatgatagcacaaagtcagatccactaaagcatgttgaggctcttcaaattaagttcctgcggcttgtgcacagaactggagtgcctcccactactgatgttgtcgcacaggtactgtacagattgcaccttgccaacttgattaaagctggcgaatcagattccaagagaaccaaccttgctatcaacaaagccagagttatagcagcagagcaagaagcaccaggtggacctgatttggacctgcccttgcgaattcttctacttggaaagactggtgtgggaaagagtgccacgataaactccatttttgatgaaccaaaggttgctaccaatgcattagctcctgctactgaaaggataaggaggattgatggaacaatcaaaggaataagagttacagttatcgacacacctggtttgttgcctcattaccatagacagaggaagaacaggaagattttacatgctgtcaagcgcttcattaaaagatcaccacctgacatcgtcttgtacttcgagcgactcgaccatattaacagtagatactgtgaatacccgctgttgaagctcataactgatatcttgggttcttcgatgtggttcaacactgtccttgtgatgactcactgctcttcatctcctcctgaaggaccagatggttatcctctggaatatgactcctatgcccgttattgcaagaatgtggtgcagcgtcatatccaggtggctgcttctaacacacagatggagaaccctgtagttcttgttgacaatcatccaatgtgccgacggaacaccaaaggtgaaagagttttacctaatgggaaggtatgggtatcagaacttttactgctatgtggggcgaccaagttgttggcagaagcaaattccttgcttaagttccaagatagcttccttctgtcacaagcaaataccagactgccttcactgcctcatcttctttcatcactccttaaacctaatccatcatcaagatcagaagatgttggcattgacatgaccgaagtgtcagatgatgaggatgaatctgatcagctaccgccattccgtgttctgaagaaatctgaatatgaaaaattgtcaaaagaacagagatctgcatatcttgatgaactagactatcgtgaaactctgtacctaaagaaacagtggaaggagggaattaggaggcaaaagcttgttgaagctcaaaatgttgatgcatcaaatgctgttggtgatgattacgaagaaagcgtgtccccagaggttgtgcacatgtcagatatggaaattccgtcaagttttgactctgattatccagtccatcgctaccgttaccttattactgatgatatggtgttcagaccagttttagatccacaaggatgggaccatgatattggatttgatgggatcaattttgaagtatctcaagatttagaaaagaataccactgcatcaattgcggggcagatgagaaaggacaaagaagacctgtatatccaatcagaatgttcagtaagctacagcggtaagaatggccgctccttgatagggagcatgaatatgcaaacagcaaataaggatctggtctgtactgtcaatggggatgccaggttccacaatttgccctggaacactactggaggaggcatttccattactaaattcggtagcaagtattttactggtgccaaattagaggattccatcactgtcgggcgacgagttcagttggtcggcaatgctgggaggatggttggctgcgggcaagtggcacatggaggtggcctggaaatgacattcagggggaaagattaccctgtgagggaagagagcatcacagtcgcagccaccgctctgtcgttcgagaaggagactgtaatcagcaccaatcttcagtcagacttccgaatgggccgcggatcgaaagtctcagtcagcgctaacctaaacagcaggaacctaggccgcttctgcgtcaagactagcacttcagaccattctgagatagccctggtagctgcggttacactgttccagttctttctcaggagaaggacagcatcaactgataaaggtgagcaacagtttgagtttgacacttactcagatgagtaa

SEQ ID NO: 3973 - DNA, 1335 bp, Oryza sativa
atggccatggagaaggtggacgccaaggagagggagaagatcgaggccgtccgcaagaccctccgcaagcaggctccgctcaccgccaagcaggcgatgtactgcaacgacgcgtgcgtggagcggttcctccgggcgagaggggagagcgtgaagaaggcggcgaaacacctgagaaccgtcctgtcctggagggacaccatcggagccgatcacatcatcgccgacgagttctccgccgagctggctgacggcgtcgcctacgtcgccggccacgacgacgaggcccgacctgtcgtgggaggtctttttttacaggtctttcgaatcaagcaggactacccaaagttccactcccagaaatcgttcgtgcggttactggtgttcacgctggaggtggccgtgtcatgcatgtcccgcttcgtcgaccagttcgtcctcctcttcgatgcaagctttttccggtcggcgtcggctttcctcaacctgctcatgggcacgctcaagatcgtcgccgactactaccccggccgcctccaccgcgccttcgtcatcgacccgccgtccctcttctccgtcctctggaagggagtgaggccgttcgtggagctggcgccggcgacggcggtggtgtgctcgctggacttcgaggactcgctggaggacgcgtcgttcacggcgtacccgcggacggcgtcgctgcggttcgagccggcggcggccctgctggcgaccgggacgaagggcatcggcgtcggctccgcctcgtcgcggttctccgtcaccgtgtcgcacgacaacaccctcaagccgtggtacctgtccaccaccacgccgtcgtcggtggggcctcgctccgtggtgccgacctccagcccgtccctcatcggcgcgtcgccgctctcggcgcgctccttctccttcgcctcccccgccgcgcgctccaccacgacgccgcccgtccaccgcggcgcaccgctgacgccgttctcgaccaagggcgggcagaaggcgccggcgccagcgcagcagttcccgcggacgccgcggccgtcgttcctgcagtcgccgtcgatgctgttcgcgttcaagaaggacggccaggccagccgcggcgagcgggagcgcgagtccttcctgccgttcctccgcttctaccgccgcccctacgacgagatatcgtatcgcgccaagatgcggccgccgctgggcgggctcatcgccatcgtcgacgagaagtcgaagcagcacaagacggtgcagccgccgctgcgacggcacgccgggctccaccaccagcagctgttccagctccaccaccaccagaggatctga

SEQ ID NO: 3974 - DNA, 1293 bp, Oryza sativa
atgcacgcgcaccagcaccagcacgcgctgctcgcggcgctcctcgcgtgcgcgctcgcggcgtcgtcgtcgacggccggagcgcagccggcggggcagcaggggtatgcctacggcgacgtgtccgggcagcaggtgcacgtcagcacgacgatgatcgtgctgctggccgccgtcgtcggggttttcctgttcatcgcgatctccaccatctacctccgccactgcaccggttacgaccccgcgacggagggcggcggcgtcggcgggagccgttccatgatcctccctgccaacagcttcgtctcgaggcggcagcggcggccgcgcgggctcgactcgtcggtggtccggatgttccccaccatgaagtacgccgaggcgaaggcgctgcgggtggggaaggtcgccggcgccgcgctggagtgcgcggtgtgcctcagcgagttcgaggacgacgagatgctcaggttcctgcccaagtgcagccacgccttccacccggactgcatcggccagtggctcgccagccacgtgacctgccccgtctgccgccgcaatctcgaccctaacaaggacaccaccgaagaggtgatcatcccggccgccgccgccgccgatccgaacagcacctccagtgaaatagttgtgatacggcaagaagacggggcgcacccagcagccgtggtgatcgacgtggtcaccgaggaggacgacgaggagcggaggaaggaggagctagagcttcaggcgataggcacccagctccgcgcgatgcggtcacggtcggggctgcggccaaagacgtcggcggcgaagcttccccggtcgcactccactggccactccctcgccgtccggctcgacggcgacctagagcggtacacgctgcggctgccggagcacgtacacagggagatggtcgcggcgggggagcagagcgtgcgccgcgggaggagactcggggaaggggtcggcatgggcgctcggtgcagcccccggttttcgcggtcgggcagatggtcatcttttctctcaaattctttgtcaggaaagctgtctttcctctccccgtcgtcgaggagaacgccggatagcacccaggtggaagtgtcatcatcctcgtcgtcgtcggtgacgaaggtgaaagggaagcgcgtggccsccgtcgatgttgccracgacggttctgctcatgggactgcacagtaccctggttgcactgtggccagctcggcggcggcggcggctgtggacgtggagaaggcagctaccaggcaagttcgaacatag

SEQ ID NO: 3975 - DNA, 740 bp, Oryza sativa
atggcttcttgcggcgcttcctgcctgacaattgcggcgctgctgctagcggcgtgcgcctcctccgccgccgccaccagctacaccgtcggcgacgcgtccgggtggacgatcggcgttgattacaccagctgggccggctccaagtcgttcaaagtcggagacagcctcgtgttcaagtacgcgagcggagcgcacacggtggtggaggtgagcgcggcggggtacctggcgtgcgcggcggccaacgcgctcggctccgacagcagcggctcgaccaccgtcgccctcaagacgcccggcaagcactacttcatctgcaccatcgccggccactgcgccggcggcatgaagatggaggtggacgtctccggctcctcctcctcctccagcggcggcggcggaggtggaggtggcggtggctccaccccctcctcgccatcgtcgccaacaccgaccacgccgaatccgtcgaccccgacgccgaccacgccgtatccgtcaaccccgatgccaaccacgccgtatccttcgaccccaatgacgacgcccaccacgccgtacacgactccgacgtctccggcgtgctctggcggcgccggcgccacgccggtaaccccggtgacgccgggcaccgtcccgttcatgtcatacaatggcgccggcgggctcggaccggtggcgctggctaccatcggaatggtttgcttcgtcgtattcgtgcagcttggactgttgta

SEQ ID NO: 3976 - DNA, 1248 bp, Oryza sativa
atgtcgacgacggcggcgacgacgctggggcgcgagctcctggaggcggcgagggcgccggagttcgcggggtttctgcgcggcctgcgccgccgcatccaccagcacccggagctcgcgttccaggagcaccgcaccagcgcgctcgtgcgcgcggagctggacgcgctcggcgtcgcgtacgtgtggcccgtcgcgcagaccggcgtcgttgccaccgtcgtcggcgccgccggccccggccccgtgttcgggctccgcgccgacatggacgcgctccccatccaggaaatggtagaatgggaattcaagagcttggaagatggaaagatgcatgcgtcgatgggcacgatgttcatgtctgcaatgctgctgggagctgctaagctgctgcaatcacgcagggatcatttcaatgggaaggtgaagctcgtgttccagccggcggaggaggggtacgccggcgggtactatgtgctcgaggaaggcgctgtggacgatgtgcagggcatcttcggcatgcacgtcgatgcgggtttgccggcgggcgtagtcgcgtccaggccggggccgttcctcgccggctcggctcgcttcacggcgaccatcaacggtaaaggcggccacgcggcggcgccccaccacgccgtcgatccgatcgtggctgtctcttccgccgtcctcagcctccagcagattgttgctcgcgagaccgatcccctccaaggcgcggtggtgtctgtgaccaccatcaaaggaggtgaagctttcaatgtcattccggaatctgtcactctgggcggcaccttgaggagcatgacaaccgatggcatgtcttacctcatgaagagaatcagagaggggcaagcagccgtgaaccggtgcacggcggcggtggacttcatggaggataagctcccgccatacccagcgacggtgaacgacgaggagatgtacgcgcacgccaaggcggtggcggagagcatgctcggggaggccaacgtgaagctgtccccacagggcatgggggcggaggatttcgggttctacgcgcagaggatcccggccgccttcttcggcataggggtcggcaacgatggcggcgggatggcggagacgacgacgaagaatcagctgcactcgccgcactttgtcgtcgacgaggaagcgctccccgtcggagccgccttccacgccgccgtcgccatcgagtacctcaacaagaacgcctctggcccttcagcctga

SEQ ID NO: 3977 - DNA, 1809 bp, Oryza sativa
atggatttcaggaaggtgctcgaccagaccgtccgggagataaggagggaggtaaatcttaaggtgctcaaggtgccggaaatcgagcagaaggttcttgatgccaccagcgacgagccgtgggggccgcatggttccgatttggcagatatcgccagggccaccaagagctacggtgatagcgaaattataatgaatgtgttatggcaacgcctggggaacacacttgcgaattggcgtcacgtgtataaggcgttggctgtgatcgagtaccttctagctaatggcaccgaacgtgcagctgatggcattgttgacaatagctcacgaattgcaaaactcacaagatttgagtatttggagcctaatggaaaagatgttgggctcaatgtgcgtaagaaggctgaagctgttctagcaattttggatgacagggagaagcttcaagaggtcagagagaaggctgccgttactagagacaagtattttggcttatcatcaactggaataacgcacaaatcgagcgcagcatcatttggcagtggcagctactcatctggtagccactatgggagcacaggaggttcaagggaggtgggatcattcaaggatatacacacaggcacagaatggaaaaagaacaagaaggaaacagtgtcaaactacagcagcaatagagaagggtctaaagaaattactaacagtgcaaccagttataagtcaaaaaagagtgaaaggcatggtagaagcaccacatctgaagccccaagctcaaagaaaggggaaaatgaggatgatgatgatttcaacccacgaggattttctacatctacaacgccaaatgttagcacacctgctgtgccagaggttgatttatttgcagatgcagctttccaatcagccaatgctccattggaggcagcaacggtttctcacactcaggacaaaattgatttgtttgctggcagactgtcttctgctgattcatttacttcagacacagagttctcagtacgcggtagtcctaacaagtcatcggagaaaaaaatgtcttccgttgtgcatccttctacttctgcttttgatcccttcaaacaatcttttgccacctcatttccttcagattcagagttctcagttcatgatccgacaagcaaatcttctcaaggaaaaactcccacaccagaacattcaagtacagcagcttttgatccttttgctgcaattccactgaagagttttgatggatccgaatcttttggaacattttcttcgaacacagcctcaaacattactgaactgccacgggattcttctgggggtcccaaaagttctgaccatggtcctttggaggatgccaattttgatgccttcacttcacacttgggatcttccacaacaagtgcaactgagtccatgaataagcccatcaaaaagcttgggcaggactcgatgtcagcatcaaaatcagttgcaaagaaagaaacttttcaggtcaaatctggcatatgggctgactctttgagccgaggattgattgatttgaatataacttcgtcacaaaagaaggtcgatctctccgatgttgggattgtcggaccgctgagcggcggatctgaggataaaggcccgggggcgacgatgggcacagcaccaggccttgtcagttctagttttccatctaaaacagaaacatccagtggaagcgagtacttcttggagcattcgtacagctccatgcctataagagtaaacgtgtatatagctaccaaactctgtgcgatgatcaggagacgtgttgccaactaa

SEQ ID NO: 3978 - DNA, 2256 bp, Oryza sativa
atggcgtctcacatcattctgccgaaggaggaggaggcggcgctgggcgtggcggtggaggaggaccacgactcgccggcggcgccagggtaccagcatcagcaggggccgccggtggcgaaggcgctgccattctcggccacgtgcgtgcggatctcccgcgactcgtacccaaacctccgcgccctccggaacgcctccgccatgagcctccccgacgacgacgccgcctacgccaagctcgaggagggcgactacggctacctcctcgatgacgtcccgcacttcacggactacctctccgatctccccacttttcctaatccactgcaagatcatccagcctattcgaccgtcaagcagtattttgtcaatgcagatgatactgtacctgaaaaggtggttgttcagaaggacagtcccagaggagttcacttccgtcgtgctgggcctcgtcagagggtgtacttcgagtcagaagatgtcaaagcatgcattgtaacctgcggaggcctttgccctgggctaaatacggtcattagagagttggtgtgcggcttgtcccacatgtacaatgtcaatgatatcttcggcatacagaatggatacaagggattctattcgagtaattatcttcctatgacacctaaaagtgtcaatgatatccacaaaagaggtggcacagttctgggaacatcacggggtggtcatgacaccaaaaaaattgttgacaacattcaagatcgtggtattaatcaggtatacatcattggaggggatggaactcagaagggagcatatgaaatatataaggaaattcgtagacgtggtctaaaagttgctgttgctggtgttcccaagacaattgataatgatatagcggttatagacaagtcctttggttttgatagtgctgtagaagaggcccagcgtgccattgatgcagctcatgttgaggcttcaagtgctgagaatggaataggcttagttaaactgatgggtcgctatagtgggtttattgcaatgtatgctactcttgcaagcagagacgtggactgctgcttaattcctgagtcaccattttatttggaaggggagggtggactgtttgagtacatagagaagaggttgaaagagaacaaccacatggttattgttgtagctgagggagcaggacaggatcttattgccaaaagtatagctgcagcagatcaaatagatgcatctggaaataagctacttcttgatgttggtctttggctgactcacaagattaaggattactgcaagaacaaaaagatggagatgactattaagtatatagatccaacctacatgatccgtgcaattccaagcaatgcatcagacaatgtctactgcacactgctggcgcacagtgccattcatggggcaatggctggatatagcttcacagttggaatggtcaatggcaggcatgcatacattccatttcacagggtaacatcaacaagaaacaaggttaagataaccgacaggatgtgggcaaggctgttgtcctcgaccaaccagcccagcttcctgagccagaaggacatcgatgccgcaagagaggctgataagctagccagcaaatcgcctgtgccagttaacaccaaggagcacggagagaatgtaaagaagccggcaaatggagaaggctccagcgacgccgtcgtccaagagccgttcgccaccacgcctacttcgccggctgccctcgccgccggcgccgtgtcgaatccggcgctaacaccagcagcagtgtccatgtccttctacgacgtgaacgctggcgagcagccgagccgagaggacgaagccccggaggaggtggtagaggccgctgtggcgaacggagcaccgacggccgtggagaagcataataagctgtactctcccgcagaaacgccggcggggagtgggacgcggccgcacccaaccgcggacgccgtcgccgagacggcgggggcggcgcccgatgacgtcgacgggtgcacgacgccgccgccgccgccggtgcacgactcggaggggtccgacacgcagagcgcggacgatcacggcagcccacagagggagaagccaaggacgacatcgacggccgggggcgtgaagcgggacgtggctccctcctggtcgtcgaggctgctcgcgtttccggtcgttctcgcgggacaagaaggcgaaggcaaccgtggacgcgcggccgccggcgcacggcaaggcgcgggatga

SEQ ID NO: 3979 - DNA, 1190 bp, Oryza sativa
atggctaagatgcttcctcctccgagccagtcagtcccctctcgcccaccttcttggctatatattcctcctcgtcgtcgccatggcaccttcactagctcatgcgcatttcggctctcgccttcttcgccttcttctcctcctcctcctgttcttgattttcagtatattcaattcatggattcgtggattgagcagacttccctgagcttggacctcaacgtcggcctgccgtcgacggcgaggagatcatcggctccggcggcgccgattaaggttctcgtggaggagaacttcttgtccttcaagaaggatcacgaggttgaggcgctggaggcggagctccggcgagcgagcgaggagaacaagaagctgaccgagatgcttcgggcggtggtggccaagtacaccgagctgcagggacaggtcaacgacatgatgtcggcggctgctgcggcggcggtcaacgccgggaaccaccagtcgtcgacgtcggaaggcggctcggtgtcgccatcgaggaagcggatccgtagcgtcgacagcctcgacgacgccgcccaccaccgcaagccatcccctccgttcgtcgccgccgccgcagccgcggcctacgcctcccccgaccagatggagtgcacgtcggcggccgccgccgccgccgcgaagcgcgtcgtccgcgaggactgcaagcccaaggtctccaagcgcttcgtccacgccgacccctccgacctcagcctcgtggtgaaggatgggtatcaatggcggaagtacgggcagaaggtgacgaaggacaacccgtgcccgcgagcctacttcaggtgctcgttcgcgccggcgtgcccggtgaagaagaaggtgcagcgcagcgccgacgacaacaccgtcctcgtcgccacgtacgagggcgagcacaaccacgcccagccgccgcaccacgacgccggcagcaagaccgccgccgccgccaagcactcacagcaccagccgccaccgagcgccgccgccgccgtcgtccggcagcagcaagagcaggcggcggcggccgggccgtcgacggaggtggcggcgaggaagaacctggccgagcagatggcggcgacgctgacgagggaccccgggttcaaggcggcgctcgtcacggcgctctccggccggatcctcgagctctcgccgaccaagaactg

SEQ ID NO: 3980 - DNA, 804 bp, Oryza sativa
atggccggcgtgatggcgccgctgatgctgcacggccgcgtggcaattgtcaccggcggcgccggcggcatcgggtcggccgtgtcgaggcacctggcgtccctcggcgcgcgcgtcgcggtcgcctacatcggggaccccgcgccggcgaacgagctggttagcggcatcaacgacggctacttgcgcgcggaggaggaagagaagcgcgggccgcgggccatcgcggtggaggcggacgtgtcggacgcggcgcgggtaagggcgctgttcgacgcggcggcggcggcgttcggcggcgagatccacatcctggtgacgacggcggccgtgctggacttcgsgtacccggcgctggcggaaacgagcgaggcagcgtacgacgccatgttcggcgtgaacgcgcgcggmaccttcctgtgctgccgcgaggccgcgaaccggctggcgcgcggcggcccggggcgcatcgtgacgttctcgtcgtcgggcgtcgggtcgctccggccggggtacgcggcgtacgcggcgagcaaggcggcsgtggaggtgatgaccaagatcctggcgcgcgagctgcgcggcacggggatcacggcgaacgcagtggcgcccgggtccacgggcacgccgatgatgtacaccggcaagacagaggaggacatggcgcggtacatcgccgaggcgccgctgggccgcctcggcatgcccgacgacatcgcgccgctcgtcggcttcctcgccagcgacgccggcggctggatcaacgcccaggtcatccgctgcaacggcggcactatctag

SEQ ID NO: 3981 - DNA, 2916 bp, Oryza sativa
atgctgcgccgcctcgctgcgcgcttccccgggatcctcgagctggacctctcccagtcgccgtcccgctcgttctaccccggcgtcatcgacgacgacctggacgtcgtcgccgggggcttccgcaatctgcgcgtcctcgctctgcagaattgcaaaggtgtaactgatgttggaatggcaaaaataggagatagactgccctctctgcaatccatagatgtttcccactgcagaaagcttagtgacaaaggtctaaaggcagttttactggggtgtcaaaacttgaggcagctggtcattgctggttgcagattaataactgataatttgttgattgctctatcaaaaagttgcatacatttggaagatcttgtggctgcaggatgtaacaacataacagatgcagggatctcaggtctagctgatggttgtcacaagatgaagtcactagacatgagcaaatgcaataaagtcggggatcctggagtctgtaaatttgctgaggtctcttcatcgtcattggtatcattaaaactgttggattgcaacaaagtgggtgataagtccatacatgcactagctaagttctgccataacctggagacactcgtcattggtggatgtcgtgatgttactgatgcgtccatagaagcactggcttttgcctgctatagcagactaaagtgcttaagaatggattggtgcttgaagataacagactcctcactgagaagtctattgtctaactgtaaacttcttgtggctattgatgtggggtgctgtgaccaaattacagatgcagcatttcaggatatggatgcaaatggatttcaatctgcactgagacttctgaagatcagcagctgtgttaggatcacagttgcaggagtcaggaatgtgatcgaatcctgtatggcccttgagcacctagatgttcggtcatgccctcaggtcacaaggcagagctgtgagcaagctgggctgcaatttcctggtagctgcaaggtgtgcactgttcaattctcatgtgctgtacctgtagtcctgtactatgtagaaagtagcacactacagattcttggaatctgttggaaatttggagccaagagcatcccctcgggaatttgtgatattagttggaaggaaggatatttggctgtggtaaaactggtattgataaatagagcacagatgcggctaactgttggccaagtgcatcgacatgtacttgcattggcatcttctcggtcatgcttcgtccttggtgatcaccttccattcagaatgctttcacttccacgagtggtaagatttcaccaaaccgcttggcatgatattcaaactgtggaagataagagtggtccgctaactctagctagtcttgaagtgcaaaacaaagttgaatatgttaagaaagaaagagcaacacgtactggaggcataaagccatcttcaagggcttcagctcttaatatgaaaccaaaagtttcttcattcaatgccaaaccagtaaagagtgccttgccgaaatcagcagtactgaagaagactctgaagatagatgaatctcttttttctgcaaaatcatttgaagaactcggtttgccacctttgcttatagataggttgaacaaggaaggtcttactgctccaactgaggtccagtctgctgctattcctatcatttcacaaaagcacgatgcagttatccaatcatatactggctcagggaagacacttgctwatcttctccctattctttctgaaataggccctctgaagaggcctacagaacaagacagttctgataagagatcaggtgtagaggcagttattgttgctccttctagagaattaggaatgcaaatagtgcgagaagtggagaagatattgggccctaatgataagagacttgtccaacaacttgttggtggtgctaatcgttcgaggcaagaagaagcattgaagaagaacaagccaattattgttgttgggacacctggtcgtatttctgaaatttcagcagccggcaagctacacacccacagttgccgctttcttgtactggatgaagttgaccagcttttgtctttcaattatcgtgaagatatgcatagaatacttgaacatgtaggaaggaaatcgggtacttcatctagagatattcttggccctcttgcaaggcggtctgagcgccagactatcttggtttccgcaacgataccattttcagttatacgagcagccaggagttggggtcacgatccagtccttgttagagctatgagtgttgttccacttgagtcaattactgttccaagacctgtgctgtcccagccagatgccaactccaactctccatcaaattcagtgaatcaagctgcagttgacagcttaccaccatctttggaacattactattgtacatccaaggctcaacacaaagtggacactttaaggagatgtatccatgctctggaggctcagacagtaattgcatttatgaacaacaccaagccattgaaggatgttgtatttaagttggaggcccgtgggatgaaagctactgaactacatggagatcttggaaagcttgcaaggtcaactgtcttgaaaaagttcaaggatggtgaattcagagttctagttacaaatgagttgtctgccagaggactggatgtgccagaatgtgaccttgtgattaatctggatcttccaacagactcaacacactatgcccacagagctggccgaactggccgtctagggcggaaaggaactgtggtcacaatatgtgaagaaaccgaaacatttgttgtaaggaaaatgcgcaagcaattagctgtacccatcaagccatgtgaattcaccgaagggaagcttcttgttcataaggaggaagatgtagagtaa

SEQ ID NO: 3982 - DNA, 1050 bp, Oryza sativa
atggggcggcgcgcgcgctgcctctgcctcctcctcctcctcctcctcgtcgtaggtggcggtttccacgtggccaacgcgcaggcgtcgccggcgccgccacagacgggcacgagggcggtcaaccgcgccgtgtccaccgtcatcaccgtcgtcatcggcgtcttcttcgtcctcgtcttcgtatgcgtcatcgtcaaccagtgctgcgactgcgactcctccgctggcgctggggctgggcaagggcagtcgtcggctgctcggcgccgccgcgggctcgacccggcggcggtkgcggcgatcccggtcgtgccgtacgcggaggtcaggaagcacaggagcggcggcggcggcgcgctggagtgcgccgtgtgcctcaccgtgttcgacgacggggacgacctccgcctcctcccgcagtgctcccacgcgttccaccccgactgcatcgacccctggctcgagggccacgtcacctgcccgctgtgccgcgccaacctcgagaagcagccagcgccgtcgccgcctgccgtggagttctcctcctcgcctgctgcggccgcggcggcggcggaggagtcgcgtacgcccgaggccgcggcggtgcgggttgaggaggtggcggaggcgagcgacgaagaggagacgaggaggagggaggaggaggccctggagctggagagtttgcgcgccgtgcggcggscggcraggatsccgaggtcgaactcgacggggcactcgctgtgcgcgctgccggcgccgcgcgcgccggggccgggcgacggcggtgaccacgagaggttcacggtgcggctgccgccgcacgtccgggaggaggtgctcaagtcgaggcgcctccggcacgccacgagcctcgtcctcggcatcaggggatcgagccgcgagggcagctcgaggggcggcggcgggagctggcacggcgcgcggcggtggccgtccttcctggcaaggacggtgtcgtgggcgcgcggcggcgtgggagcggacaccagcgcgaaggagacgccatgccgtgatgcggtctga

SEQ ID NO: 3983 - DNA, 2364 bp, Oryza sativa
atggggtcgtctggttgcagctctgagatagttgagttcaccgaagaattcgacgataatgcgccggttagttgccccaatttgatgcatattagagtgaagcctgaggagaaagatgggaggtgttaccctgtggaggatgaccttgaacagcttctcaaggcgatcgacagcaggaccttccgtcggacgcttagccctggtcaggctggcgccgacgctctgcggaagaatggtcagaagaaatcgtctaggtctgggccggctcaagctgcggggatcgggatttcgtccaagcctgttaatatgaagcaggcgttgaggaggctgtgcatttcgcaggcgtcggagatggccgcgatgaagaggctgtcgatgtcgcctggatcatcgagttcgtcggaagtggggactatccacaggctttatgcctccttgatggtccagagcaacggtgagagccatctgcatgatgatgagaagatgaacttgattgagatatcgatcactccagaaaagtttagtaagaactcgtccagagcaacaagcgagttcagtgaagactgtgatttcgagacagccgacgggagtgcagtcacctccctgcattctgcatcatctacctcggctgagatacagaagatcaggatccaagatgtcatcagtggtgaccctatagacagcgagagttctatggtggaaaatgagaaattaaacaagaaagtttccacagctaccgacggtagctctcccagagcccctatcttgagcaaaccgatcactacctcacggcttgttaagccagtcttccgatgcaagaccatcggtaagaagaaactgaaagaagaaccaccttcattgggtacttcctccaacagtacaaaattctgctcttcaaaggagtccatctcccttgcatcaaccagttgctcttcaacatccagcataacaaatcccactagctgtgcagatgatgagaaaacaaatctcgggccagaaaaatctggtgataaatcgcctgagtggttaagatcagaggaaaagggggagtgctcccagaattcaaacagcattagtgagtatggatgtagcacgagcatcagtgatgagagccaatttggattgtgtagctacaacaacagaccacacatggcaaaggatctgcgttggataaccatccgtgagttggcattgcaacaaggatccttaggtcttgacaatttcaagcttctgaagaggcttggttgcggcgatatagggactgtgtacctagctgagttggttgattcagagtgcttgtttgctttgaaggttatggacatagagtacctgatcaatagaaagaagatgctgcgtgcacaggctgagagggagattctagaaatgctggatcacccattccttccgactctttatgcccattttaccacagacaatctttcgtgcttggtcatggagtactgtccaggaggtgatttgcatgttcttcgtcaaagacaacctgggagaagctttccggaaccagctgcaaggttttatgttgcagaggttctccttgcacttgaatatcttcacatgttgggggtcatataccgtgatcttaagcctgagaacatcctagtccgtgaagatggtcacattatgctatcggactttgacttgtccttaaggtgctcagtgaaccccgtactcctccgatcatcctctgtagcagcaaaccatcaaccaaggaagcttgcaggaccttgtgcagaaagcagctgcatcagttcatcatgccagccttcttgtgcccaaacatcttgtttcatggcacgtcctccattgccaaagcctcggaagcctaaatcttcacacagaaagctccctcagcttgttgttgaacctatagatgcaaggtccaattcctttgtaggaacacacgagtacctcgcaccagaaatcatcaaaggggatggtcatggtagtgctgtggactggtggacctttggcgtcttcctttatgaactgttgtacggtaagacacctttcagaggtcctgggaatgatgaaacattggcaaatgtggtttcgcagaatctcaagttcccagaaaatccatctgtcagcagtaatgccaaagatcttatcaaaggtttgctagtgaaggagccagagaacagacttggatcattgagaggagcagctgaaatcaagcaacaccctttctttgaaggcttaaattgggccttgatacgatctgccgctcctccagagacgcgaccctgtgacgttgtgaccctcacgacagcgaagaagaagaaagaaggcaagtgcctggagttcaggagtaactctgaggacctggaatttgaagttttttag

SEQ ID NO: 3984 - DNA, 432 bp, Oryza sativa
atgtcggaggacgaggatgagacggcgccgatgctggagggcccgatggatatgggctcggacgggcacgacctcatgggcttcggcccgctcatgcccaccgactccgagcgatccctcatggagcgggtcaggcaagagctcaagattgagctcaagcagggcttcaagtcaaggattgaggatgtgagagaagaaatattgaggaagaggagggcaggaaagttgcctggggacaccaccaccatactcaagcaatggtggcagcaacactccaagtggccataccccacggaggatgataaggcaaagcttgttgaagagactggcctgcagctcaagcaaatcaacaactggttcatcaatcagagaaagcgtaactggcacaacaactcacagacatcaacccttaaatcaaagcgtaaaaggtaa

SEQ ID NO: 3985 - DNA, 609 bp, Oryza sativa
atgggcggcgggcacgtgaagtggtcgatcaacaacgtgtccatggtgctcccggcgacgccgtacctggggtccctcaagatggggctgaggtcggcgctcccgtcggcggcgaggccgtccgacacgttcgggcgcgggtacgacgtgatgcggccgccggcgaacccgaacaccacggtgggcgacaacgtgtacgtgctcgcgcacaacgcgacggtggacgtggtgctccagaacgcgaacgcgctggcgcggaacgtcagcgaggtgcacccgtggcacctccacgggcacgacttctgggtgctgggctacggcgacggcgcgttccggggcgacgccggcgacgcggcggcgctgaacctgagaaacccgccgctgcggaacacggcggtgatcttcccgtacgggtggacggcgatccggttcgtggcggacaaccccggggtgtgggcgttccactgccacatcgagccgcacctccacatgggcatgggcgtcatcttcgccgaggccgtcgaccgcgtcagcgagctccccaaggcggccgtctcctgcggcgccaccgccaccgcgctcatggccggcgccggcggccacgtgtga

SEQ ID NO: 3986 - DNA, 1563 bp, Oryza sativa
atggatgccaccaccaccgtgtccatggagatggaattgccgtggggcgcgcggtgcgcggggctcgccttcttcgcgttctcggtgtgcctggcggcgctcggcgtcgtgctcctggtggcgaggcggtggccgtggtgcagctgccatgtgtgccgcgcctacctgacggggtcgtgggcgagggagttcaccaacctcggcgactggtacgcgcacctgctccgccgctcgccgacgggaaccgtccacgtccacgtcctcggctgcaccgtcacggcgaacccggcgaacgtcgagcacatgctcaggacgcggttcgacaacttccccaaggggaggcccttcgccgcgctcctcggcgacctcctcggcgacggcatcttcaacgtcgacggccacgcgtggcgccaccagcggaagatggccagcctcgagctcggcagcgtcgccgtgcgctcctacgcctacaagatcatcgcccaggaggtggaggcccgcctcatgccggtgctcgccgacgccgccgaccggggcgccgtgctcgatctgcaggacgtgttccgccgcttcgccttcgacaacatctgcaagatctccttcggcctcgaccccggctgcctcgaccgggaaatgcccgtgtccgagctcgccgacgcgttcgacgccgcgtcgcgcctctccgccatgcgtggcgcagcggcgttgccgttgctgtggagggcgaagcggttcctcaacgtcgggtcggagagggagctcaggaaggccatcaaggtcgtcgacgagctcgcggcggcgatgatccgggagcgccagaagctgggcgtcggcagcagccacgacctcctgtcgcggttcatggcctccaccggcgtcgacgacgccgccgcggacgacaagttcctccgcgacatcgtcgtcagcttcctcctcgccgggcgggacacggtgtccaccgcgctcaccacgctgttcatgctcctgtccaagaaccccgaagtcgccgccgccatgcgcgcggaggcggaggccggcgacggcggcgagacgggcgccgccatcacctacgagcacctcaagggcctccactacacccacgccgtgctgcacgagaacatgcggctgttcccgccggtgcagttcgactccaagttttgcgccgccgccgacgtgctccccgacggcacctacgtcggcggcgacgcgcgcgtcatgtaccacccctacgccatggggcggatgccgcacatctggggcgccgactacgccgcgttccggccggcgcggtggctcaccggccccggcgcgtcgttcgtcccggcgaacccgtacaaatacccggtgttccaggccggccaacgcgtgtgcctcggcaaggagctcgccgtcaccgagatgaaggcggccagcgtcgccgtcgtgagggcgttcgacgtcgaggtcgtcggcgagaatggccggagcggcggcgccgccgccgcgccacggttcgtgccggggctcaccgcgtcgatcagtggcgggctccaagtgagagtcaggcgccgcgttcacacttag

SEQ ID NO: 3987 - DNA, 1026 bp, Oryza sativa
atggacggaggagacatycamctgctgctgagcatcctygccgacggcgaggagcaggcccggcagctcggcgagcccgccgcggcggccgacgacgagtaccacggcggcggccgcggggaggagtactacaggggcstggcgcggcagctgcagggcacgctcgcgagggcgatgggcatcgcgagggccatcgaggcggcggccttgcgccggcggcggcggcggcggcggcgcgtcggggtcgcgcggcaccaccggcgaccgctccgattcgccacggtcggcggaacgagagctcgggccggacggcgagggaaccaaccgtcgcgcagcaagaacgccaccatgacacgatcaagagaagcaaaaagggcaaatgatctacctaatgcgttatggatgaagggcctgccaagatggacagaaaaattcagagtgccagatgcaagtttggaggctacaccagatgatggattcagttggaggaagtatggtcagaaggacatcctcggtgccaaattcccaaggggttactaccggtgcacgtatcgcaaagcgcaaggctgcccggcgaccaagcaggtgcagcgctccgacgccgacctcgccgtcttcgacgtcacctaccagggcgcccacacctgccaccagaagcagcgccgcgccgccgccgccggcgaccaaccgcctccgccgccgccgcaggccgacccgagcgtggagctgctcgtcaacttcaggcacggcctgaaggtggagaccaacgggctggctcctccgccgccgccgcctccgacgacgacgacgaacttccacgacgaccagcacttctgcttcccctccatgccgccgttccacgccggggtggggccaccgccgccgccggacgacgcgctaggaggagggtgtaataatttctcctcgccgccgttcgtctcgccggccggttcggccgccggcgagagctacttctccatggagcactcctacgagcacggggaggcggcggccaattcgtcatga

SEQ ID NO: 3988 - DNA, 1884 bp, Oryza sativa
atgatgaagcacttggtggagtcggagaaggcggcggagaatgccgggccgacgtaccggaacgtgctggccaaggacgccgggcttctgcggccgccgccgggggtcgagagctgctgggacgtcttccgcaattcggtggagaagtacccggacagcccgatgctcggtcgccggagagtcgtcgacgacggcaaggcaggtgaatatgtttggatgacttacaaggaggtttatgacgttgtgatgaaacttgctgcctccattagcaagtcaggaatcagcaagggtgaaagctgtggcatctacggcgcaaactgccctgaatggatcatcagcatggaggcttgcaatgcacttggggtttcatgcgtgcctctctatgatagtcttggtgctggtgcagtggagtttatcgtgtgccatgctgaaatccagattgcttttgtggaagagagaaaaatcgcagagctcttgaaaacttgtcatgccacatcaaagtatttgaagacaatcatcagctttggaggtgtgacaaatgaccaaaaagaggaggctaaaaatcatgggatgtccatattctcatgggaggaattcctgatcatgggaggtgatcatcattttgatcttcctgaaaagaagaaatctgacatctgcacaataatgtacacaagcgggacaactggagaccctaaaggtgttatgatatcaaatgaaagccttcttgttaacatcactggtgctgattgcgtgaccaggtctattggcgaacctgacgtcaagctgttggtcgatgacattgcagctctaaaaccaacagtattctgtgcagttccacgagtacttgatagaatatactcaggtcttacaggaaagatctcgtctggtggcatactgaagaaagctttattcaatattgcttacaagctgaaactggacagcatgaggaaaggaattaaacacgagaaagcagctccattttttgacaaattagttttcagcaaggtgaaagaaagactgggtggaaaactacgttttatcgtgtctggtggtgcccctttatctgtagcagtggaagaatttttgagggttgtgacatgtgcaagtgttgttcaaggctatgggctcacggaaactggtgcggcgtcatttgttgcaataccaaatgatttttccatggttgggactgttggtccaccagttgagcatttggatgcacgtcttgagtcagttccagagatgggctatgacgctttgtcgagcattcctcgtggagaggtatgtgtaaaaggaagtgttctattctcaggatactacaaaagggaggatcttacacaggaagtcatgattgatggatggttccacacagatgatgactatatgccaaataccatgtataatacaggggatgttggcgagtggcaaccaaatgggtccttgaaaatcattgacaggaagaaaaatatattcaagctttcacagggagaatatgttgcagtagaaaatctcgagaatgtgtacggggttctccaagagatagattcgatatggatttacggaaatagttttgaatctttccttgttgctgtcataaatcccaaccaacaagttcttgagcattgggctgaacaaaatggtatctctggaagtttatctgaattatgtgaaaattcaagagctaaagaatatattctttcagaactcacgaagattgcaaaggaaaagaagctgaaaggctatgagttcataagagctgtacatcttgacccattaccatttgatatggagcgtgatcttataaccccaacatacaagaagaaacgaccacagttgcttaagcactatcagggaaccattgacgcactctacaagatggcaaagtaa

SEQ ID NO: 3989 - DNA, 1296 bp, Oryza sativa
atgatgctggaaggcaactcctgcctcatctcgcgctccctgccgagctcctgcgagccggagtcccagtgggcgtacctctcccacgaggtgctcaacggcaagcgcccggcgccggaggatgcggaagccgaggacatggacgaggttgacttcggcggcgggaagcgcagcaagccgccatcgccgcagccgcacacgccggacatatctgagggccatggctccagtcgccatgttgccgcctctggcggcggagaggagcatggcaacgggagcagcctcattggtgcgattggccgtgaccttaccatcaattgcctcctccggctgtcacggtcagactatggctcggtggcctccctgaacaaggacttccggtcgctcgtgcgcaacggggagatctaccgcctgcgtcgccagagtggggtggcagagcactgggtctacttctcctgtaacgtcctcgagtgggacgcttacgacccatatcgcgagcgctggatccaagtgcccaagatgccaccagatgaatgcttcatgtgttctgacaaggaatcacttgctgtgggcactgaacttcttgtgtttgcgatggcacacattgtgttcagatatagcattctaaccaattcatggacacgggctgatccgatgatctcaccacggtgcttgtttgggtcaacaagtgttggggcaaaggcatatgttgctgggggcactgattcttctggcaggatattgagctctgcagaaatgtacgactcggagacacattcttggacaccccttcccagcatgaatcgggcaaggaagatgtgctccggggtgttcatggatggcaagttctatgtggttggtggtgttgccagcaacaacaaggtgttgacatgcggtgaggaatatgacctgaagaggcgatcttggagggtgatcgaaaacatgtctgagggtctcaacggagtgactggtgctcctccacttattgctgttgttaacaatgagctttatgctgctgattatagtgaaaaggatgtgaagaagtatgacaagcaaaacaataaatggatcactcttggtaagttgcctgaacggtctgtgtcaatgaatgggtggggccttgctttccgagcatgtggtgatcggttgattgtcatcggcggcccaaggacttctattggtggtacgattgagcttaattcatggaccccggatgagcggccgcctgtgtggaatttgattgccaggcggccatctgggaacttcgtgtataattgtgctgtgatgggctgttga

SEQ ID NO: 3990 - DNA, 666 bp, Oryza sativa
atggcggcgggcggaggcggcggctacagggcggaggacgactacgactacctgttcaagacggtgctcatcggcgactccggcgtgggcaagtccaacctgctgtcgcgtttcaccaagaacgagttctgcctcgagtccaagtccaccatcggggtcgagttcgccacccgcagcatccaggtcgacggcaaggtcgtcaaggcccagatttgggacaccgccggccaggagagataccgtgctattacaagtgcctattacagaggagcagtaggtgcactgcttgtctatgatgtcactcggcgtgctactttcgataatgtggcacgctggctaaaagagctgagagaccacactgaccctagtattgttgtcatgctagtaggcaacaaatccgatctccgccatctggtggctgtttcaactgaagatggaaaggaatatgctgaggctgagtcattgtacttcatggagacatctgcattagacgccacaaatgtagagaatgcttttgcagaagttttgactcagatataccaaactgtcagcaagaagacggttgaggcatcagatgatggatcaaatgctccaatcaaaggagagaagattaatgtgaaagatgacgtgtctgcgctgaagagaattggctgttgctcaaattag

SEQ ID NO: 3991 - DNA, 1827 bp, Oryza sativa
atggcggcggtggtgccgctgtacgtggcgatgttcctggcgtacgggtcggtgcggtggtggggcatcttcacgccggaccagtgctccggcatcaaccgcttcgtcgccatcttcgccgtgccgctcctgtccttccacttcatctccaccaacgacccgtacgccatgaacctccgcttcctggcggcggacacgctgcagaagctgctcgtcctggcggggctcgccgcgtggtcgcgcctcccctcgcggaccggcgcgccgcggctggactggtccatcacgctcttctccctctccacgctgcccaacacgctcgtcatggggatcccgctgctgatcgccatgtacgggccatactccggctcgctcatggtccagatcgtcgtgctccagtgcatcatctggtacacgctgatgctcttcctcttcgagttccgcgccgcgcggatgctgatcgccgaccagttcccggacacggcggcgtccatcgtgtccctgcacgtcgacccggacgtggtgtcgctggagggcggccacgcggagacggaggccgaggtggcggcggacgggcggctgcacgtcaccgtgcgccggtcctcggtgtcgcggcggtcgctgctggtcacgccgcggccgtcgaacctgacgggagcggagatctactcgcttagctcgtcgcggaacccaaccccgcggggctccaacttcaaccacgccgacttcttcgccatggtcggcggcgggccaccgcccccgacgcccgctgcggtgcgcggctcgagcttcggcgcctccgagctctactcgctgcaatcgtcgcggggcccaaccccgaggcagtccaacttcgacgagcactcggcacggccgccgaaaccaccggcaacgaccacgggggcactcaaccacgatgccaaggagctccacatgttcgtgtggagctcgagcgcgtctcccgtctcagaagtcagcggcctgcctgtgttcagtggcggcggcggcggcggcgctctcgacgtcggcgccaaggaaatccacatggtcatccccgccgacctgccgcagaacaacggctcaggcaaagagcacgaggagtacggcgcagtggcattgggtggcggcggcggcggagagaacttcagcttcggaggcggcaagacggtggacggcgccgaggcagtagacgaggaggcggccttgcctgacgggctgacgaagatggggtcgagctcgacggcggagctgcacccgaaggtcgtcgacgtcgacggaccgaacgccggcggcggcgccgcgggcscggggcagtaccaaatgccgccggcragcgtgatgacacgcctcatcctcataatggtgtggcgcaagctcatccgcaaccccaacacttactccagcctcctcggcctcgcctggtccctcgtcgccttccggtggcacgtctccatgccagcaatcgtcgagaagtccatctccattctctcggacgcaggcctggggatggccatgtttagcctgggattgttcatggcgctgcagcccagcatcatcgcgtgtggcaaatcagccgccgtcgtctccatggccgtccgcttcctcgcgggccctgccgtcatggccgccgcgtcaatcgccatcggactccgcgggacgctcctgcacgtcgccattgttcaggcggctctaccacaagggattgtgccttttgtttttgcaaaagaatacaatgtccacccggccatcctgagcacagcggtaatttttggcatgctaatagctcttccaatcacattgctgtactacatccttcttggactatga

SEQ ID NO: 3992 - DNA, 726 bp, Oryza sativa
atggcggaggcggcgggggcggcggtggcgccggcgaagctgggtctgtactcgtactggcggagctcgtgctcgcaccgcgtccgcatcgccctcaacctcaaaggattggagtacgagtacaaggcggtgaacctgctcaagggggagcactctgatccagaattcatgaaggttaatcctatgaagttcgtcccggcattggtcgatggagatgctgtaattggtgattcttacgcgatagcattatatttggaggacaagtaccctgagcaccctcttttacctcaagaccttaaaatgaaggccttgaatctccagatagcaagcattgtatgctctggaattcaacctcttcacaatcttaccgtactgaggttcattgagaagaaggttggtacaggggagagcatcccatggactcaacaacagatcgacagaggtttcgcagatttgcttttatgtcacaccatgctcacttcgttccccaatggtgtagctgctgagaacctagtaaaaggctgtgctgggaagtatgcaacaggagatgaagtccgattggcagacgtattcctcgcacctcagatttatgcagcagtgactcgttttcaaattaacatgttaaattatcccactctcgcgaggctccatgaggagtatatgaaacatccagcatttcaagcagcactcccagacagacaaccagatgccccttcctctacctag

SEQ ID NO: 3993 - DNA, 1167 bp, Oryza sativa
atggaatacttgagatcttgctggggcccggcgtcgtcgccggccgggcgcccccgcaaaggatcggatgcggcggggcggcaggatgggctgctgtggtacaaggacgccggccagctcgtcgccggcgagttctcgatggccgtggtccaggccaacaacctgctcgaggaccacagccaggtggaatccgggccactgagcaccacggatcccaacctgcagggcactcttgtgggcgtctatgatgggcatggaggcccggagacggcgcgctacatcaatgaccatctcttcaaccatctgaggggatttgcttctgagcacaagtgcatgtcagcggatgtgattcggaaggcgtttcgagcaactgaggagggattcttttctgtagttagtagtcaatggtcgatgaggcctcaattagcggcagtaggctcttgctgtctggttggtgtgatctgtgctggaaatctatatattgcaaaccttggcgattcccgtgctgttctcggtagacttgtgaagggaactggggaggttctggctatgcagttgtcagcagaacacaatgcatcctttgaagaggtcaggcgagagctgcaggcagcacatcctgatgatccccatattgtggttctaaagcacaatgtttggcgtgtgaagggtattatccagataacaagatccattggagatgtgtatctgaagaaaccggagttcaacagagaacctttgcatagcaaatttcggcttcaagaaactttcaggaggcctcttcttagttctgaaccagctattgttgtacaccaattacagacaactgatcagttcatcatttttgcatctgatggactatgggagcatattagtaatcaggaagcagttgatcttgtccaacataatccccgcaatgggattgctagaagactagtaaaggctgcaatgcagcaggcagcaaaaaagagggagatgaggtattcagatctgaagaaaattgatcgtggggtaaggcggcacttccatgatgatataacagttgttgtggtgttctttgattcgaatgccataaccactgctaactggagccgaccttcagtttctcttcgagggggtggtgttactctccctgcaaattcccttgctccattctcagttcctacatag

SEQ ID NO: 3994 - DNA, 1563 bp, Oryza sativa
atggccatcctcttgctcgttgcgttgttctatcggatcaagaagcaggcagctgccatggcggccaagaggaagcaacaacccaagctaccacccgggctagctaccatgccggtggttagcaacatgcaccaaatgctgatgaacaagccggtgttcaggtggatccaccgcctgctcgacgagatggacaccgagatcctgtgcctccgtttcggtcgcgtccacgtgatcgccgtcgcctcgccggagatggcccgggaggtcctgcgcaagaaggacgccatgctcgcctcccggccatcgtcgttcgtgtcgcggacgttcagctttgggtacaagaacaccatcatgtcgccggccggtgaccagtggaggaagatgaggcaggtgctcacgtcggagatcctctcgccggccatggagcggcggatgctcggccggcgcgtcgaggaggctgaccaccttgtcaattacgtctacagccactgtaatgatggcactgtagacgtccggcacgtaacgagacacttctgtggcaacatcatcaggaagctggtgtttggccggagacacttcaactccggcgatggcaatatcggccctggccgtgatgaggaggctcacatcgacgcgctcttcacggcgctggactaccacggcgccttctccgtctccgactacttcccgacactggttgggcttgacttggatggccatgaggaggttgtcaatggcctgatgaacacattcaataggctgcacgatcctatcataatggagaggatagaagaatggaaatctctcaggacaaaaggtgataagaggagagaagttgccgattttctggacgtgttgatctccttggaggatgcacaagggaaaccgtttttgtcagtagatgagatcaaggcagaaacgctggaaataatccttgctaccgtggacaacccatcaaatgctgtagagtgggcactggcagagatggtgaacaatccaaaggtcatgaagaaagcagtggatgaactcgatatggttgttggtagagaaaggcttgttgaggaatccgacattcacaacctcacatacctcaaggcatgtatccgggaggcgttccgcttcaacccctaccacccattcaacccaccccatgtcgcgatcgcagacaccaccgtcgcgggatacatgatcccaaagggtagccatgtcatgttaagccgaattgggctcggtcgaaaccctagagcatgggataaaccactcgaattccaaccagagcgacatctgaaaaatactggtactgtggtgctagctgagccagagttacgttttgtatcgttcagtgctggtaggcgtggctgtcctgccgtgtcactcggaacatcaattacaatgatgctatttgcaaggcttctgcaggggttcagttggagcataccaccaggtggtgacaggattgagcttcaagagtcagctacaagcctgcaattgtctaaaccattatttatgcaagcaaaaccacgattactacttcatctatatgaggcggatgtattaaattag

SEQ ID NO: 3995 - DNA, 1473 bp, Oryza sativa
atgaccatcctcctactcgttgtgttcttctgtcggatgttgggtaacatggcgggcaagaacaagaggaagaagcaacctaagctaccacccgggccagctactatgccggtgttgggtaacattcaccagattctgatgaacaagccggtgttcaggtggatccaccgccttctcgacgagatggacaccgagatcctgtgcctccgtctcggcagcgtccatgtgatcgccatcgcctcaccggagatggcccgggaggccctgcgcaggaacgatgccgtgctgacttcccggccggtatcgttcgcgtggcgggcgttcagctttgggtacaagaacaccgttgggtcgacgggcgatcagtggaagaaaatgaggcggatgctcgcgtcggagatcctctcatcggccatggagcggcgaatgcttggccagcgcgtcgaggaggctgaccaccttgtcaattacatctacaggaactgtaataatggcactgtagacatccggcacgtaacgagacacttctgtggcaacatcatcaggaagctggtgtttggccggagacacttcgccttcggcgctggcaatatcggccctggccgtgatgaggaggcccacattgacgcgctcttcacggcgctagactacctcggcgcattctccatctccgactacttcccgtcgttggttctcaatggcctgatgagtacattcagacggctgcatgatccaatcataatggagaggatggaagaatggagggctcccaggagaaatggtgatgagaggagagaagttgccgattttctggatgtgttgatctccttggacgatgcacagggaaaaccgttgttgtcacttgatgaggtcaaggcagaaacgctggaaataatccttaattcggtagacaacccatcaaatgctgtagagtgggcactggcagagatggtgaacaatccaaaggtcatgaagaaagcagtagatgaactcgatatggttgtcggtaaagaaaggcttgtcgaggaatccgacattcacagcctcacatacctcaaggcgtgtatccgggaggcgttccgcatccacccctaccacccattcaacccttcccatgtcgcgatcgctaacatcaccatcgctggattcatgatcccaaagggtagccatatcattttaagccgaattgggcttggtcgaaaccctagagcacgggataacccactcgaattccgaccagagcgacatttgaagaatactgataatgtggtgctagctgagccagagttacggtttttatcattcagtgctggggagctttctctcgctttaagcgtagaggggaagagtgtggcagcactaaagaatggttcacaagcagctggccccacgcttccatatttcatcgccgtgcattgcacatttgcaccaaaacttttggccactgctcattgccaagtcgttgttgcctaa

SEQ ID NO: 3996 - DNA, 708 bp, Oryza sativa
atgcgccgcgagggggaggaggagtgggaggaggtcgtcgccggggccgaggaggcggttcatggggcccccgtgcctgttgcggaggaggaggaggagtacagggtggtgttctggtcgccgcccaccggcgacgaggtccgcgcagccttcaccagcatcgaggagctaccatttgcattcagggtatttggtgatccttttcgtgcgcattcttatgaaactgaggagcaatcagcattgtccacctcagtacattcgtcatctggcaattcatcaggatcagatgactggattgaacctgctgcctatgctctcaactcaactgctcttctgacaagggaacatagaaatgttttggatgccttccgtttattgcaaaaagatcctaatgttcagggctgctgtatgggatctgttatgaacaacgaggcagtgcaagaattcaggagatctttccaggatgacaaagaagcagcaggtagaaagggaaaccctggtggtcctgctggagtgcttaagtggattctgggcaacacccaagcaaaaataatggaattcatgaataatataatgaagattgtgaacatgcttttccactctgatgatgatgaagcgaagcccgacctttacactgatgcagtgaaggtgtcattcatgctctcagttttcatcttcatcgtggtggccattgctcgtatcaagtga

SEQ ID NO: 3997 - DNA, 1185 bp, Oryza sativa
atggagcggtgcgggagctggtcggactgcgaggcggcggcggcggcggcgcagaaggcggtgccggcgccgttcttgaccaagacgtatcagctggtggatgacccggccactgaccacatcgtctcgtggggggacgaccgggtgtccaccttcgtcgtgtggcggccgccggagttcgcgcgcgacatcctccccaactacttcaagcacaacaacttctcgtcgttcgtccgccagctcaacacctacgggttcaggaaggtcgtgccggagaaggtgggagttcgcgaacgagttcttcaggaagggggagaagcagctgctcaccgagatccaccgcaggaagacgtcgtccgcatcgacggcgtcgccgtctccgccgccgttcttcgcgccgccgcacttccctctgttccaccaccccggcgtcgcggcggctcagcaccaccacgcgttcgtcggcgacaacggggttttggcggcgcatggcatcggcatgccgttcccgcagccgcattggcgggagccgaacttgccggtcgcgacgcgcctgctgcgctaggcgggcccgcgccgtcgccgtcgtcggcggaggccggcggcgccgggcgcgccgccaccgccgcggtgctgatggaggagaacgagcgcctgcggcggagcaacacggcgctgctgcaggagcttgcgcacatgcgcaagctgtacaacgacatcatctacttcgtgcagaaccacgttcgtcccgtggcgccgagcccggcggcggccgcgttcctgcagggcctcggcatgcaggcgcgcaagaagcccgccgccgccaacgtgctcaacaactcaggcgggagcacaacgtcgagcagctcgctcaccatcgccgaggagccttcccctccgccgcagcagcagcatctagccggcgagaagagcggcggggaggcaggcagcagcagcgccgctcggtcatcggcgccgaccaagctcttcggcgtgcacctaagcgccgccccgtgcggcgccggcagcaagagagcgtcttcgccggaggagcacccgcccacgtcgccggccacgaagcctcgcctcgtgctggagtgcgacgacctaagcctgaacgtcgcgccgtcgtcgtcgtcgcagcagcagctgtcagccgcctcttctccaacaagcgccagctag

SEQ ID NO: 3998 - DNA, 1490 bp, Oryza sativa
atggcggccaagtgggcgatgaagaagaagctcgtcggcggcgacgccgggtacgtgctcgaggacgtgccccacctcacggactacctgcccgagcttccgacttacccgaatcctctgcaagacaacccggcttattcagtcgtcaagcaatacttcgtcaacactgacgacaccgtcacgcaaaagatcgttgttcataagaccagtgctaggggcacccatttccggcgagccgggccgcggcagcgggtgtacttccagtccgatgaggtcaacgcggccattgtcacctgcggtggcctctgccctggacttaacactgttatccgcgagcttgtgtgcggcttgtatgatatgtatggcgtcaccagcgtcgttggcatagagggtggatacaagggtttctattctagaaacaccgtcgcactgacaccgaaatcggtgaatgacatccacaagagaggtgggactgttcttggaacctccagaggaggccatgacaccggcaaaatagttgacagtattaaggatcgcggtattaaccaggtgtatattattggaggtgatggtacccagaaaggtgcttccgtaatttatgaggaagttcggaggcgaggcctcaaatgttctgtggttggtgtcccaaagaccatagataacgacattgcggtgatcgacaagtcctttggttttgacactgcggtggaggaggctcagagggccatcaatgctgctcatgttgaggctgagagtgcagagaatggcattggtgttgtgaaactaatggggcgcaacagtgggttcatcgcaatgtatgctactctggctagtcgcgatgtggattgttgcttaatcccagagtctccattctatctagaaggaaaaggtggactccttgaattcatcgagaaacggctcaaggacaatggccatatggtcattgtagtggctgagggtgctgggcaagatctcattgcgaaaagcatgaattttgtggatactcaagatgcttctggaaataagctacttctggatgttggcctttggctctcccagaagatcaaggatcatttcaagaagaagcgcaacttccccatcactctcaagtacatcgacccgacatacatgatccgtgccgtcaggtcaaacgcatccgacaacgtctactgcaccctgctagctcacagcgccctccacggcgccatggcggggtacaccggcttcaccgtcgcgccggtcaacggcaggcacgcgtatatcccgttctacagaatcacggagaagcagaacaaggtggtgatcacggacaggatgtgggcgagggtgctgtgctcgacgaaccagccatgcttcctgagccacgaggacgtcgagcacctcaagcacgacgacgacgagcaccacctgcacaacacgcagctcctcgaaggcgagagctcgccggtgaaggactcctccaagtgcaacgggacagcagcgccagtgtg

SEQ ID NO: 3999 - DNA, 1190 bp, Oryza sativa
atggctgaggttgacaccttcctcttcacttccgagtccgtcaatgagggacaccctgacaagctctgcgaccagatatccgatgcggtgcttgatgcgtgccttgctgaagaccctgaaagcaaggttgcctgtgagacctgcaccaagaccaacatggtcatggtgtttggtgagatcactaccaaggccaatgttgactatgagaagatcgtcagggatacttgccgcggcatcggctttgtgtccaatgatgtaggccttgatgctgaacactgtaaggtgcttgtcaacattgagcagcaatcccctgacatcgcacagggtgtccatgggcacttcaccaagcgcccagaggagattggtgccggtgaccaggggcatatgtttggatatgcaaccgatgagacccctgaattgatgccactcagccatgttcttgctaccaagctcggtgcccgtctcaccgaggtccgcaagaacggggcatgcgcatggctgaggcctgatgggaagacgcaagtgacagtggagtaccagaacgacaatggcgccatggtccctctccgcgtccacaccgtgctcatctccacccagcacgatgagaccgtgaccaacgacgaaatcgcggctgacctgaaggagcatgtcatcaagcctgtcatcccagagcagtaccttgatgagaagaccatcttccatctcaacccgtcaggtcgcttcgtcatcggtggacctcatggagatgcaggtctcaccgggcgcaagatcatcatcgacacctacggtggctggggagcacacggtggtggcgcgttctccggcaaggacccgaccaaggttgaccggagcggagcctacattgcaaggcaggcggccaagagcatcgttgccaatggcctcgctcgccgctgcattgtccaggtgtcgtatgccattggcgtgccggaaccgctctcggtgttcgtcgacacttacggcacgggcaagatccctgacagggagatcctcaggattgtcacggagaacttcgatttcaggccaggcatgatcatcatcaacctcgacctgatgaggggtggcaatggccgctacctgaagacggcggcttacgggcacttcgggagggaggaccctgacttcacctgggaggtggtgaaacccctcaagtgggaggagccttctgcata

SEQ ID NO: 4000 - DNA, 1710 bp, Oryza sativa
atgggcgtcctcttctcgtgccccgtcgatgactacgacgcattggaggagagcgccgcggcggcggcggcggcgtcgtcggagtcgaactccggcggcggcaagccggcggcgatcctgaaggcgttgggatccgggaagctgctcatcgaagggtcgctcagcttcaagcgtgaccagcagatgagccccacctccctcctccaggtggagaccgagatctccatcaagcctgccgccgccgacattgccgccgcgccaagggcaagkttarccgccgacggcggcgcggcggcggcgragagcccgaagcacgaggcggcggcggtgaagctgcagaaggtgtacaagagcttccggacgcggcggcagctcgcggactgcgccgtgctggtggagcagagctggtggaagctcctcgacttcgccctcctcaagcggagctccgtctccttcttcgacatcgagaagcaggagacggccgtctccagatggtccagagcaagaacccgagctgccaaggtcgggaagggattgtccaaggatgaaaaggcacagaaactcgcattacagcactggctcgaagcgattgacccgcgccaccggtatggtcacaaccttcactactactatgatacctggctccactgcgagagcaagcagcctttcttctactggcttgatgtgggagaagggaaagagatcaatcttgagggcaagtgctccaggtcgaagcttttgagccaatgcatcaagtaccttggtcctaaagaaagagaggactatgaagttatacttgaggatggcaagttcttgtacaagaaaagccggcaaatcctcgatacctcttgtgggccaagagatgcaaagtggatctttgttcttagcacatcaaagagcttgtatgttggccagaagaagaaaggcaaatttcaacattcaagcttccttgctggaggggcgacttctgctgccgggcgattggtggttgaaaatggaaccttaaaggctatttggccacatagtggacactaccgcccaactgaggagaacttcgaggagttcaagagcttcctgaacgacaactctgtcgatctcaccgatgttaagatgagcccagcagaggaggacgaggaattctggggtagcctgaaaaggatcagttcagagagctaccccaagaacactgccactgacaactctgaagaccaagccgctgaagctgaagaaaccggcaattcccagatgcctcgagtctctgacgaaccaacctgtgcagagatcgacggctgcgacgaaccggcggcgacgaggagggtagattcgtcgtcagctgttgctgctgctgctgagaacactgaagccgaggaggaggatcaagaaggcggcggcgagcaggcgccggtgccgagggagaagatcctggagaggatcaactccaagaaggggatgaggtcgtatcagctcgggaagcagctctccttccggtggacgaccggcgccgggccgcggatcgggtgcgtgcgcgactacccgtcggagctgcagctgcgggcgctggagcaggtcaacctgtcgccgaggarcgccgccgccgcgtccgcgtcctcccggttctcgtctccgcatcgccggacttcaacggckcgtcggcgcccgcaacgccgaggaaggcgctccggccgtcgcccctgcagcatgggctggtag

SEQ ID NO: 4001 - DNA, 3159 bp, Oryza sativa
atggagagattacatacgagccgtaaccacgtctatggcttcatcatcatcctcctcctcctcgtacaagctacggccgcggccacctcgcggtgcccggcgcaacaggccgccgcgctgctccggctcaaacgatccttccaccaccaccaccagccgctcctcctgccgtcgtggcgcgccgccacggactgctgcctctgggagggcgtgtcgtgcgacgcggcctccggcgtcgtcgtcaccgcgctcgacctcggtggccacggggtacatagccccggcggcctggacggcgccgccctcttccagctcacgtcgctccggcggctcagcctcgcggggaacgacttcggcggcgcggggctcccggcgtccgggctcgaggggctcgccgagctcacccacctcaacctctccaacgccggcttcgccggccagatacccatcggcgtcggcagcctgagggagctcgtgtccctcgacctctcctccatgccactctccttcaagcaaccgagcttcagagctgtaatggccaacctgacgaagctgagggagctccggctggacggggtggacatgtcggcggcggcggcggcggcggccggagactggtgcgacgtgctcgcggaatccgcccccaagctccagctcctcaccttgcagtcctgcaagctctccggcgccatacgctcctccttctcgcgcctcgggtccctcgccgtcatcgacctgtcatacaaccagggcttctccgacgcgtccggcgagcccttcgccttgtcgggtgagatccccggcttcttcgccgagctcagctcactggcgattctcaacctctccaacaatggcttcaacggctcgtttcctcaaggagtgttccacctggagaggctcagggtgctagacgtgtcgtcgaacaccaacctctccggcagcttgccggagttcccggccgccggggaagcctccctggaggtgctggacctgagcgagaccaatttttccggccaaattccgggctccatcggaaacctgaagcgtctgaagatgctggacatcagtggcagcaacggccgcttctctggtgctcttcctgattcgatcagtgagcttacatccttgagcttcttggacctgagcagcagcgggttccaactcggggaattgcctgcttccatcggcaggatgcggtcactgtccacgcttcggctgagtgagtgtgccatctccggcgagataccgtcgtccgttgggaatctcacacgcttgagagagttggatctctcacagaacaatctcacagggccagttccagccttcttattctcacttccacgattggagttcatatcgctcatgtcaaacaatctagcaggtcccctccaagaattcgacaatccttctccgtccctaacatctgtttacctgaattacaaccagttgaatggatcaatacccaggtctttctttcagctcatgggcttacagacactagatctctctaggaacggcttgagtggggaagtacaacttagttacatttggagactcacaaatctaagtaacctatgcctgtcagcaaacagactgacagtgatagctgatgatgaacacatctacaacagctcttcctctgcatcactccttcaacttaactccctggggttagcatgctgcaacatgaccaagatccctgccatactaaggtcagttgtggtgaatgaccttgatctctcgtgcaaccaacttgatgggcctatacccgattggatatgggcaaatcagaacgagaacatagatgtcttcaagttcaatctttcgcgcaatagatttactaacatggagctccctctggctaatgccagcgtatactatcttgatcttagtttcaactatcttcaagggcctctacctgtcccctcatctccacagttcttggattactccaacaacctattctcatcaatcccggagaacttgatgtcaaggttgagcagttctttctttctgaacttggccaacaattcactgcaggggggcatcccacctatcatttgcaatgcaagtgacctcaaattccttgacctgtcttacaaccatttcagtggtcgtgttccaccttgtctactagatggacatctgaccatattgaagctgagacaaaacaaatttgaggggaccttgcctgatgacaccaaaggaggatgtgtttctcagacaatagacctgaatggaaatcaattgggggggaagctacctagatcactcactaactgcaatgacctagaaatccttgatgtgggcaacaacaatttcgtggactccttcccaagctggacaggggagctaccaaagcttagggttcttgttctacgatccaacaaattcttcggcgcagtggggggaattcctgtcgacaacggtgatcgaaacagaacacaattctctagtttgcagatcatcgatcttgcctcaaacaacttctctggcagtttgcagccgcaatggttcgatagcctcaaagcaatgatggttacaagagagggtgacgtgcgaaaggccctggagaacaacctctcggggaaattctaccgtgacacagtcgtggtcacgtacaagggcgcggccacgacattcatcagggtcctgatcgccttcacgatgatcgacttctccgacaacgcgttcaccggcaacattcctgaatccattggaaggctcacctcgctaagaggtctcaacctgtcgcataatgccttcaccggaacaatcccttctcagctcagtggattggcgcagcttgaatcgctcgatctctctttgaaccagcttagtggggagatcccagaggtgttggtgtctttaacttctgtcggctggttgaacttgtcctacaatcgtttggagggtgctattccgcagggaggtcaatttcagacgtttggaagtagctcatttgaagggaatgccgccctatgcggcaaaccgctgtctattcggtgcaatggttcgaatgcagggcccccttcgttggagcacagtgagagctgggaggcccggacagagaccattgtactgtatatttccgttggatcagggttcggtttgggatttgcaatggccttcttgttccaagtgttccgcggaaagtga

SEQ ID NO: 4002 - DNA, 1734 bp, Oryza sativa
atggtactcactcacctcctctgctccctcctccttgccaccgcattgctgctgctctccatctcccgtacagatgcgggcgagatcggggtgtgctacgggagggacgcaaaggacctgatcgacccaccggcggcggtgagccttctgaaggcgaacggcatctccgcggtgaggatcttcgacgcggacccgacggtgctggccgcgatggcgaacaccggcatcaaggtgatggtggcgatacccaacgccgacctggctgccgccggccaggacctgcgcagcgcgaccgactgggtggcgagcaacgtggcgccgtaccgcagccggggcacgctgatcagcggcgtcgccgtcgggaacgaggtgttcaggcagaggcccgagctgaccggggcgctcgtctcggccatgcgaaacgtgcacagggcgctggagaacctgaacctggcgaacgacgtgaaggtgtccacgccgattgccttcgatgcgctcaagcagtcgtcccctccatctgcgggggagtttaaggatgagatcgcgcaatcggtgatgaagcccatgatcgacttcttgaaacagaccggctcgttcttcatggtcaatctctacccgtacttcgcgtacgtggctcagccggacaagatctctctcgagttcgcgacgttccgccctaatgctggtgtgctcgatggcaataccgacatcaggtacttcagcctctttgatgctcagctcgacgctgtttacgccgcgataaacagggtttctggtggtagcttaacggtctcaatggctcgacgagatggaatccttagtgtgcaagcttcggaatcagggcacccctctggaggtagatttcccctatcttccatgctagctgcagccgatacggactcggtggccacgatagccaacgcccaagcgtacaacaatgggcttatcagacgtgttgtatccggagcctccggtatgcgtgacgtctccgcctacattttctctcttttcaatgaaaacgagaagcctggaccaaccatagagagaaactttggcttgttctacccaaatggtcagaaggtgtatgaggttgactttcggggcggtgscggtggcggagcttgtcctacaaagacgagttggtgtgtggcgagagcagatgttgggagtgcagcattgcagtcagcgttggactttgcgtgcggtaacggcgcggactgcagcgctatccaacagggcagtgtgtgttttgagccaaacaccttggtcgcacatgcatcgtacgcattcaatgactactaccaacgcaagggccaggctagcggcacttgcgacttctctggcgccgcttccatcgtattcaagccatcaccaagcatatgtgatccgaacccaagttggtgtgttgcgaaatcggaggtcggggacgcacggctgcaaaatgcactagactatgcatgtggtagctgtgcggactgcagcgccattcaaccaggtgcacagtgctttgatcctgacactaaggtggcacacgcgacctatgcattcaacaatttttaccagaccaccggtcgggctagcggatcgtgtgactttgcgggtgctgcttctattgtcaaccagcaaccaaaaataggaaactgcgtgctcccaccaaacaatgcttggacgacagaacaaactgcaattgaagatcaatcgactgcaaacttaccagcaacagcttggcagtga

SEQ ID NO: 4003 - DNA, 3036 bp, Oryza sativa
atgatgagcaatcttaagcttggggtggaggttaccagtgctcatgacctcctaccaaaagagcagggcacatgcaacccctatgtcgagatcgaattcgatgaccagaagttccgcacagccatcaaagagagggatatcaaccctgtctggaacgagcagttctacttcaacatatctgatccatcccgcctcactgagaaagacctcgaggcgtatgtgtaccacgcaaaccgcgccagcaattccaagacttgccttggcaaggttcggatctccggtacatcctttgtcagccactcagatgccacacctcttcactaccccctggagaagcgcacgatcttatcccgtgctcgtggtgagctcggtctcagggtgttccttacagatgatccatcagtcagagtgtccgctcctggtcaggagttcgacttcataagcacgcctacgactgcccaagagcaggtagccgccaatgccattccaaatcctttccaggagaccagagcagatcaagtgaggcaattccaacacttaccaaaagaacagcaccagcaccgtccgcagccaatgactgcgcagccatactaccctgaaagttcatacggacaacagcaacagaaaacctactctgctgtcgggaacaaagctgaaggtcctccacctccagtcatgaggatgtatgctcaaggtccacagcagcagcctgtagaattccagctgaaggaaacaagcccaacacttggtggcggacgtgttattggcggccgggtgatccccggtgaaaaggcaggggcatacgaccttgttgagaagatgcagtacctatttgtgcgtgtggttaaggcccgtgatctgccccacatggacatcactgggagtcttgatccttatgttgaggtgcacctcggaaactacaaaatgaagacaaggcactttgagaagaaccagaggcctgagtgggatgaggtgtttgctttccctagggaagtaatgcagtcaacgtcacttgaagttattgtgaaggataaggacttcattcgggatgattatgttggccgggtgtcaatagatctaaatgaggtaccactaagggtccctcctgacagcccattggcaccagagtggtatcgacttgtggggaaggaagggcacagggataaaggggagctgatgctcgctgtctggtatggaactcaagcagatgagtgcttcccaagtgccatccacgcaggatcagaaccaattgattcccatcttcacaactacatccgtgggaaggtctaccctgtacccagaatgtggtatgtgagggtcaatgtaattggggcacaggatatatttccaatggagaaccacatacctgatgtatttgttaaggtgaggctgggccaccaaatgctgaagacaaggccagctcgctcaccaaccagaaacttcatgtggaatgaggagatgatgtttgtcgcggcagagcctttcgaggaggacttgatcatacaaatagaggatcgagttgctcagaacaaggatgaagtgattggtgaaactatgatacctctcgcaaggcttccaaggagggctgaccataagccagtgctgccagcatggtttgatctcagaaggccaggactgattgatctgaaccaactaaaggaagataaattctatgcaaaggtgcaacttcgtatttgccttgaaggtggttaccatgtgctcgatgagtccacacagtactgtagcgatctccggccaacaatgaagcagctgtggaaaccaccaatcggtctgcttgaagttggcattctaagtgcaaatgggctcaatccaacaaagaccaagcatgagcgggggtcatgcgatgcatattgtgttgccaagtatggtcagaaatgggtgcggacacgtactattgttgacaacttgaaccctagattcaatgaacagtacacatgggatgtcttcgaccatggaacagtgctcaccattggtttatttgacaactgccacatatctgcagacagcaaccacagtagttcccccggccatatggacaagcccatcgggaaagtgcgaattcggctttcaactcttgagactgggagggtgtacacacacacgtatccattacttgtcctccacccatcaggagttaagaaaatgggagaactccacctggccatcaggttcacagccacatcccttctcaatgtgctcttcacatattctcggcccctcttgcccaagatgcattacgcgcaaccactgtcaatagtgcagcaggaaatgctccgccaccaagctgtgcaacttgtcgcacagcgtctagggcgcatggagccaccagttcgcagggaagttgttgagttcatgtcagatgcccgctcacacctgtggagcatgcggcgaagcaaggctaacttcttccgtcttatgcaagtcttctccggattcattgctgcaggaaagtggtttggcgacgtttgtcagtggaaaaacccagtcacaacagttttagttcatgtgctatttatcatgcttgtcttctacccagaccttatcctcccaacaatcttcctctacatgttcttgataggattgtggaattaccggttccggccgcgtttcccacctcatatgaacacaaggatatctcatgccgatatgacaaacccagatgagcttgatgaagaatttgatacattcccaacatcaaagagtccagatctggttaggatgaggtatgacaggctacggcatgttgctgggaggatacagacagttgttggggacattgcaactcaaggagagaggctgcagtcgctgctcagctggagggatccaagggcaacatctatgttcctattgttttgcctgcttactgcagttatcttgtatgtgacaccattccaagtgattgcactctgccttggtttcttctggatgaggcacccacggtttcgtcataaggttccatcggcacctgtgaacttcttcaggaggctacctgcaaagacagattctttgctataa

SEQ ID NO: 4004 - DNA, 975 bp, Oryza sativa
atggctcagccaacttcgtcagcaaggtgttccctcgtcgtgatggtggtggtggtgctcgcggtcgccggcgggtcgtcggcgcagctgtcgccgagcttctactcatactcgtgcccgggagtgttcgacgcagtcaagtgcgggatgcagtccgccatcgccaatgagaagcgtatcggcgcctccatcgtccgcctcttcttccacgactgcttcgtccaaggttgcgacgcatcgctgctgctggacgacacggcgagcttcaccggcgagaagatggcgaaccccaacaacggctccgtcagagggttcgaggtgatcgacgccatcaagtcggcggtggagaccatctgccccggcgtcgtctcctgcgccgacatcctcgccatcgctgccagggacagcgtcgccatcctgggtgggccgagctgggacgtgaaggttggtcggagagactcgcgcacggcgagcctcagcggagcaaacaacaacatcccgccgccgacgtcgggactcgccaacctcacctccctcttcgccgcgcagggcctctcccagaaagacatggtcgccctctccggatctcacaccattggacaagcacgatgcacaaacttcagagctcacatatacaacgaaaccaacatcgacagtggctttgcgatgagcaggcaatcaggctgccctcgtagctcaggctcaggtgacaacaatctggcacctttggatcttcagacgccaaccgtgttcgagaacaactactacaagaacctcgtcgtcaagaaggggctcctgcactctgatcaggagctcttcaatggcggagcyactgatgctctkgttcagtcttacatwagtagccagagcacattctttgcggattttgtgacgggcatgatcaagatgggggacatcacaccgttgacgggatcaaacggggagatcaggaagaactgcagaaggattaattaa

SEQ ID NO: 4005 - DNA, 975 bp, Oryza sativa; identical to SEQ ID NO: 4004

SEQ ID NO: 4006 - DNA, 795 bp, Oryza sativa
atggaggacagagaccgcgaccaccgcggcggcgccgacgaggacgccccgggaccagccgccgccgccgtcgcagctgtggacggggaggacgaggtggaggatgatggtgggggtttctccttccccgtcccgccgttcgccgcggacgcgttcatcgtgcccgtgtacccggtgtttggtcggccgatgtccccgccgccgcgggaagccgttgtggaggaggaggaggaggatgagccggagacggcaaccctgcgggtgcccttgggccggctgctgctggaagagcgggagttccgggcgaggcagcgggagagctcgggaacgtcgccggtgcagccgcagcggcggcggccggacgacgagggcgagctggagggggtgccgccggagagctactgcctctgggctccgggcgggcagccgtcgacgacgccagcgtccccgcggcggtgccggaagagcggctccacggggtcggtgctccggtggcgccgcatcagcgagcgcctcgtccgccggagccacagcgacggcaaggagaagttcgtgttcctcaacgcccccggcggcggcgccccgtcgcctcacccgcccaaggacaacgacgatgcaaacggcggcggcagcgtcggcaagggcgacgccggccgccacggctggagctattacagcaagggcggcggcggcggcagcggcggccgtcggagatcgtatcttccctacaagcaagagctcgtcgggttgttcgccaacgtcagtgggttgcggcggagctatcacccgttttaa

SEQ ID NO: 4007 - DNA, 1053 bp, Oryza sativa
atggccgccgtgaacacagtgtcgtcgctgccctgtagcaaagctggcgccgccgtagccgggggagctccgaggccgtcgacctgctccgtattctaccctcctcgttgctggtccaagcgaagcagcggtaatggcgtgcgggcgcaggcgtcgacgacggagacgaccgcagcgccggctgcggaggtgactactaaggtggagaaggtgtcgaagaagcaggtggatggcgtggtgacgaacaagtacaggcccaaggagccgtacacggggcggtgcctcctgaacacgaggatcaccggcgacgacgcccccggtgagacgtggcacatggtgttcagcaccgacggcgagatcccctaccgcgaggggcagtccatcggcgtcatccccgacggcatcgacaagaacggcaagccccacaagctccgcctctactccatcgccagcagcgccatcggggacttcgccgactccaagacggtatcgctgtgcgtgaagaggctggtgtacaccaacgatcagggagagatcgtcaaaggagtctgctccaacttcctctgtgacctgaagcctggttcggacgtgaagatcacggggccagtggggaaggagatgctgatgcccaaggaccccaacgccaccatcatcatgctgggcaccggcaccggcatcgcgcccttcaggtccttcctgtggaagatgttcttcgaggagcacgacgactacaagttcaacggcctggcgtggctcttcctcggggtgcccaccagcagcacgctgctgtacagggaggagttcgagcggatgaaggagatcgcgccggagaggttccggctggacttcgcggtgagccgggagcagacgaacgcggcgggggagaagatgtacatccagacgcggatggcggagtacaaggacgagctgtgggagctgctcaagaaggacaacacctacgtctacatgtgcggcctcaagggcatggagaaaggcatcgacgacatcataatcggacctcgactgtcaagaagacggcatcgactggcttga

SEQ ID NO: 4008 - DNA, 894 bp, Oryza sativa
atgctgatggatcagattttggagctcagggagaaggagatgaacctcttgaaggagaatatggtactccgtgatcagtgtaaggctctgtcatcgccatggtcgacgtctgtgggagagctgaagaataagcaggcggatgatgatgttcatcgtcatgaggattattccggcggcggcgtacgcgacgacgatgatcggcgcatgatggaggacgtggagacagatctggccgcggccaatcaggcgggcaaagtcttgaagaaaggtaagaagaaacaagccaaggatgaattagatcgccagaagcaggctgagaagaagagacggcggctggagaaagcgcttgcaaactccgctgccattatatctgagctggaaaagaagaagcagaagaagagggaagaacagcaaaggctggatgaggaaggtgctgcgatagctgaagcagttgctcttcatgtcctcattggtgaggactccgatgaaccctgccatttgatgctaaacaagcacagaagatgcaaccattgggatcactcagctggttttgatttcgccgtggatgcacaaggcgctgatatttatcctcctgatggactgatacagtgcgctgatcatgtttatgctcccaaagggaggtgtattgattgggggattggccagccattgccatcttggggagaggtgaaggacttgcagttgcaggcaccgtgctaccaaggaatgttccaccagtcagttgcatgcccaggtttcatagcagctcaagcggtctcctccttgcaaatcggaggagattcgtcagatattacctctccaagccaaggagcgactgtcgttaataggatgcttggtgccaccaacaggctcaacctttacagagagatataa

SEQ ID NO: 4009 - DNA, 1002 bp, Oryza sativa
atggacttctccgatccgaagcgcaagccgcggtacctcagtaagatcctcatggtggcgctcctcaccgccattgcaatttatggaatgcttgtgcctatatggtttctgcaggataatctttcaagaggaaatatgggggcaatcaaggttaatagaatatttgcagaaaatgcttttgatgctgtcatgcactttgctgctgtcgcttatgttggtgagagcacacttgagcctttgaggtactatcataacatcacctcaaacactttagttgtgctagaggctatggcagcacacaatgtgagaaccctgatctactctagcacatgtgccacctatggagaacccgagaagatgcctatcaccgaaggaactccccagtttccgatcaacccatatggtaaagccaagaagatggcagaggacatcatcttggatttttccaaatccaagaaggcagacatggctgtgatgattctaagatacttcaacgtcattggttctgaccctgaaggaaggcttggcgaggctccaaaacctgaattacgggagcatggccgtatatctggtgcatgctttgatgctgcactggggataattcctggtttgaaggttaaaggtactgactatgaaacacctgacggtacttgtgtaagagattacatcgatgtcactgacctcgttgacgcccatgtgaaggcgctcaacaaggcggaaaggggcaaagttggcatatacaatgttggcacaggcaaaggtaggtcagtgaaagaatttgtcgaagcttgcaagaaggcaacaggagttgacatcaaggtcgactacttccctcgtcgacccggtgactatgccgaagtgtacagcgatcccgcaaagatcaacagcgagctgaactggactgctcaacataccgatctcctggagagcctcagggttgcctggacatggcagaagaagcaccggagcggctacggaccccctcaggccatggttttgtga

SEQ ID NO: 4010 - DNA, 410 bp, Oryza sativa
atggcggaccagctcaccgacgagcagatcgccgagttcaaggaggcgttcagcctcttcgacaaggacggcgacggttgcatcactactaaggagcttggaaccgtgatgcggtcccttggtcagaacccaactgaggcggagctgcaggacatgatcaacgagttcctgaacctgatggcgaagaagatgaaggataccgactctgaggaggagctcaaggaggccttccgtgtgtttgacaaggaccagaacggtttcatctcggctgctgagctccgccacgtcatgaccaaccttggtgagaagctgaccgacgaggaagtcgacgagatgatccgtgaggctgacgtcgatggcgatggccagatcaactacgaggagttcgttaaggtcatgatggccaagtg

SEQ ID NO: 4011 - DNA, 1910 bp, Oryza sativa
atgggaggatttcttgcagcagccatcgtggtgttcagccttcgtctcaacctggacacaacagcgtcagcgtgggaagacaaagatttcttcaaatctttccaacttgaatccaacaatactacaccatcctcatgcggcttaccatgcatgaagctatcatgctctggccaagacaccatcctactagatactaacaaatactaccttggaaggccatacaaggtgaccgccatagattacaagcaaggtctcctgaccgtcatcccgctcgcagacgaagaaaactcctcatcgtctccctgcccgcttctaaaatctatcaggccaagcgtaataacaggcaatccttattacgatatagggttcgagaacccttgcagactatacgatgcaccctattatgcagcactagtaagctgttcaacagaatttgcattagccagtgtccctggccctgctaccgataacgattgtattgctggccccatctcttgccttagcaaccaaacccacttctcctatctggtggctgtttatgttactatgtcttttcttccgttggattgtgaggtcatctcagatggcctcattccgataccacgtttttattactccgattattcctcatccacgttcagaaaaagtgcagaaagaatcctcaatttctctgataccacgatctggtggtttaacgacgattgctcacacccagcacagtgtgaagaacagggaggacgctgcgcattcagctcgcaaaggaatcaaacattctgcatgcgtccaggttcacatgccaaagtaattgcagctacatcatcggttgccgcatttgttgttcttttgttgatggttgccactgcactctatctttctctgaagacaaaatataacgaagagatacatctgaaggtagaaatgtttctcaaaacctatggcacatctaaacccacgaggtacactttctccgaagtaaagaagatatcaagacggttcaaggttaaagtaggacaaggtggatttggaagtgtgtacagaggtgagctaccaaacggagtccctgtggcggttaagatgctagaaaactctgaaggggagggagatgaattcatcaatgaggttgcaactattgggaggatccaccatgcaaacattgtccgcctccttggcttttgctcagaaggaacaaggcgggctctcatttacgaatacatgcctaatgattcgctggagaaatatattttttcacaagattctgatacttctcaagaactcctagtaccaagcaagatgctagatattgctttaggcattgcccgaggaatggagtacctgcatcaaggatgtaaccagcgtatcctccactttgatatcaagcctaacaacatcttgctggactataacttcagcccgaagatttcagactttggccttgcaaagctgtgtgcaagggaccaaagcatcattaccttgactgcagcaagaggcacgatgggctatattgcaccagagctatactctcggaactttggagagatatcttacaagtcagatgtttatagtttcggcatgctggtgttagaaatggttagcggaaggaggaactcagacccaagtgttgaaagtcaaaatgtggtctatttcccagaatggatctatgagcaggttaccattgggcaggatttagaacttggtagggaaatgactgaagaagagaaagcaataatgagacagctggccattgtggcactgtggtgcattcagtggaacccaaagaaccggccatcaatgacaaaggtggtgaacatgctaacagggaggttgcagaatctacaggtgccacctaagccgtttttctcagctgatagccatcctgtgctgcaagactcaggacatgctggcataatata

SEQ ID NO: 4012 - DNA, 1203 bp, Oryza sativa
  misc_feature (1)...(1203): n = A,T,C or G
atgcacattttaagaagaaaaaagaaaggcaataattcagaggcagcaaaaatcmaaaacctcactacgcaggacccgttattcctggcgtcgcgcgtcgcgtcaccggcgccgccgccgccgtccgccaccgccgacngcgcccggccggtggaggctgcaccggcgggcgcggcsccggaggaggcggcgaggcgggccaagatcggggtctacttcgcgacgtgktgggcgctgaacgtgatcttcaacatctacaacaagaaggtgctcaacgcgttcccttacccgtggctcacgtccacgctctccctcgccgccggctccgccaatcatgctcgcctcctgggccaccaggatcgccgaggcgcccgccaccgacctcgatttctggaaggccctgtcaccggtgagatcgcattgaccatggacaccatcgtctcctccttcttgattctgttctattctgaatctctgacgcgttcgttggatttggggattcgtttttgctcgttgtgggacgagcaggtggcgatcgcgcacaccatcgggcacgtggcggcgacggtgagcatggcgaaggtggcggtgtcgttcacccacatcatcaagagcggcgagccggcgttcagcgtgctcgtctccaggttcttcctcggcgagcacttcccggcgccggtctacttctccctcctcccaatcatcggcggatgcgccctcgccgccatcaccgagctcaatttcaacatgattggattcatgggggcgatgatctcgaacctggcattcgtgttccggaacatattctccaagaaggggatgaagggcaagtcggtgagcgggatgaactactacgcctgcctctccatgctctcgctggtcatcctcctccctttcgccttcgccatggaggggcccaaggtgtgggctgccggctggcaaaaagccgtcgccgagatcggtccaaacttcgtctggtgggtggcggcgcagagtgtgttctaccacttgtacaaccaagtgtcctacatgtcattggacgagatctcaccactgacattcagcatcggcaacaccatgaagcggatctccgtcattgtcgcctccatcatcatcttccacacgccggtccagcccatcaacgccctcggagccgccattgcgattctcggaactttcatctactctcaggcgaagcagtaa

SEQ ID NO: 4013 - DNA, 912 bp, Oryza sativa
atgagcggcggtcaggacctgcagctgccgccggggttccggttccacccgacggacgaggagctggtgatgcactacctctgccgccgctgcgccggcctccccatcgccgtccccatcatcgccgagatcgacctctacaagttcgatccatggcagcttccccggatggcgctgtacggagagaaggagtggtacttcttctccccgcgagaccgcaagtacccgaacgggtcgcggccgaaccgcgccgccgggtcggggtactggaaggcgaccggcgccgacaagccggtgggctcgccgaagccggtggcgatcaagaaggccctcgtcttctacgccggcaaggcgcccaagggcgagaagaccaactggatcatgcacgagtaccgcctcgccgacgtcgaccgctccgcccgcaagaagaacagcctcaggttggatgattgggtgctgtgccggatttacaacaagaagggcgggctggagaagccgccggccgcggcggtggcggcggcggggatggtgagcagcggcggcggcgtccagaggaagccgatggtgggggtgaacgcggcggtgagctccccgccggagcagaagccggtggtggcggggccggcgttcccggacctggcggcgtactacgaccggccgtcggactcgatgccgcggctgcacgccgactcgagctgctcggagcaggtgctgtcgccggagttcgcgtgcgaggtgcagagccagcccaagatcagcgagtgggagcgcaccttcgccaccgtcgggcccatcaaccccgccgcctccatcctcgaccccgccggctccggcggcctcggcggcctcggcggcggcggcagcgaccccytcctccaggacatcctcatgtactggggcaagccattctag

SEQ ID NO: 4014 - DNA, 3405 bp, Oryza sativa
atggccgcgctgcgactgccaagagcgccgaccaccgcggcgctcgccgccgggktcccccaccggttcccggcaccggagggggagcctccgccgccgcgcggccccaacagggcgcacctcaacgcgctgctcacgtcgtacggccgccgcggccgcctccgcgacgcccagctcctgttcgaccaaatgcccagccgcgacgtcatctcctggaccgccctcctcaccgcctacgccgacgggggagacctcgcctccgcgcgcctcgtcttcgacgacatgccccgccgcaacgccccgtcctggaacgcgctgctctccgtctacctccgcgcggcgcgcccgcgggctgcccacgcgctcttctacaagatgccggccaagaacgcggtgtcctacggtgccatcatctcggggctcgccaaggcggagatgctgcatgaggcggagttggtgtatgaggagatgccatggcagtggcgtgacccagtagggtcgaatgcgctgatggctgggtacttgagggtcggggagcttgccatggcactgagggtgttcgagggaatgacggtgagggatgtcatttcctggagcgccatggtcgatggcctctgtaaacatgggagtgtgtcagaggcgaggagggtgtttgacgccatgccagagcggaatgtggtgtcttggacttcgatgattcggggatatgtgaaacgtgggatgtgcagagatggtctcctcctgttcctgaaatatgagaagagaagtcttgccagagaagggattcagattcacaatttgattatatcaatgggatttgagctggatattttcttgggtgattcaataatcataatgtattctcgttttggttggatggttgatgcaaaaagggcgttcgactgcatgcagcagaaagacatagtatcatggaactcactgatcacaggttacgttcagcatgacatggttgaagaagcacatgtgctgttcaagttgatgcatcagaaggatgctgtttcttggacatcaatggttgttgggtttgctaacaggggttggatgagggaatctgttgaacttttcgagcaaatgccagtaaaagacgaggtcgcttggactgcgatcatttctagttttatcacaaatggggactatctaagtgcagtgcggtggttttgccgcatgtcacaagaaggatgcaaacctaacacaatagctttcagttgtctgctgagtgctttggctagcctggcaatgttgaatcagggaaggcaagctcatgcatattcgatcaacatgggatgggtgtttgactctgccgttcacacttctttggtatcgatgtatgcaaaatgtggaagcaacccaagccttattgctattaattctatgattacagcatttgtgcaacatggtttcgttgaagatgcgctgaaactatttaccaaaatgcaaaatgctggatacaagcctaatcatgttacatttttaggaattctgactggttgcgcacgtgctggttttgttcaacaaggttacaactactttgaatcaatgagaccagtttatggtgtagagccaaaccctgagcactacacatgtatggttgatcttttaggtcgtgcaggcctccttgctgaagcactggaaatgattaactcaatgccccagaatgatcattctgatgcatgggcagctttgctcagtgctagtagtctccattctaatctcgcttttgcaaaaatagcagcacagaagcttcttgagaaggatccttacgatgcaacggcttacacagtcctgtcaaggatgttctcctcagcagggatggaggatgaagaaatgctaaaagttgtacagctatccaacttggccatgtcctggaaaaagctcaattgcatgaggcgaaggcttccacctggacctccaaggtggccaatctttggtaaccttctccagttgagccctcttccccacaaagacttcgctcgattctgcaccaagtatggccccctggtctatcttcgtcttggaaccatcgatgccatcaccactgatgaccctgaagtcatccgtgagatactcatccggcaagatgaggtatttgcttcacggcctcggaccttggccgctgttcaccttgcctatgggtgcggtgatgtggcccttgctccgctggggccgaactggaagaggatgaggagggtttgcatggagcacttgctgacaaccaagcggcttgaatcttttgctgctcaccgagcactggaggctgagcacctctgtcagtttgtgtgggctaaagcccagtcagggaaacctgtgaatctcagagaggttcttggggccttctcgatgaacaacgtgacaaggatgttgctagggaaacagtactttggtctgcagtcagcaggccctggtgaagcaatggagttcatgcacatcacccatgaactgttctggctgctgggcctgatctatcttggggactacttgccagcctggaggtggcttgatccatatgggtgtgagaagaagatgagggaggttgagaagaaggtggacgacttccaccagaagattattgatgagcacaggaaggctagggaggccaagaagagtgcatcccttgatgatgataacaaagaagacatggactttgttgatgtactgctttctttgcccggcgagaacggaaaagagcacatggacgacgtcgagatcaaagctttgatgcaggacatgattgctgctgccaccgacacatcatcggtgaccaacgagtgggtgatggcggaggtgatcaagaacccccgggtgctccgcaagatccaggaggagctcgacggcgtcgtcggccgcggccgcatggtggcggagtcggacctcggccagctgacctacctccggtgcgtcgtccgcgagtccttccggatgcacccggcggggccattcctgatcccccacgagtccctgaagccgacgacgatcatgggctacgacatcccggcgcggacgaggatcttcatcaacacccacgcgctcggccggaacacccgcatctgggacgacgtcgacgcgttccggccggagaggcacctgccggcatcggcggacggcggccgggtggagatcagccacctgccggacttcaagatcctccccttcagcgccggcaagcgcaagtgccccggcgcgccgctcggcgtcatcctggtgctcatggcgctcgccaggctcttccactgcttcgactggtcgccgccggacggcctccgccccgacgacatcgacacccaggaggtgtacggcatgaccatgcccaaggccaagccgctcgtcgccgtcgccacgccgcgcctgccgccgcagatgtacggtcgccatggcaagcaagtttga

SEQ ID NO: 4015 - DNA, 1044 bp, Oryza sativa
atggcggcgtcgtccttgctccggtcgctctcccgcatctcgcgccgcggctgcgtgggaggcgcggggccgagcccgttccaccacagccgcctcccgtactcgccgttctccaccgcggcggcggatgcggtggagaggagggggttcgcggggctggggccgacggcgaagggggagaaggcgcgggtggtggtgctggggaccgggtgggcggggtcgcggctgatgaaggacatcgacacgaccgggtacgaggtggtgtgcgtctccccgcgcaaccacatggtgttcacgccgctcctcgcctccacctgcgtcggcacgctcgagttccgctccgtcgccgagcctctcgcgcgcatccagcccgccgtgtccaagtcccccggctcctacttcctcctcgcccgctgcaccgccgtcgaccccgacgctcacacgattgattgcgagacagttactgaaggtgagaaagataccttgaaaccttggaaattcaagaaacacaaaacaactcaaatcaagatatttgtgttacttagggcaaatgagatattgtcatcttttgatgttcgcctcaggcaatatgctacaaatcaactaactaagtcaggtgttaggcttgtgagaggcattgtgaaggatgtacaacccaacaaattaatcctggacaatggagaagaggttccttatggtttgctggtatggtctactggagttggtccttcatcattcgttaagtcgttgccatttccaaagtcaccaggtggaaggattggggttgatgagtggttacgtgttccttctgcccgggatgtgttcgctattggggattgcagtggatttcttgaaagcacaggcaaggatgttctcccagctttagctcaggaatcgaaagggatatctcttgcaggatttgtgagctggttcatctggcgctcagcatacctgactcgtgttgttagctggaggaacaggttttatgtggctatcaactggctgaccacactgttatttggccgtgacattagccgtatttag

SEQ ID NO: 4016 - DNA, 1130 bp, Oryza sativa
atggttgggcagacggtcatgcggattgtgcgcccctgcttcaagcccgaccaccagctcgccgtcggcggcaccagggatggattgctctggtacaaggacaccgggaggcacgcttgcggcgacttctctatggccctcgtgcaggcaaacaaccttctcgaggatgccagccaggtcgaagctgcccctcttcttctctcccactcctcctccaccacttttgtcggcatctacgatggccatggtggcccggagactgctcatttcatcgcacaacatttcttccccaatctaaagaaatttgctacggaacagcaaactgtttcagttgatgtcattcgcaaatcctatgctgccacggaggaagggtttctcaatcttgtaaggaagcaatggctcatcaaaccgcagcttgcctccgttggttcctgctgtttggttggcatcatcaatgaaggagttctttatgtagcaaatactggtgattcccgtgctgttctagggagacttgaaaggggtgttattaaggcggttcagctgtcagccgagcataacgcaagcattgagtctgtaagggaggaattaagacagtttcacccagacgatccacgaatcgtggtcctaaagcacaacgtttggcgtgtcaaaggccttattcaggtttccagaacgttaggcgatgcttacctaaaaagtactgaatttaaccgagagcctcttttggcgagattccggctttcagaacccttccacaaaccaattctttctccagaaccatccatagaagtacataaactgtgtacagaagaccaatttgtgatatttgcctcagatgggctatgggagcacctgaccaatcaggaggctgtggatatagttaactgtgcgccaagaaatggtattgcaagaagactaataaaagcggctctgcgagaggcagcaaaaaaaagagaaatgaggtactcagacttgaaaaagattgatcgcggggtcaggagacactttcacgatgatattactgttgtagtactattcctggactctgctctagttggcaagagattctatggtggcccattactttcactgaggggtggtgatggtgcttcaacgcttacacagaaatg

SEQ ID NO: 4017 - DNA, 2724 bp, Oryza sativa
atgtactacaaaaggcggccggaggtgatcactcaagtggaagaagtatacagggcgtacaggggtctagctgaccggtatgacatcatttcaggggaactgcacaaagcaaaccataccatcgcgacagctttccctgaccaagtgcagtatgcaatgctagaagaggaagatgacaatatccccaaggcatttaccccagtcgatccacgtaaaattcacaagtcgactgttgacggattgatgaagaagaagaaaggaggagagcagcctgcagggtcgatgaacaagaacacgacgtcagctccaatcgacaaggacaacgcacgggaggagatcagcagactacagaaagagatacttgtgatgcagaccgagaaagaattcatcaaaagctcgtacgagagtggcattgcaaagtactgggatcttgagaagcaaatcaatgacatgcaggaacaggtgtgccatttccaagataagtttgatgaaagtgcggtgattgaggatgatgaagcccgggcactgatgacagcaacagcccttaaatcttgtgaagacaccattgtcaaactgcaggaacagcggaagacatctgctagccaggcaatgggcgagtcagaaagagtcaaggttctacgtgagaagctcaargctgtaatggaggggcatgggaaatccttgccggattctccagatccttgtgataaaaacgtgaggaagaatcakggctttgagatggaaraggtacrgcatatcaaactgggtgaatttgagacgcagacagtgctcgagaagatcaaggaacattttgagagggacggcagcatctcggtggcagaaatcacagaacatatcgatgaacttgttaacaaggtggttgatttggagcttatggtgtcatcgcagagctcacagatagacaggctgtgtcgagagaacagcgagttggagagttgtctgcagagtctggaggaagagaatgtgagtgacccagataaagtaaatgagaagctgaagaagctagaagaggagctggtgagagtgcaggctcttgaaagctgcttccacaaagacgagagcacgatccgctcgaacttcagcgaagccataagcagactgagtggtatatcagagatgttgcagtcatctgaacacggtggtgtaggaggcacattgcgcatgtggacggatgggaaggaggaggaggaggacaatgatgcaggaggcatagatgatgttgctgaaccccaggtccagacggaggctgcatctgatgacgttgatcctgcgggtaaatcaacagctgacgttgatcctgcgggtaaatcaacagcgacgcaggaggaggcccaggcggtggacgttggacaggagaaagcaggaggatgttcgcgggagagagggtcgttggtacggctgcgtcacatctcctccgacgacctgggaggctgtgacgatgaagctccagctgcagtggatgaccccgatggcatgcggaagcagaagaaaggacaagaaggagaaggggttgaagaagagaagaaggttatcctggtggcggagtacagggcgctccttgaggaaaacaaggatgccaagaggaggctggctgaggtggagaagacgaaccaggagtgcatgcatgagatccggtcgctgcgtgagctgctcagcagtggctcatccgaggcaggagcggcagcagcaggaggasgaggaggaggaggaggaggmggagacagcagcggaggtcggcgcggccatcgaaggacgccgagctattcgctgggacatcacaggaagcagagcctgtcgtccatctcgaggatgatcagaatggggtcgaccatccatgaaggcgacgagagcgagaaggtgaaagctgaggagctgcggttgccagcggtggccacatcgtcgtcgcctctggagaacaagttacgcaaggacatcgacacgctgctggaggagaacctcgagttctggatgaagttcagctcgtccctgcagcgggtgcaggagttccagcgcaagcacgacgagctgatgcwgcagctgcagcagctgcagccggcggccaccgacggcaacagtgacaccaagcagaagcagaagcaggagcagcagctgagggcgctcaagacggagctgcaggaggagatcacggcggcactggaacaaggaggaggaggaggagagttcacgtcgtaccaggcggccaagttccagggcgaggtgctcaacatgcagcaggagaacaaccgggtttccgacgagctgcaggccggccaggaccacgtcaagggcctccaggcccagatcgagaagaagctgcagcacgggggcgtcaccctgcctgacgccgacggacctgcagccggagccggagccggagccacaaccccgccgccgctgccattgacgcgcgtcgcctccaagtccaaggtgcccctgcagtcctttctgttcccggccaaggccaagaagccgtcgctgctggcgcgcgtcacccctgtcctccagaagcagcagcccgatctcaggttccttgccaagctgcaaccgaggattaaacggaattttggcgttcacactaatgggcctgttcggcaaactgggactgcagctgcggctgctgtagcccctgctatcttagagcttgccggactattccggttggctgcggctgctgcaaccccggcagccaaacaggcccaataa

SEQ ID NO: 4018 - DNA, 2307 bp, Oryza sativa
atggcggcggtacgagacggcgaagacggtrggggtgaggttgcgaggagccgaggatggcggaccagcggtggcgcgggcgccgggcgktgggcgctagcggtgaacacccggcagcagacagagaggtcagcaaaaaagaagaaggccaatggcgcagccatcgccaatacttccaccctcttccagatgctccagtgtggaatcgagttactgcagctgttccaaacagaaggatggggagggttgtatagcggccttaaaccctctcttattggcaccgctgcttcacagggaatctattactacttttaccagattctcaaaaacaaggtggaagatctagcagttgctcgcggtaagaagggtctaggggatggtactgttgggatgttctcctggcttggtattgcagctgttgctgggtcaatcaatgttcttcttaccaatccaatatgggttctcgtgactcgtatgcaggaggcgccgaatcacaaggattattggtccatgacatcctttgtgaaattagttggaagaccatggtcggttgtaaccaagcttgtattaactatgcaactactattaaattggaacattctaatattattcaaaatatctacacatacacaagcagaaaagaagatcatggagtctaaaaaggagcttttgctgaaggatgttgctagggccaattcaatagaggtctcaattcttaaggacaggttgtataaacttgattctgaaaagcctcgtccatatgggacaattcaagcggtccgggaggtctaccgtgaatcaggcataagaggattctggaaaggacttattccaacactaattatggtatgtaatccatcaattcaatttatgatctatgaaacattggcaaagcgtctccggtcaaagagatctggaaaggaactcccaaaaaagaaccttactgctatggaggtattcttattaggtgcaatagcaaagctcggagctactgttgtgacatacccattgctagtggttaagtctaggttgcaagcaaaaccaggaaattggcaggaatgtgatgtccagatacacagctactttagctacggatatagatattttgggacggagggaatatttgctactcattgtgcaagtacgattgacgcgatcataaagatgatccggtatgaaggattgcacgggttttacaaaggaatggatggtgaaaagccaacaaaggctgacaagatccgccacagctttctttgggctggcaaagcttatgcaaacggcggcgtctgtcgggtcgcatgggctcgagtttgctcgcccaaggagtatggtggtttggggattcctgatctagagaggttgggaatcgccttgaggtcgcgatggctctggcagcagagaacttcaccggaaaagccgtggcaagggcttagtattctggtctcgcagaaggagcgcaatctagtatcgatttctatgggttcctccattcggttgctagcgccggctgtctatgctgcaatccctgcccatctccggaatcgacgcacggtggccgaggcaatgactaacagaagatggatccaggacatcagttcggcgttgggtattcaagcgatcctggagtatttcaagctttgggattgccttcggtcagtgcggctttccgaagagccggactctctatcttggcggtgggagacctcaggagaatactcttcccgctcggcttctcgtgttctcttttttggaagaactcgtctccagcacaagctaatttggcaatctttggcaccccctcgctgtcgctacttcctttggttggtactccctccgtttcacaatgaagtagctcttaaccgttgctggacagcagaccgtctccggagtcgtggtttgtcgcacccggatcgatgtgttttgtgtgatcaatgcgaagagacaattgatcatctcttggtcgcatgcccggagtcgtggcaactgtggtgggttgcgctcagagctatcgggcattcagagtgcttaccgctcaatgaacactctttcctctcatggttgtgcgactgtcgcaagaagatggtcaaggaacattgccggggtttcgacaccatcgtgacgttggttgcatggacgatctggaaggaaagaaacaatcgagtcttcaaccagaagagcagaacttgggcggaggttgcaagggttatgacgggtgaagcggagctgtggcggctagctagagctgcaatccccgttttggtagctcatgttagtggagaagggtcgcaaaatttagttggagattag

SEQ ID NO: 4019 - DNA, 1164 bp, Oryza sativa
atgctgggcgccgcgaggaggcagctcggatccggccccatgctggggcaggtgctgcggaggctccggccggcgacggcggctgcagcggatgcggcgagggcgtactccgcggcggcgaaggagatgactgtccgtgaagcgctgaactctgcactcgatgaagaaatgtctgctgatccttctgtttttctgatgggtgaagaggtgggagagtatcaaggtgcatacaagatttcaaagggcttgcttgacaagtatggtcctgagagggttctggatacaccaatcacagaggctgggtttactggcattgctgttggtgcagcgtatcaaggtcttcgacctgttgtagagttcatgacattcaatttctcaatgcaggcaattgatcatatcatcaattcagctgccaagtcaaactacatgtcagcgggtcagatatctgtccctattgttttcagaggacctaatggagctgctgctggagttggcgctcaacactcgcagtgttatgcggcttggtatgcacatgttccgggtcttaaggttctggttccatattctgcagaagatgctcgtggcttgctcaaagctgcgattagggatccggaccctgttgttttcttggaaaatgaactgctctatggagaatcattccctatttctgctgaagtgcttgattctagtttcgctctgccaattggcaaagcaaagatagagcgtgagggtaaagatgttacaattactgcatactccaagatggttggatatgctcttcaggccgcagatatattgtccaaagaaggaatcagtgctgaggtgataaaccttcgttcaattagaccacttgatagagctactatcaatgcatctgttagaaaaacaaatagattggtgaccattgaggaaagcttcccacagcatgggattggtgctgagatatgcatgtctgttgttgaggaaagctttgaatatcttgatgcaccagttgagagaattgctggagctgatgtacccatgccctatgctgccaatcttgagaggatggctgtcccacagttatccctggaggtgctcactattaagaagttggttgacgatattgtccgtgcagcgaagcgtgcgtgctacagagcggtgcccatggcagcaactgcctga

SEQ ID NO: 4020 - DNA, 2082 bp, Oryza sativa
atggcgtcggcggcggcggcggcggcgacggcgagggggccgcggtacgcgccgccagatccgacgctgcccaagccgtggagggggctcatcgacggcaacaccgggtacctctacttctggaacccggagaccaaggccgtgcagtacgaccgccccaaggcgccgccgccctcctcccccccggcgcagcagcctccggagaggcctaggaacagcgatcctgctgagtcgcaggcgcaggctggagcgagccgaacgcagaatgctgctcctgctgatgatagggcaaggaatgatcatttgaatgatcatttcgagcggcgcacggaagcggcgggaagtcatgcgcagaacgtgcctttcactgagcaaaatactaggagcaacccttcttcgcagccgtgctctgcagctggagtataccctgcacagaatgtattttcagaggctgccagtggagaccgcacctcaccagaagcgtatcgtgctaagcacgagatcactattgtcggaaatgaggctccagctccattcatgacatttcagtccacaggtttccctccagagattctaagggaggtacagcaagcgggattctctgcaccaactcctatccaagctcaatcatggccaattgctcttaggaatcgtgatattgtagctgtggcgaagacagggtttatccttcttaagcgccttcaacataattcaagggatggtccaacggtattagtgctttctccaacaagggaattggcaacacaaatccaagatgaagcgaaaaagtttgggagatcgtcaagaatatcgtctgtttgtttatatggaggtgctcctaaaggtcctcagctaagagatctagagcgtggtgcagacattgtggttgcaactcctggaagattgaatgacattttagaaatgcgaagagctgaccgcatgcttgatatgggttttgagccacaaataagaaaaattgtgaaacaagtacaacccaaacgacagactcttatgttcactgccacttggccaaaagaggtgaggaaaatagcctcagatttgctgtccaatccagtccaagttaacattgggaacactgatcaactggttgccaataagtcaatcactcagtatgtggatgttatcacacctccggagaaatcgaggcggcttgatcaaatcctaaggtcacaggaacctggatcgaaaatcataatattttgctccacaaagaggatgtgtgatcagctggctcgaaacctagcacggcagtatggtgcttctgctattcatggtgataaatcacaagccgagagggattctgtgttgagtgaatttcgaagtggcagatgccctattcttgttgctactgatgtggctgcccgaggcttggacataaaggatatcagagttgtggtcaactacgatttcccaacaggtgttgaggattacgtccatagaattgggagaacaggacgggctggagcgactggagttgcctatacattcttctgtgatcaggattcaaagtatgcttcagatctcgtgaagattttggagggtgcaaaccagtctgtttcgcaacagttgagagatatggtctcccgtggagggtatggtggaaggtcacggcgctgggcatcttcagatgactcttatggtggtcgaggatatgattcaggctatacttcaaggtcgactgacaactataacagtggttatggcagtcagtctgggaatggttctagctttcatagtagcttccataacagcaacagtggcaatcagtttggcgatacttctggcttccaaaccagcagcaacaacgatcaacctggtgatggtctcagctttcatgccaggttctatagctcttctcgaggcagcgatcagagcagaacaaacaatgctggctttcgtgatagaagtaggagtcctccaagcaatcgcaaccatgaagatcctgggtccaaggctgttggtgtctccaactgcatcatgatggtgacgaacagagtagatgaagctgttctcttaccaaactatactatcgtgcgtgctccccctgaagcaaaaatgtag

SEQ ID NO: 4021 - DNA, 1257 bp, Oryza sativa
atgcagcgcgcggcggcggcctcgcgcgccacggcatggagcacggcacggcacggcgccgcccgcgtcaccgcctccgcctccttctccggcggcggcggcatcgtcgccggtgcggcgctgccgctccgtgttcgcggcggccagctcatgtccctgccgctgctgtcgggtggcagggcggtcacggcgagggtggcggcggcggaggcgcckttgccggcggacgacgccgacgcggcggctgggcggaaaaagcgcactcgcgaaaacggcccactgggccccatgatcttgccttgttacctcctcaacatctacttcaacatctacaacaamcagttcttcctcccccctcaaraaccttctccttcctcatcctcgccatctcttaacccaatcagccatggaraatctcaggtcctgcagccattgccgttcacctacaccatcacggccttccagctcgcgttcggctccttcgtcatcttcctcatgtgggcgctcaagcttcatcccgcgcccagaatctccatttcacagctggccaagatcgcgccgctcgccgccgggcacatgctgggcacggtgttcaccaacatgagcctgagcaaggtcgccgtctccttcacccacaccatcaaggcgtccgagcccttcttcaccgtcctcctctccgccttcttcctcggcgagacgccttcgctgctggtgctgggctccctcgtgccgatcgtcggcggcgtcgccttggcatcgttgactgaactctctttcaactggattgggttctggagtgcgatggcatcgaatcttctataccaatcaagaaatgtgctcagcaagaagcttcttggcggcgaagaggaagcgttggatgacataaacctcttctcaatactcactatactgtcatttctgctgtctttgcctctgatgctgttctcagaaggggtcaagttcagcccaggatacctccggagcactggccttaacctccaagagctgtgtgtaagagcagcactagctggcttttgcttccatggctaccagaagctctcctacttgatcctggccagagtgtcacctgtcacccactctgtcgccaactgcgtcaagcgtgtggtcgtcatcgtggcgtctgttctcttcttcagaaccccaatttcacctgtcaatgcactaggaactggtgttgcattgggaggagttttcctgtattccaggttgaagagaacaaaaccaaagaatgcctga

SEQ ID NO: 4022 - DNA, 1620 bp, Oryza sativa
atgacgacgcctcgcgccaccaccaccacgtcgcccttctcctctctcctcctcctcccgatctccccctccgccgcgactcctccgcgccgcgccaggacgccgccgccggcggtggcacatggcggcgtgcggtggacggctggcgggaggcggcgacggcgagggtgccgggcggcggcggcggtggtcgaggacggcgtgcttctccccaaagaacaggaggacgacgcgtcggcggcgagatacgactggagggaggaktggtacccgctgtacctcgccaaggaggtbcccgacgacgccgcgctgccgctcacggtgttcgaccggcagctggtgctgtaccgcgacgccgccggcttgctccgctgccacgaggatcggtgcccgcacaggctagccaagctatccgagggccagctcgtggatggcaagctggagtgcctgtaccacgggtggcagttcgacggcgagggcaagtgcgtcaagatcccgcagctccccgacggcgccaagatcccgcgcaacgcgtgcgcgcgcagctacgaggtgcgggactcgcagggcgtggtgtgggcgtggatgtcggggaccaacccgccggacgagcggaagctgccgtggttcgagccgtacgcgcggccggggttcaccgacctgtccacggtgcacgagctcccctacgaccactccatcctcctcgagaacctcatggatcccgcgcacgtccccatctcccacgaccgcaccgactggacggcgaagcgggaggacgcgcagccgctcttcttcgaggtcaccgagcggacgccgcgcgggttcgccggatactgggggaagcaaaggacgccacaccttcgcaacctgctccggttcgaggcgccgtgcgtgcttaccaacacgctggagttcgtcgacaaggacggcaaggagcagtgcttctcggcgcacttcctctgccgccccgcggggcaggggaagtcgatgctgctcgttcggttcggatccacccagacgtcgccgctggtgaaggtgctcccgaggtggtacttccaccagaacgcgtgcaaggtgttcgagcaggacatggggttcctgtcgtcgcagaacgaggtgctgctccgggagaaggtgccgaccaaggagctctacctcaacctccggtcgtcggacacgtgggtggcggagtaccggaggtggatggacagggcggggcacggcatgccgtactacttcgggcacagcacgctgtcgccgccgccggtgccggccgttgtcgagcaggcgccggcgggggcggtcgccgggatgtccgcgtcgttcccggccaagggcggcgtcggcgccacgcacgcgcccaacccgaccaacaggtacttccgccatgtcgtgcactgcaaggggtgcagggacagcgtcaagaggtacgcctcgctcaagaacgccttcgccgcgctcgccgcggcggcgktggcggcggccatcctggcggcgaccaggcaattgaaggccgtcctgctggcgtccgcggccgcgctcgccgcggcgtcgtacgcgtgtaactgggtgctgtctctcatcacgaccaattttattaggacacacaggagactgtaa

SEQ ID NO: 4023 - DNA, 735 bp, Oryza sativa
atggagaatagcagggagcagcagccggagtcgtcgccggcgaacaacaatagcaagaagaagaagaagaagaagacggcgtcgcggttccggcgtgtgtgcgtgttctgcggcagcagccccgggaagaaggcgtcgtaccaggtggccgccgtgcagctggggcagcagctggtggagcgcggcatcgacctggtgtacggcggcggcagcgttgggctgatggggctggtgtcccgcgccgtccacggaggcggcgggcacgtggtgggcgtggtgcccaatggcgtgctgccacgcgagctgatcggcgagacgctgggggaggtgagggcggtgggaagcatgcaccagcggaaggcggagatggcgcgggagtcggacgccttcatcgccctccccggcggctacggcacgctggaggagctcctcgaggtcatcacctgggctcagctccgcatccaccacaagcccgtcggcctcctcaacgtcgacggctactacgactccctgctcgccttcatcgacaaggccgtccacgaaggcttcgtctcgccgcccgcccgccgcatcatcgtcgccgcacccaccgcctccgacctgctctgcaagctcgaggaatacgtgccgccgccgcacgacgccaccgccctgaagctcacctgggagatgtccaccgtatcggagcagcacgccggaagcatctactcccccaagcccgacatggcacgctag

SEQ ID NO: 4024 - DNA, 2865 bp, Oryza sativa
atggcggcaccggtgcccggaggctgtgcgaggatgagacgggtggttctcggcgtcgtgctgctgctctcggtgtgcgtccgagcaagccatgccgtgacggatagccaggacacatctgttctccgcgcgttgatggatcagtggcagaacgcgccgccaacgtgggggcagtctgacgacccatgcagcgattcgccatgggatggagtggtttacgtttacccactgctacccgactgtttcagtaaaatttctaccatgggcatcaagggagttctagctgctgacatagggcaactgaccgagcttcaatccctggacatgtcatttaataaggatcttggcggcgtgctcactccaaacatcggaaacttgaagcagcttaccaccttgattctggccggttgcagtttccatggcaacatcccggatgagctagggagtctgccaaaattgtcttacatggcattgaactcaaatcagttctctggaaaaataccagcttctatgggcaatctttccaacctctattggttcgacatcgccgacaatcaattgtcaggtcccttaccaatctcgacaaatggtggaatgggtttagacaagcttttcaaaaccaaacacttccacttcaacaagaaccaattgtccggtccaatcccagatgccctcttcagtcctgagatgacactgatccatttgctttttgatggaaacaaattcactggtaatatcccagactctcttgggcttgttactacacttgaagttgtccggcttgataggaattcgctctcagggccagttccagagaatctgaataacctcactaaagtaaatgagctggatctgagcaacaacacgttcgacccttctcctagcccacaatggttttggaggctgccacagctctcagctctgatcatacaatccgggaggctttacggcacggtgccgatgaggctgttcagcggcccacagttgcagcaagtgatcctcgacggcaacgcgttcaacggcaccctcgacatgggcaagtacatcagcagcgagctgagcatcgtcagcctcaaggacaaccagctctcctccgtcacggtcaccgccagctacaacggcaccctttcgctggccgggaacccggtgtgcgaccggctgccgaacacgcagtactgcaacgtgacgcagcgcgccgcggcggcgccgtactcgacgagccttgtcaagtgcttctcggggacgtgcaacgcggtgggggagagcatgagcccgcagagctgcgcgtgcgcgtacccgtaccagggggtgatgtacttcagggcgccgttcttcggggacgtgaccaacggcacggcgttccaggagctggagagccggctgtggaccaagctggacctcaccccgggctccgtcttcctccaggaccccttcttcaacgccgacgcctacatgcaggtccaggtcaagcttttcccctccggctccgcctacttcaaccgctccgaggtcatgcgcatcggcttcgacctcagcaaccagaccttcaagccgcccaaggagtttggcccttactacttcatcgcctcgccctaccccttcccagaggagcggtcgtcgtcgaggagcaagggtgccatcatcgggatcgcggccggatgcggcgtgctggtggtggcgctcgtgggcgcggcggtgtacgcgctcgtgcagcggcggcgcgcgcagaaggcgagggaggagctgggcgggccgttcgcgtcgtggaaacggagcgaggagaggggcggggcgccgcggctgaagggggcgaggtggttctcgtacgaggagctgaagcggagcaccaacaacttcgcggaggcgaacgagctcgggtacggagggtacggcaaggtgtacagggggatgctgccgacggggacgttcatcgccatcaagagggcgcagcaggggtcgatgcagggcgggcacgagttcaagacggagatcgagctgctctcccgcgtccaccacaagaacctcgtcggcctcgtcggattctgcttcgagcagggcgagcagatgctcgtctacgagttcatgtccgccggcaccctccgcgacagcctctccgggaagagcgggctgcaccttgactggaagaagcggctgcgggtagcgctcggcgcggcgcgtgggctggcctacctccacgagctcgccgacccgcccatcatccacagggacgtcaagtccagcaacatcctcatggacgagcacctcacggccaaggtcgccgacttcggcctctccaagctagtgtccgacaccgagaggggccacgtcagcacccaagtcaaaggaacactgggctacctggatcccgagtactacatgtcccagcagctgaccgagaagagcgacgtgtacagcttcggggtggtgatgctcgagctgatcatcgccaagcagccgatcgagaaagggaagtacatcgtccgggaggtgaagcgggcgttcgacgccggcgacgccgagttctgcgggatcaaggacatgatagacgccaggatcatgaacaccaaccacctggccgcattcagcaagttcgtccagctggcgctccggtgcgtcgaggaggtggccggcgcgcggccgtcgatgagcgacgtcgtcaaggagatcgagatgatgctgcagagcgaggggctgagcagcgcctccacgtcggcgtcgacgtccgcgacggagttcgacgtcaccaagggtgccccacgccatccttacaacgatcctctcccgaagaaggacaaggacatgagcaccgactcgttcgactacagcggagggtattccttccaatccaagatcgaaccgaagtag

SEQ ID NO: 4025 - DNA, 1650 bp, Oryza sativa
atgcaggcgtggttctccggcacggggccctccgcctcgtcggcgtcgtcgtcgtcgtcgccgccgcagccgtcgctgctcgcggaatggaactcctacgccgccgcgcgctccgcggaggaggaggaggacggcggcgggggaggcttcgggatcgacatcgaggccgccgtccgctccgccaacgaccgcgtctccggcaccttcggcgtggtatctaaaggtgttctagggttgccaggcagcttcaagtccacaacaagcagtgttccatcgagcaaatcacttgtgtattttggcctttttcttgctagtggaatattcctagttttcattgcgttcacgatatttctgccagtcatgaggttacctttcaccatgggatttgtgggcagcatggctgctaccatctacgtgtcaatggtgctccatagctacatactttcagttttcttctcttgtcttcagaatttgacaggaattttgggtggcatggcgcggctcccctatccgggaacgggtgatggggttttcgccgcccatggatatctcagattcggcctgggaatttggtatatcctctctctttctctctctgcgtatgagctgatcaagacggccaagtacatcgcgacgccggggaagggcatcctcgccgccgacgagtcgacgggcaccatcggcaagcgcctggccagcatcaacgtggagaacgtggagcccaaccgccaggcgctccgggagctcctcttcacgacgcccggcgcgttccagtacctctccggcgtcatcctcttcgaggagacgctctaccagagcacggccgccggcacgccgttcgtcgacgtgctcaaggccggcggcgtcgtgccggggatcaaggtggacaagggcaccgtggacatcgccggcaccaacggcgagaccaccacccagggcctcgactccctgggcgcgcgctgcgccaagtactacgaggccggcgcccgcttcgccaagtggcgggccgtgctcaagatcggcgccgccggcgagccgtccgagctcgccgtcaagcagaacgccgagggcctcgcccggtacgcgctcatctgccaggagaacggcctcgtccccatcgtcgagcccgagatcctcaccgacggcgcccacgacatcaagacctgcgccgccgtcaccgagcgcgtcctcgccgccgtytacaagtctctcaacgaccacaaggtcctcctcgagggcaccctcctcaagcccaacatggtcacccctggctccgacagcccaaaggttggcgcggaggtgataggggagtacacggtggcggcgctgcggcgcacggtgccaccggcggtgcccgggatagtgttcctctccggcgggcagagcgaggaggaggcgtcgcagaacctgaacgccatgaacaagctggaggtgctcaagccatggacgctcaccttctccttcggccgtgccctgcagcagagcaccatcaagaagtggggcggcaagaaggagaacgtcgccgccgctcaggctgccttcctcgcccggtgcaaggccaactccgaggccacgctcggcaagtacggcggcgccgccggcgacgccgccacgtccgagagcttgtacgtcaagggctacacctactag

SEQ ID NO: 4026 - DNA, 1218 bp, Oryza sativa
atggccgtggacgacgcggaggacgaccagctcgcctccatgtccacggaggacatcgtccgtgcctcccgcctactcgacaacgagatccgcgatgagctgcagcggaccaacttggagctggaatcgttcaaggagaagattaaggagaaccaggagaagattaagctcaacaagcagcttccctacctcgtcggcaacatcgttgagattctggaaatgaaccctgaggatgaagctgaggaggatggtgctaatattgatttagactcacaaaggaaaggaaaatgtgttgttctgaagacttccacaagacaaactatattccttcctgtggttgggctagttgaccctgataaactcaagcctggtgatttggttggagtaaacaaagacagctaccttatactggacacactgccatcagagtatgattcacgagtaaaggcaatggaggtggatgaaaaacccacagaggactacaatgatattggaggtcttgaaaagcagattcaagagcttgtggaggcaattgttttgccaatgacacacaaagatcggttccaaaagttgggcattcgcccccccaaaggagttcttttgtatggaccacctggaactgggaagacattgatggctcgtgcatgtgctgcacagacaaatgcgacgttcctgaaattagctggtccacaattagtccagatgtttatcggtgatggagcaaagctggttcgggatgcttttcagcttgctaaggagaaagctccctgcatcattttcattgatgagattgatgccattgggactaagaggtttgacagtgaggttagtggtgacagagaagttcagaggactatgttggaattgctgaaccaactcgatggatttagtagtgacgagcggataaaggtcatagcggcaacgaatcgtgctgacattcttgatcctgctttgatgcgatctggtcgtttggaccgaaagattgagtttcctcatccatctgaagaagcaagagctagaatcttgcaagatgtgaattttgaagagctggctcgctcaacagatgacttcaatggagcgcaactgaaagctgtttgtgtcgaagctggtatgcttgcactgcggcgagatgctacagaggtgactcatgaggacttcaacgaaggcataatacaggtgcaggctaagaagaagtctagcctaaattattacgcttaa

SEQ ID NO: 4027 - DNA, 1014 bp, Oryza sativa
atggatgccactgccatcggcaacggcgccctgcactccaatggcgccggcgccgacaccaaagggaagccgatcaaatgcaaagcggcggtggcgcacggccccggcgaggcgctggtgatggaggaggtggaggtggcgccgccggcgaggatggaggttcccctcaaggtgctcttcacctctatctgccataccgacctcagcgcctggaaaggagagaacgagcttcagcgaaagtttcctcgcatattgggtcatgaggcagcaggggtggtggagagcgtgggagagggtgtggaggatcttgcccctggagatcatgttgtccccatcttcaccggcgagtgtggtgcgtgcacctactgcgagtccagcaagagcaacctatgcaaaacctaccgtgtcaacccattcaagagcaccatggtcaccgatggtggcacgaggttcaccatgatcgaccgctcctccggtgcacgcaacccggtctaccattttctcaacacttccacctttgctgagtacactgtgattgactccgcttgcgctgtcaagatcaaccctaaggctcccttggagaagatgagtctcctcagctgtggggtctccacaggagtgggagctgcatggaacactgcaaacgtctccaaggggtccacagtggcaatatttgggcttggtgccattggtcttgcggttgccgaaggtgccagattgagaggagcatctcgaatcatcggagttgacataaaccctgaaaaattctccaaagaatgtgccctcgtccaaaacgataaggattatcaacctgaaggggtacagtggtatcaaaacatagggttagcatcctcgccattaggggcaattgatttcgtgcatccatacttgatccaatggctaaaaatagctaatggcattatggatcactgtagttctctaccattcgagtttgaatggcagaggatacaaaccccaaaacatgagcatttttctattgctgatgtgcattaa

SEQ ID NO: 4028 - DNA, 1509 bp, Oryza sativa
atggccgccgccgcggtggtccacctctccgtgcacggccgcctccgccgctcgccggagctccacgcccggccataccaccgcccgtcgctgctccggtgccgcgcgttcaagcaggaggccgataacggcggggaggaggcttcgtcgtcgccgccgccgccgacgacggccgaggcgcggaggcgcaggaagggcccgctgtacaagctgaaggcggcgattcaggggctcgccgggtcgcggtcggcggccgcggaggcgtacgggggcgagtaccagcgcgccgtcgagaaggccgaggagatcttcttctcggttgctacgcaagtaggccgatatgttatcactatgatgagcagcggtgttgtacttggagttggatttcagttatcaggtgcaaacagtgtcctagaggaacactgcaaagctggacctcgcaatgttgtcataactggaagcacaagaggattagggaaagcacttgctcgggagttccttctttctggagatcgtgttgtaattgcttcacgcaggtgccctgaatcagtccttcagaccatcaacgagcttgaagagaacatacaggagggcttgtcagttgcgaaaaagaaacagagagaaattttgctacatgccaaggttgttggtacatcatgtgatgtttgtaaaccagaagatgtgaaaaagttggtgaactttgccaaggatgagcttggatcaattgatatttggataaataacgctggcacaaacaaaggttttaggccactggtaaacttttcagatgaagatatttctcagattgtctcaacaaacctagttggctctttactgtgcaccagagaagccatgaatgtcatgcaacaccaacaaaagggaggtcacgtatttaacatggatggagcaggttctggaggatcaagtacaccattaacagctgtttatggttcaactaagtgtggccttagacagtttcaagcatcacttctgaaggaaagcagaagatcaaaagttggtgtacacactgcttctcctggaatggtccttacggacctccttttgagcggttcttctctgagaaataaacagatgttcaatttaatatgtgagcttccagaaacagttgcaaggacattggttccgaggatgcgagttgtgaaaggaagtggaaaggcgataaactacttgacaccaccaaggatcttgcttgccttggttactgcatgggttcgccgaggccgatggtttgatgaagagggaagagcagtatatgcagcagaggctgatagaatccgtaattgggctgaaagtcgagcacgcttctctttcacagatgccatggagatgtacacagaaaacacatgggtttctgtgttctcgctctctgtcgtctgcgcattcataattctttccagctcagttgcacggttgcaccgtatgttgcaaccaccaatagaactgaaatttgttgcacctgcagccttgcagagtgatgattcttcttga

SEQ ID NO: 4029 - DNA, 3624 bp, Oryza sativa
atggccggggggaggaggagcaggacaagcaggaggctcaagctgaagctcagcgcattgtacaccttcgcgctatgcagcaagggatccggcgaggaccattcttcgcggattgggacgacagggttctccagggttgtttatgtcaatgagcccgacaggcatgaagaggaggggttcaggtatcagccgaatgaggtgtcgacgacaaagtacagtttggtgactttcattccaaagtccctctttgagcagttcaggagggtggccaacttctacttcctggtctccggtatcctcgcgttgacccctctcgcgccctacaccgctgtcagcgcactcctcccgctgtgcgttgtgattgcggcgacaatggcaaaagaaggcattgaggattggaggaggaaacatcaggatcatgaactcaataatcggacagtaaaggtgcatagaggcgacggcgattttgaagagaaaaaatggaaggatatcaaagttggtgatgtaataaaggtggagaaggataatttctttcctgcagatttggttctgctttcatctaactatccagatggaatctgttatgtagagactatgaaccttgatggtgaaacgaatttgaaaattaagcaagctcttgatgtgacattgcatttggaagaggataatagttttgtaaatctcaggcagacaatcaaatgtgaagatccaaacgcgaatctctattcttttattggtactatggaatggaaggacaagcagtacaatctgtcaccgcagcagcttcttcttcgagactcaaaactaaggaacactgactacatatatggtgctgtgatcttcgcaggccatgatacaaaagtaatgcaaaatgcaactgatccaccatctaaaagaagcaaaattgagaagagaatggataaaatcatttatgtgctaatgtcttcactactcgtaattgcattacttggttcagtgttgtttggtatctggacaaaagaagatttaatgaatggcgagatgaaacgatggtatcttaggccagatgattctactatcttctatgatccaaagcgagcagctctagcttctttctttcatttgttgacagccttgatgttgtatagctacttcatcccaatctcgttgtacatatctattgagatggtcaagatactgcaggctctattcatcaaccaggacattgaaatgtatcatgaagaatcagataagccaactcatgctcgtacttcgaatctaaatgaggaacttggtcaagttgatacggttctttctgacaagactgggacattgacatgtaacatgatggagttcattaagtgctcgattgctggcattgcctatggtcagggtgtcacagaagttgagaaagctatggctctgaggaaagggtccgttttaggtgatgggatagaaaatatagagcacacagaccaaaaaaatgatggaagccctcacattaaaggatttaatttcaaggatccacgtatcatggatggaaactggattcatgagcctaacagtgatatgataagagattttttccgtctgcttgccatctgtcacacatgtatacctgaagaggatgaagaaacccataaggtttcatatgaagctgagtcccctgatgaagctgcatttgttattgcggcaagagagttggggtttgagttttatcatagggcacagtcaagtatagttgttcatgaacgggatccgatcacgaatattgtaaaagatagaaagtatgagctcctgaatgtcttggaattcagtagttcacggaaacggatgtctgtgatagttaaggaaccagagggaaggatattactttttagcaagggagctgatagtgttatgttcaaaaggctcgcaccaactggaagaaaatttgaggaagagactaaaaggcacataaatgagtattctgactcaggtctaagaaccttggttcttgcgtaccgtttcttggatgagaatgagtacatgaaatttagtgagaaattcaacactgccagaacatctgtaagtgctgacagagatgaaaaagttgaggcggctgctgagagcatcgagcgagacttgcttcttcttggtgccaccgctgttgaggacaagctccagaaaggggtgcccgaatgcatagacaagcttgcacaagctggaattaaaatatgggtcctcacaggtgacaaaatggagacggctatcaatattggctttgcatgtagcctacttagacaaggaatgacacagataattgttaccctggaagcacctgacattattgcattggagaaaaatggagacaaggaatcaattgcaagggaatcaaagcaaagggtaatggatcaaatagaggatggaatcaaacagattccacccccaagtcaatcaaatactgaatcctttgcactgatcattgatggtaaatctttaacatatgccttggaagatgatgtcaagtttaagttcttggatcttgctttgaaatgtgcttcagttatatgttgtcgatcttcacctaaacagaaggcactggttacaagacttgttaaacatacaaatagagtgaccttagcaattggtgatggggcaaatgatgttggcatgcttcaggaagctgatataggggttggcattagtggtgttgaggggatgcaggctgtcatggcaagtgattttgcaattgctcagttccgtttcctggaaaggttactgcttattcatgggcattggtgttaccgtcgcatttcagtgatgatatgctatttcttctacaagaatgtaacttttggagtcactatctttctctatgaagcatttgcgtctttctcagggaaaccagcttataatgattggtttttgtcactatacaatgttattttcacttctctcccagtcattgcattgggggtatttgaccaagatgtgtctcaaaggctgtgtctgcagtatccagggctctaccaagaaggtgtgcagaatatattgtttagttggcgccggatacttggctggatggctaatggcgtaatcaatgccatcctaatcttttacttctgcactactgccttcggtatccaggcattccgtcaggatggccaagttgcaggcttggatgctctaggagtcctcatgtacacttgtgtggtatgggtagtgaactgccaaatggcgctctctgtgaactacttcacaataatccagcacatattcatatggggaagcattgccgtatggtacctcttcctcttggcttatggtgctgtggacccgaggttttcgaaatcagcttacatggttttcattgaacaagtggctccagcactttcatattggttggtcacactttttgctgtgatggcaacactcatcccttacttctgctatgccgcaatccagatcagattcttccctatgttccacaacaagattcagtggaaaagacacttagggaaggctgaagacccggaagtggcgagacaattgtcgtcacgacaccggacatcgtcacaccagaggatggttgggatctctgctcgccgtgatggcaaggctatgcaagtaacgaaggaaaccgaattacaagttcagggataa

SEQ ID NO: 4030 - DNA, 1425 bp, Oryza sativa
atgggtctctgccatggcaagtcggcggcggtgctggagccaacgccgaacgaggcgtccatcccggagtccggcgagcccggcgtggcgctggacaagggcttcggcttctccaggcacttcgccgccaagtacgagctcggccgcgaggttggccgcggccacttcggctacacctgcgccgccacctgcaagaagggcgagctcaagggcgacgacgtcgccgtcaaggtcatccccaaggccaagatgactactgctattgccattgaagatgtcaggagagaagtcagaatattgagttctttggcagggcacagcaacttagtgcagttttatgatgcttatgaggatgaagaaaatgtatatatagttatggagttatgcaaaggaggtgaactgctggacaggattttggctagaggtggaaaatattctgaggaagatgcaaaggttgttatgcgccaaatcctaagtgttgcttcattttgtcatcttcagggtgttgttcatcgggatctgaaaccagagaatttccttttctcgtcaaaggatgagaactctgccatgaaggtcatagacttcggtttgtctgactttgtaaagccagatgagaggcttaatgacattgtcggaagtgcatattatgttgctcctgaagtgctccatcgatcttatggcactgaggcagatatgtggagcattggagtaatagtgtatattttgctttgtggcagccgtcctttctgggcacgtactgagtcaggaatattccgagctgtgctgaaagcagaccctagttttgaggaagccccatggccaaccctctctgctgaagcaaaagactttgtaaggaggctgctcaataaagattaccgcaagaggatgactgctgcacaagccctctgtcatccatggattcgtggtactgaagaagtgaagcttcctttggacatgataatttataggcttatgagggcttacataagttcatcttctttacggagagctgcattgagggcccttgccaagacattgacaacagatcaaatctattacctaagagaacagtttgaattgataggcccaaacaagagcgatcttattactttgcaaaatttgaagacggccttgatgaagaactccacaaatgcaatgaaggattctagggtggttgactttgttaacacaatatccaatattcagtacagaaagttggattttgaggagttttctgctgctgccatcagtgtttaccagatggaaggtttggaaacctgggaacaacatgcccggcaagcgtacgagttctttgataaggagggtaaccgaccaattgtgatcgacgagctcgcatcggtttgtttagaggtgaatgtacagatgagtttaggaaacaggaaaaatgaggtgctaagaaagtga

SEQ ID NO: 4031 - DNA, 3825 bp, Oryza sativa
atggcgggcggcggggggctcaaccggtcgtcgtcgagggggcagctgccgccgcaggagcttctcgacgatctctgcagccgcttcgtgctcaacgtgcccaaggaggatttggagtcgttcgagcggatcctgttcttgctggagcaggcgcactggttctacgaggacaactccgtcgagcacaacccctccctcaagtcgctctccttcaaggacttcactacgctcatgttcaatagctgtgctgcgctcaggccataccgcgcgcaccttgatgacatttacaaggatttcactcactataagttccgtgtccctgtctgcggcgccatcatcctcgatgacacctacgagaagtgcttgcttgtgaagggatggaagtctagcgccagctggagttttcctcgtggaaagaggagtaaagatgaagaagatcatacatgtgctgttagagaagttctagaggaaactgggtgtgatgtttcgaagcttttaaaattggaagattatattgaagtttcaatgtggcagcaaagagtccgcctttatattataactggtgttaagggggatactgtttttgcgcctcaaactaagaaggagatcagtgagatctcatggcacaacatcgatgaactccttcctgctggtgatgacgcaatatctcgtggagtgaatgggatgaagctctatatggtcgcaccatttttgcagggtctaaaagcctggatagccacacatcgtcacccacagtatcagaaatcagacacgtctgctagaggtactgtgtggaaagcgaagaattcctcaactggagcggcgcctgttgagaaccccgttattactagaacaggatctgacccacaaactcttgacagccgcccagttgtatctgtaatcctgaatgcaacagatgcttctaccattgtgataatatccctacatttcgtgcacatgaatgttttttcttctgtccattcagatttgtgtttgaaatgttgctcaaaatggaaagcttctggaatctggagccgagccgatgccatggcggcgctcgtgcggcccgccgtgctgcccgtctgcgccatgacgggcggcggcggtaacgacaagcggtcgccgccgcagcagcggtcgtggtggggcgggaacaagcagagattgccgcaccagccgcggcggcagccgggcgggaatggtggccgaggaggaggaggaggggcgctggaccaggtgctcggagtgctccgccgcgacggcgagttcctccaggcggcagccggcgcccccctccgcgacatcttctggctccgcttcctcgagaagaagaagcagcagcggcggcggaagcaaccaaaacctaaacccaaacctccggagcagcagcagcagcaagaggaagcggcggcggctatccaagccccatccttcccacctccctcctaccagccaggattatcatgcctggatcttatgactgctgatttcgaagccctgaagctgtatatcggctactcgaagcatgcaatcgagcagcaatttctcaaaggcaagcggcaacctcagcatcagcaaactcctaaaccaaaactccagcaacagcagcagcagcagaagaagaagcagcagcaacaagagcagcagaatcagacacttcaacctccggccttccctcccccatcgtaccctccagggctgtcttgtatggagctgatgatggctgatatcgaagctctcaagttgtacatcaactactatgtagccattctcaccactcctctaccccagcattacgatccggagatactgtcccgttacttcacctcgcgtcctcatattctcgcatttcgcaccattcagataatcttcgcatttgtctcggctgcagtaaagatgcaaatttctaaaagaacaaacttgatcacagatgccacctacagctgtaatagcaccggaagcaaaggtttcaatgcttcacaatacatggttggccagcttctcaaagagacatttctagatcttgggcctacttttgttaaagttggacagtccctctcaacaaggcctgatatcacaggctcggagatttctgaggttagttacatttctgatgagcctgttgctgcagcttcctttggacaggtttatcagggacgtacagttgatggtgctcttgtggccataaaggttcaacggcctaaccttcttccttcagtattgagggacatttatattctacggcttgggctttcttttgtgaggaaggtagcaaagaggaaaagcaacattgccctctatgctgatgagttgggtaaaggtttggttggcgagttggactacaatattgaagctgctaatgctaccaaattcctggaatatcattccagatattcatttatgctggttccaaaggttctcaagcaacttacgaggagaagagttttgacaatggagtgggtatctggtgaaaatcccacagatttgctttccttatctaaaggaatttcatcagaaattgctgaatcgtcagagaagcagaagatcgaagcaacagcccgtcttcttgacctggtcaacaaaggtgtcgaagcatcattagtgcagctcctcgagactggtttgttgcatgctgatcctcatcctgggaatttgcgttatacacctgaaggtcgtgtcgggtttcttgattttggtttgctttgtatgatggagaagaaacatcagcatgctatgcttgcaagtatcgttcacatagtaaatggagattgggcttctcttgtttatgatttgactgcaatggatgttgttccaccaagaactaatctacgccgagtgacaatggacttggaggatgcgttgggtgaggtgacctttgaagatggaattccagatatcaagtttagcagggtgcttggaaaaatatggtctgtggcatttaaataccacttccgtatgccgccgtactacacgctcgtcctgaggtcacttgcctctttggaagggctggccattgcagcagatggaacttttaaaacatttcaagcagcatatccatatgttgtgcggaagcttctatcggataattcagttgcaacaaggagactcttgcatcaggctattttcaacaaaaggaaagagtttcagtggaacaagattacagtatttctaaaattagcatcagcaaggtataatactggcgttttgcctgagaggaagggtttggatgttgcaaaacttgtagagatcagtgatgcatcttcttcactccatcttaaccgtgctacaccagaaagagcactacatactgcaaatctgtgcttgcggcttttactatcgaaggagagcattgtgataaggagacttgtaatgacagcgaacgcgaagtcacttgctcgtgacctgatctccaaagatgcatcgatttaccgggtgctcttaagtcgggtacttgccgatgtcatcttccagtggatggtgaaggcaactggttttaaacgagccggacagctcgagcctcacccacgcgtgacagcaggaaagaacgatgaagacctggggctgtccaaagaagcaccagccttggtgacattccagacagcagtaagagatcgcaggctgaaggtgatattctccaagttcgtcagggacataagagaggaccccatcctgatggtcagagtgagctggaacatgtttgctatctcggtggtctccgctgcaattggcgttcaccgtttcatcgtcgtcttgtcggaggaatttctgtctacattaccaccgcctgtgcctccgccgcggctagttcagattcagagcatatga

SEQ ID NO: 4032 - DNA, 1017 bp, Oryza sativa
atgagggcggtggtgatcgcgcgcgccggcgggccggaggtgctggaggagcgggacgtcggggagggcctcccgccgccgggggaaggcgaggtgctcgtcggggtgtccgccgccggcgtcaaccgcgccgacaccgtccagcgccagggccggtaccccgcgccgcccggcgcgtccccttacccgggcctcgagtgctccggcaccatcctggccctcggccctaacgtcccctcccgctgggccgtcggtgaccaggtgtgcgcgctgctcagcagcggcgggtatgcggagaaggtggtggtgccggcggggcagctgctcccggtgccggagggggtgtctctgacggacgccgccggcttgcccgaggtggcctgcaccgtctggtcgaccgtcttcgtgaccagccacctytcccccagcgaatcgttcctcatccatggtggatcgagtggaattggtacatttgctatacagattgcaaagcaccttggaattaaggtttttgttactgcaggtagtgaggaaaaactagctgcctgcaaaggtttgggtgccgatgtatgcataaactacaaaactgaagatttcgttgcacgtgtcaaagaagaaacaaatggaaaggtgactcttgacatggaagtatatttaccaggtgttgatgtcattctggacaacatcggtggattgtatcttcagcgtaacctgaacagcttagctgttgatggtagacttttcatcattggtttccaaggaggcgctgtaactgaagtgaacctgcaacccatgcttgctcgacgattgaccatacaagctgctggactacgcaacagaagccttgataataaagctctgattgtcagtgaggtggagaaaaatgtatggcctgccgttgtgcaaggcaaggtgaaaccagtaatatacaagacgtttcctctgtcagaagctgctgaagctcacaagttgatggaagaaagttcccacattggcaagatactattgattccatga

SEQ ID NO: 4033 - DNA, 1413 bp, Oryza sativa
atggccstggcggcggcgacgcgcattgcggtggtggtggtggtcttggcgctggcggttctcgcgccggccgcgcgcgggctccgccgagacgacttcccgccggggttcctcttcggcgccgcgacgtccgcttaccagattgagggcgcatacttggacgacaacaaggggctcaacaattgggatgtcttcacccacacgcaggctggacgaatctcagatggacgcaatggggacgtagcggacgaccactaccatcggtacacggaagatgtggatatcctgcataacttgggtgtcaattcctacagattctcgatttcgtgggcgagaattctaccaagaggccggcttggaggagttaattcagcaggaattgccttctacaaccgtctgatcaacgcactccttcagaaaggcatacaaccattcgtgactctgaatcatttcgacattccgcacgaactggagacccgggaggagtttgagtactactcggacgtctgcttcaatgcgttcggcgatcgggtcaggttctggacgacgttcaacgagccgaacctgtccaccaggcaccagtacattctgggagagttccctccgaaccactgctccccgccgttcggcaactgcagcagtggcgactcgcgccgggagccgtacgccgcggcgcacaacatcctgctctcccacgccgccgccgtccacaactacaagacgaattatcagccttgcaggtttttggatccaatattctttggtgattaccctagagaaatgagagagatcttatcatcaaatttgccaaagtttaccccagaagagaaaaaactactgcagaataacaaggttgatttcattgggataaatcattacacagcaatttacgcaaaggattgcatctattctccgtgcacgcttgacacttacgaggggaatgctctcgtatacgccattggtagaagaaacggcaaaataattggcaaacccactgcacttcatgggtactttgtcgtcccagaagccatggaaaaggttgtcatgtacgtcaatgatagatatagaaacacaactatctacattactgagaacggctactcacaacacagcgataccagcatggaagacttgatcaacgacgtcgaaagagtcaactacatgcatgattacctcaagtatctctcttcagcaatcaggaagggagcaaacgtagggggctacttcgcgtggtcaatcgtggacaattttgagtgggtttatggttacaccgtcaagtttgggttgtaccaagtggatttcgacacgcaggaaaggattccaaggatgtctgccaagtggtatagagatttcctcacgagctccagtcttacagacggtctccaagtgcggtcacgtagagcagattcgtga

SEQ ID NO: 4034 - DNA, 2780 bp, Oryza sativa
atgtccttccttccgaagggcaaaactacacaaacagcgtttaagtggccatggagaggtgaatcgcagctatcggcgcatcttctcattgatattccacctgaaatcgaattgtcggactaccgaagattgccaagccctggtaatgagagcccatcagggctacttcatggagaagactttaaggaggaggtgatccctgacttggatattttctttgagaggctctatgagtatttctgcgcgaaaggtctgcggtgcatcatcaccaagtggataattgagatcctcaatgtgacgtttatggtttgctgtatcgggtttttcttcttgtttgttgattggcctgcccttggcgatttgaaatgtggaktggaagcgctcgagtcaggggcaaaaccttgtgacctaatgaaactcattaagtatcgtcccctagatcctttcacatttacaaagtttatcactattggatccatggttawactctcaacttacggaatcattaactttgtgaagtttttkgtaaaactgagaagcacactcaaggtccgtgacttctactgtaacagtctcaaggttacagatctcgaaattcagactatatcatggcctagagtagttgagaaggtcgtacttctgcagaagtcacaacgactttgtgtcgttaaagatctcacggagcatgatataatcatgcgaataatgcgtaaacaaaactacctgattgggatggttaataaaggtatcatcgcattgccaatcccctcttggcttcctggagttggcccaactgtcagctcacgtatgcatggaaaaaaaagctatctgatgcttccaaaggccctggagtggacattgaattggtgcatcttccaaaccatgtttgataggaaattttgtgttagaaaagacattctgacaagtccgtctttattgaagaaacggcttgtatttatgggtattgccatgtttcttctgtcaccttgtcttgttatcttcccattggtatacctatttctgagatatgcagaagaattctacaatcaccccagtacggcatcatctcgaaaatggtcgaatctttcaaagtggattttgagggaatacaatgaggttgaccatttcttcaaacataggttgaacaacagtagtgtcaactcactaaattatttgaagcagtttccaactccactagtatctattattgcaaaattcatatcgtttgtatctggtggattggctggaattcttctcatccttggatttctaggtgaatccatccttgagggtcatgtatttggccgaaatcttctctggtatactattgtttttggaacaatagcaactgttagtcggaatgttgtggttgatgaactccaagtgattgatccagaaggagctatgtcctttgttctgcagcagacacactacatgcctaaaaggtggcgcggtaaagagggcagtgaacttgtacgaagggactttgaatctctgtttcagtataccataacgatgctactagaagagatggcctcaattttcatcactccatatctgctaatatttgtggttccaaagcgtgttgatgatattctacgcttcatatcagacttcacagtttatgttgatggagtgggagatgtgtgcagcttaagcatgttcgacttaagaagacatggaaatagaaactacggttcaccacataatgcagttaaaagcatgagaagctcccaaggaaaaatggagaaatcactattaagtttccaaagcacctacacatcatgggagccaaacgcagatggcaagaaatttatttgcaacctccagaaattcaaggagaaacaaatccgtcaacatacctttcaaacaacggaatcatcacagcttgggttgagttgtagaggtcaaactgcagttttccatcgactgctccctagaaacatctatcctggcaatggggtcatttttaactttgatccattaggactgctcgacacagatcaaagagcttgtccatatatcctggattggtattacacacaccaacacacaaatagagaagcgggctcatcttcccaccttaatgaagcatcacctgagcaacaggaggagatatggccacctctgagcaaaccattaacagaaattgaagatgagcaaatctgggattctgatttatatagaagagctcgaagctacctggaggcatcaacatcaagtgcattctttcgacaggccaccaccttcaagcgccatggcagggaacaaaattctaccagccatcaatggtgggctcaggcctcgaggcagcaggctgatccacgaaacagttttcaagggcctcctcaagacagttttcttgagcctccggacttccgaaatcatttggaagctagccatgattccagccatcaaagtgattgtaggctgacctccagaaggtcaactgatccacaagacagcttcgttgagcctcctgattttggtgattacatgtcctgtcatagctctagctatcatggcgatgaaacgtcggatggaaactcagaactagatcaaagcaacaatagttggcgaagcccccatgccctgtcaaagacaaggtacatgggtgatgatgatcttgacctagaacaaggcccgagtttccattttactgatgcccctcagaaggacagtggaagtgaaggagatggacatggtgtagccaatatttacagctctacgccagccagccttcctgtacggataatacctagaagcagtgacccagttta

SEQ ID NO: 4035 - DNA, 804 bp, Oryza sativa
atggggatggcgcgggcgcgggcgcggcggttgctgccgctgctcaccttcgtcacgctcggcatgatcctaggctctttacttcagttagcgtttttccgccggatagatgatcactcaaatgtaacacatttggagaatgatcaagaagcagcttttctccgtctaggattggtgaagcctgaagtcatcagctggtcacctcggataattgtcttccataactttcttagttctgaggagtgtgattatctaagatcaattgctagaccaagactacagatttccactgtagtggatgtcgcaacaggaaagggtgttaaaagtaatgtccgtacaagttctggtatgtttgtgagttctgaagaaagaaagttaccagtcattcagtctatagagaagaggatttctgtgtactctcagatacctgaagaaaatggagaactcatccaagtattacggtatgaaccaagccaatattacaggccacatcatgattacttttctgacactttcaacatcaaacgtgggggccagcgagttgcaacaatgttgatgtatttgactgatggtgttgaagggggtgaaacccattttcctcaggcaggagatggtgaatgtagctgtggcgggaagatggtcaaaggattatgtgtcaagccaaacaaaggagatgctgtgctattttggagcatgggactcgatggtgaaacagactcaaacagcattcatggtgggtgccctgttctggaaggggagaaatggtcagctacgaaatggatgaggcaaaaagaatttgtttga

SEQ ID NO: 4036 - DNA, 2390 bp, Oryza sativa
atggcgtcgtcggcgtcccgcactctcctgctgctggtggtggtggtggttgtggccgctgccgttggaggagtgttgggtgggggaggggaggagaggacgttcatcgtgcgggtggatgcggacgcgaagccctcggcgttcccgacgcacgcgcactggtacgaggcggcggtgatggcagcggagggtggtggtggtggaggggagtggcgggaagggggcccgctgatccacacctactccgccgccttccacggcttctccgcgcggatgtcgccggctgcggcggcggcgctggcggaggctcccggggtggcggcggtggtgccggagcgggtccggcagctcgccaccacccgctcgccgcggttccttgggctgctgtcgtccccgccgtcggcgctcctcgcggactcggattttggttccgacctcgtcatcgccatcatcgacaccggcatctcccccacccaccgcagcttccacgaccgtgggcttggtccggtgccgtccaagtggcgcggggtgtgctcgtcggggcctgggttcccgcccaactcctgcaatcgcaagctcgtcggcgcgcggttcttctccgccgggtatgaggccacctccggccgcatgaacgagacggcggaggtcaggtcgccgctcgacaccgatgggcacgggacccacacggcctccatcgccgccggccgctacgtgttcccggcgtccaccctcggctacgcccggggcgtggctgccgggatggcgcccaaggcacgcctcgccgcgtacaaggtgtgctgggtgggcggctgcttcgactccgacatccttgcggctttcgatgccgccgtcgccgacggcgtcgatgtcgtgtccctcagcgtcggtggcgtcgtcgtgccgtactaccttgacgccattgccattggggcattcggggcgacggaggctgggattgttgtttcggcttcggccggcaatggcggccctggtgggctcactgtgaccaatgtggctccctggatggccaccgttggcgctgggtccatggaccgcgccttcccggccaacgtgcagctcggcaatggtcaagtgctcgacggtgtcagcgtgtacggcgggccagcgctccaatccggcaagatgtatgagcttgtatatgctggagcaagcagcggcgctgcctcgtctgcggctgacggctactcggcgtccatgtgcctcgacggctcgctcgaccccgccgcggtgcggggcaagatcgtggtgtgcgaccgcggcgtgaactcgcgcgccgccaagggcgacgtggttcaccgcgcgggcggcatcgggatggtgctcgccaacggggtgttcgacggggagggcctcgtcgccgactgccacgttctgccagccacagccgtcggcgcggccgctggcgacaagctccgtaagtacattgggtcgtcgacgcggcaggcgccggccaccggcaccatcttgttcgaaggcacccacctcggcgtgcatccggcgcctgtggtggccgcgttctccgcgcgtggccccaatccccaatccccggaaatactcaagccagacctgattgcccccggcctaaacatcctcgccgcatggcccagcggcgtcgggccggccggcatcccctccgacggccgccgcacggaattcaacatcctctcgggcacgtccatggcttgcccgcacatctccggcctcgccgcattgctcaaggcggcgcatcctacctggagccccgcggcgatcaagtcagcgctcatgaccaccgcctacatcaaggacaacagcaacggcaccatggtggacgagtccacgggcgtcgtggccgacgtgttcgacttcggcgcagggcacgttgacccgatgcgcgccatggaccctggtctcgtctacgacatcacccccgtggactacgtcaacttcctctgcaacctgaactacaccgagcagaacatccgggcgatcacgcggcgccccgcggactgccgcggcgcgcggcgcgcggggcacgccgggaacctcaactacccgtccatgtccgccacgttcgccgcggacggcaccagggcgacgatgaagacccacttcatccggacggtgaccaacgtcggcggcgggcgcgcggtgtaccgcgcgacggtgaggtcgcccgaggggtgcgcggtgaccgtgcagccgcggcagctggcgttccggcgcgacgggcagaagctgagcttcacggtgcggktggaggccgcggcgccagccaagaagatggagcccgggagctcgcaggtgaggagcggcgcggtracgtggagcgacgggaggcacgccgtgaacaccccggtcgtcgtgacagtgcaagcgccgctgcagta

SEQ ID NO: 4037 - DNA, 1032 bp, Oryza sativa
atggacggggagatgttcgggagtggccactggggtggttccttcccctacgcctccattcccaaggagagccagttcgtgtttgatgccaaggcctcgccgctgcagctgcagctcttcgggagcgccgcagttcctgcggtaggaagtactggttattataactacattgcaaacaaccacctctctgctatgaatcaagaaagaaatacaaacaacgatgttggtcatgaaaagcaactcaatcttcagatgtccctgaactactttcctgttgaaaatcttgatcggttagcacgtattggtaatccaagtgctgtatcaactgggctaagactgtcctatgagaacaatgagcacacttcaatcacatctggcagtggtaacatgtcatcattgcctatcatggcatcctttgttgatgaagtgatggctgaattagacaaagaaaacmaagagttcaactgttatttcggacttcaggtggaacaattggttaagtgcatgaaagatgtaaagcagaggcagatggttgaatttcttgcatcccttgaacgaggagtaggaaagaagctgaaggagaaagaactcgaggtggaggccatgaacaggaagagcaaggaactgaacgaacagatcaggcaggttgcattggaagtccagtcatggcagtcggtagcactgcacaaccagtctgtcgctaacagcatgaaaagcaagctcatgcagatggtagcccatagcagcaatctcaccagggaaggctctggcgacagcgaagtggacaacacagcttccagtcagaatgtcaatgctgtgcctggggttttcttccagtcaggcctcctcggcatcaacagcatggctgatggtgggctgggagcatgcaggttgtgcagaatgaaggaggcagcggtgctggtgatgccgtgtcgacacctctgcttgtgtgctgattgcgagaaaaatgctgacgtgtgccctgtctgccgcttccccaagagttgcagcgttgagatcaacatgtcatag

SEQ ID NO: 4038 - DNA, 783 bp, Oryza sativa
atggacgccggtgatgcgtggggccgctcctcctcctcatcctcctccgccgccgccgccgccaggcgcctgcaggcgcgctacgatctgtacatggggttcgacgacgcggacgcggcgggcgtggaggaggtggaggcgcgcggcggcggggaggcgtacaactgccccttctgcggcgaggacttcgacttcgtcgccttctgctgccacgtcgacgacgagcacgccgtcgaggccaagagcggggtggtgaagctcattgaaattgcaggaattttcatgttttattgctttcgtaggatcgtttacattatatttggatttaatacctgtataattagtgttgatattggcatctttgtggtactatgtaaatattgggtagctgccaagctggatagtttctgggtatgtcccatctgtgctacaagggttggagtggacttgataggtcacttgacaatgcagcatggaagttactttaagatatccttttttcttctctataatgctggcaatgaacatatgcaattttacatttttacatcatattcagttgaagatacatggcattattgtttgcctgtggctgaaccatccaaagatttacattccgactcatctgacaataactttttgctaaataaattcccagatgacaagactgcagagagagctgaaccatctctgtcggagaaggatcagaaggagagggctcaaaggagtaaatttgtccgtgggcttgtgctctcgacgatatttgaggatgataacttgtaa

SEQ ID NO: 4039 - DNA, 1074 bp, Oryza sativa
atggctttggcccccgcgagctcgggcagtgggccggtggttacggaggtggagatgaacgccggcgccgaccagggtgccaccggcaccgtgcgtgccaccgtcgtgcaggcctgcaccgtgttctacgacacccctgcgactctcgataaagcagagaaactggtagctgaagcagctggatatggttcacagatagttctatttccagaagtctttgttggtggttaccctcatggatctacctttggactgactattggcaatcgatctgccaagggaaaggaagacttccataaatatcatgcagctgctatagatgtgcctggtccagaggtgacccgcttagctgcattggctggaaaatacaagattttcttggtgatgggggtggttgaaagggtagggtacacactatataatacagtgctcttctttgatcctctggggaaatacctcgggaaacaccgcaaggtcatgcctactggactggaacgagtgttttgggggtttggggatggatctactatacctgtttatgatactccaatagggaagattggtgccgtcatttgctgggaaaacagaatgccacttctcaggacagcaatgtacgctaaaggtgttcagatatactgtgctccaactgctgatttctcgcctagttggcaggcctccatgacgcatattgccgttgaagggggatgctttgtactttctgcaaaccagttttgtcgcagaaagaactatccaccagcgcctgaatatacttttggtggccttgatgaagagccatccccagaatctgttatttggcctggaggaagttccatcgtctcaccatctggaacagttctggcaggtccaaactatgaaggcgagggcctcctcacagctgacttggaccttggagaaattgctcgagctaagtttgatttcgacgtcgtgggacactatgcacgacccgaggtgctgagcctgaccgtgaaaaccgaatcaaagctgcccgtttcttttacttctgctgcagagaaaaattctgctgcaaagagtgacggtatctctaggacctga

SEQ ID NO: 4040 - DNA, 3579 bp, Oryza sativa
atggctttcatagtttgggcactactactcttccttttacatcttcccacaatagcgaccggatccagtgcccactttggcggtaacaacactgttaggtgccatccaaaccaggctgcagcgctcctccagctaaagcaatctttcttctgggttaattctccggtcatccttccgacatggcaagatggaaccgattgttgtacctgggagggagttggctgcgatgcttcttctcatcttgtcacggtacttgatctcagtgggcggggcatgtacagtgatagttttgaacctgcactcttcagtctcacatccctacaacgcctagaccttagcatgaattccttgggtaccagcagtaccaccaaagatgctgaattcgataggctcacttcgctcacccacctcaacctctccaattcgggcttggatggtcagatacctatgggcatcaacaaactcattaaccttgtgtccttggacctttccaagcgctatgttaacgataacagtgatatctcttttaatgagagtgatgatgagattatctttacaggtgacagttataatcatctgcaggaatccaggttaatgtccctagtagaaaacctaagcaatttgaaagagctctacctcgaccatgtggatatgtctacaaatgtagatgactggtgcaaaacccttgctcaatcagttcctcgtcttcaggtacttagtttagatggttgctctctcaacactcctattcatcactcccttttgaggctccattctctcacagtgataaatcttcagtccaaccctggtatagctgtcaatctatttccagatttcttcatgggtttcgccaatttaactgtgctccgactttctcataataatctcgaagggtggtttcctgacaaattcttccaactgaaaaatctaagaatcctcgatttgtcctttaatatgaatctgttagggcatttgccaaaagttccaacctctttggagacattgagactagaggggaccaacttttcctatgctaaacgaatttcttctagcaatttcaatatgctgaaggagttgggtcttgaagggaaattaatttctaaggattttctcacgtcgtttggtttgatctggtctttatgccatctagaactccttaattcggaattgttaggagattcaggatccaatttgttgtcatggataggggcccacaagaacttgacatgcttgatactatctgagtttgacttctctagcacaaagccttcatccattagtaacttcaagaatttgagaagcttgtggttgtttggctgtaacctcactaggccaataatgtctgcaattggtgatctcgtggacttgcaaagcttggatatgtcaaactgcaatacatacagttcaatgccatcttcaataggcaatctcacaaatttaaaaagcttgtatatcaacagccctgggtttttagggccaatgccggctgcaattggcaacctcaaaagcttgaagagcatggtattctcaaattgtgaatttactgggccaatgccatccacaattggcaatctcactaagttgcagaccttggaaattgcagcttgtcggttttctggaccaataccttattcaattggacaacttaaggaattgagggcgttatttattgaagggtgcaatatgtctggtagaataccaaattcaattgtcaacatgagcaaactgatatatttggggcttccagcaaattatctgagcggcaaaattccagcacggcttttcactcttccagcactactcttcttggatctttttggtaatcatttttctggtcctatacaagagtttgatgctgtgccttcatatctgatgagtttgcagttgaccagcaacgaattgacaggagagtttcccaagtcattctttgaactcactagtttaattgctctagaaatcgacttgaacaacttggcaggctctgtggatctttcatcttttaaaaggttaaaaaagctccgtgatttgaatctttcacacaataacttgtctgtcattatggatgacgaaggcgataactcttcatctacgtatctctctgaacttaaagagctaggacttgcatgttgcaatataactaaatttccaagtattttgactcgtctgagtgacatgtcttatttggacctttcttgcaataaaatcagtgggaacataccaaagtggatatgggagaaatggagcagtagcgtcgtgcatttaaatctctcccacaacatgctcaccagtatggaagttgcttcatatcttctcccttttaataggcactttgaaactttggatcttagttccaatatgcttcaaggacagattcctataccaaacttatcagctgaattcttggattattcacataatgcattctcttctattctgccaaacttcactttatatcttagtaaaacctggtatctcagcatgtccaagaataatataagtggaaatataccacattctatttgcaattcaagcctgctggtacttaacctggcgcataacaactttagtgggccatttccgtcctgcctaatggaacaaacgtacttcagaaacatattaaatttgaggggaaatcactttgaagggatgttacctaccaatgttacaagatgtgctttccagacaatagatttaaatgggaataagattgaaggtcggcttccaagggcactaggtaactgcacatatttggaagtccttgacttgggaaataataaaattgccgacacttttccatcttggctaggaagtctttccaatcttcgtgtccttgtcttgagatcaaaccggttgtacggttctataggttatacgtttgaggacaaatctggagatcacttcccaaacttgcaaatcattgatttggcctcaaacaacttcactggcagtttgcatccgcaatggtttgaaaagtttatatctatgaagaagtacaataatacaggagaaactatcagccatcgtcatagcatatcagatggattttaccaagatactgtcacaatctcatgcaaagggttctctatgacttttgaaaggatcttaactaccttgacagcaatcgacttatctgataatgcattggaaggaagcattcctgagtcggtcggaaaacttgtttcactacatgtgctaaacctgtcacataatgccttcagtggaagaattccaccccagattggcggcataactgctctggagtcactggacctgtcttcgaattggatttcaggggagattcctcaagagcttactaacctgacatttctaaccgtcttgaacctgagcaataaccaattggagggaaagataccagagtcacgtcaatttgcaacatttgaaaacagttcatatgaaggcaacgcaggactttgtggagacccattgcctaaatgtgccagttggagtcctccaagtgctgaaccacatgtagagagctcctctgagcatgtcgatattgtgatgtttctctttgttggcgtgggctttggagttggatttgcagtagctgtccagtga

SEQ ID NO: 4041 - DNA, 3294 bp, Oryza sativa
  misc_feature (1)...(3294): n = A,T,C or G
atggagcaagcggtcgttgccgcggcgctgtcgtccgaccccaacatgctctacgacgtcgacgacgacgccaccggcaagcagaggctgccacacagcaaggagtgccgccgccgccgctccgatcctcgtcctgccgccggtgccggcgccggagagcgatgctggctgaaagcgacttggggtgcttccaacagtgtttctgaactcagattgctgtctcccctgcacacgatatggacgagtaatgatcgtttcagaataggtattatagatcagtatatgcatgttcaattagaaaatgttgttgagctgctgcaacgttatcgccgtgaccgtcatgtattgctcaactacatgctttctggtaacttgatcaagaaagttgtaatgcctcctggtgcgatctctttggatgatgtggatatagatcaagtcagtgttgattacgtcctcaattgtgctaagaaaggtgaagcacttgaccttggagatgccatccggctttttcatgacagccttgactacccttacgtgaataacagtggaactgtggaggaattctttttacttacaaaaccagagtactctggaccagctccagcgagagaaccaccccctgtccctgctattgcaccatcacctgttgtgataccggcaccaattgtggatccaccaccagttgctgtgcactcaccagtctctaccacaaatttatcaaaatcacaatcatttgattctccaactgagaaggagttaaccatagatgacattgaagattttgaggatgaagaagatgaattcgatagccgaagggcttctagaagacatcaaagtgatgccaatgatttatcattgcggttaccactatttgaaacaggtataacagatgatgacctccgtgaaacagcatatgaaattcttgttgctgctgctggtgcttcagggggacttatagttccacagaaagaaaagaagaaagagaagagaaacaaattaatgaggaaactcggacgtagtaagagtgagagtactcaatcccaaactcagcggcaaccaggtttggttggtttgcttgaaaccatgcgagcacaacttgagataacagaatccatggatattagaactagacaaggattgctcaatgctatggtaggcaaagttggaaaacggatggacaatctcttgattccattggaactactatgctgtatctcaagagccgagttttcagacatgaaagcatatcttcgttggcagaagagacagctaaacatgctggaggagggccttataaaccatcctgttgttggatttggagagttaggtcgaaaggtcaatgagctacgaaacctcttcagaaagattgaagaatctgagtccttgcaaccatctgctgtggaggttcaacgcactgaatgcctaagatcactgagagaagttgctacttctctctctgaaagacctgcacggggtgatcttactggtgagatacactatcagttgcaggaagtggaagaaatcctggagctcctaaaatcaacttggcggatactaggcattacagagacgattcatgatacatgttatgcatgggtattatttagacagtttgtttttacaggtgagcaaggactcttgaaagttgtgattgagcatttgaggaagatacctttgaaggaacagcgtggtccacaggaaagattacacttgaaaagtttgcgtagttctgttgatgctgaggatagctttcaagacttcacatttttccaatctttcctatctcccgttcagaaatgggtggacaagaaattgaatgattatcacctacacttctcagagggccctagcatgatggctgatattgtaacagtggcaatgcttattaggagaattcttggtgaagaaaataacaagggaatggagtcgcctgatcgagatcagattgaccgttacatcacttcttctgtcaaaagtgctttcgtaaagntagaggctaaagcagacacatcacatgaacatgttttagcatctctagctgaggagacaaagaagcttctgaagaaagatacaactgtgttttcatcggttttgtcaaagtggcacccacagtctgcagttgtttctgcttcacttctccataaactttatggaagcaaattgaaaccgtttcttgagcacgcggagcatcttacggaggatgtggtttctgtatttccggcagccgatgctttggagcagtacataatgtctgtgatggcttctgttgtgggagatgatggtttggacagcatatgcagacaaaagctagctccttatcagattgaaagtaaatctggcacgttgatattacgctgggtaaatgggcagcttgagagaattgaaacttgggttaaaagagctgctgaacaagagacttgggatcctatatcccctcaacaacgccatggggcttctattgtcgaagtctacagaatcatagaagagtatggtatcagccagctaagcaagctggaggacagcataaatgagcggtgggctaggaggaaaagtgagagcattaacatcagacgatcaatgagtgaaaaatcaaagagtgctgtctcgagtcagaagaatcaatttgatggcagcagaaaagaaatcaatgctgcaattgatcggatatgtgagtttacagggctaaaggttatcttctgggacctacagcagccatttattgataatttgtacaaaaacaatgtttctcaagctcgactggatgctattatggaagtacttgatacggtgcttaatcagctttgtaatgtcattgtggagcaactacgggatcgtgtggttacagggcttctacaagcatctctggatggcctactccgtgtgatattggatggaggtcctacgcgtgtcttctctccaagtgatgccactcttttggaagaagatcttgaaattctgaaggaattttttatatctggtggagatggcctacctcgtggaactgtcgagaatttggtctcacgtgttcgccctgtaatagatctgatcaagcaagagacacgtgtgctcatcgatgacctacgagaagttactcagggcgctaaaaccaatggaatgcgtcttggccttgcgacctggaaatcgtgtccagtatccgctcccctgcttccgtttgctattgttccgcactcaaatcagctattcaaggttttgcccagcttgacccgtagtaaagtatcagccgtgtttattaagcagtatagggttagatacgatttactcgctccagattag

SEQ ID NO: 4042 - DNA, 1970 bp, Oryza sativa
atgagccacccctcgtcgtcgtcctcctccgttcccccggcggcggccgaggccacctccctcgcaccgggattccggttccacccgacggatgaggagctggtgtcctactacctgaagcggaaggtccatgggcggccgctcaaggtggacgccatcgcggaggtggacctgtacaaggtggagccatgggacctccccgcccgctcccgcctccgcagccgcgactcccagtggtacttcttcagccgcctcgaccgcaagcacgccaaccgcgcccgcaccaaccgcgccaccgccggcggctactggaagaccaccggcaaggacagggaggtccgcaacggccccaccaccgtcggcatgaagaagaccctcgtcttccacgccggccgcgcccccaagggcgagcgcaccaactgggtcatgcacgagtaccgcctcgacggccaaaccaccatcccaccacaggattcattcgtcgtgtgccgtatcttccagaaagccggcccaggtccacagaacggggctcagtacggagctccttttgttgaggagrattgggaggaggatgacgaggatgttggtttgctaccggtggaggagaaggacaactctgatgaccaggaaaaggaaatttctggtgctatggagaagggctatctccagatgagtgacctcgttcagaacttggttgatcaaaatgagaatggtaccattgccttgccagtttctgacaattcaaacaacagcaaccattctgaagacgtggatggaaattcaggggacattttaagtgaccaaaaccttgggtctaactttcttcaccatgttgagcctgtggagcaaaatggcctagtgcttaatgaaaatatgttttctagtgccaatgctggagacctttttaatatatctagccccaatgatggattcctagaactgaaggattttgcagatattgcagatttggagaatcctttagccaatgaatccaccatctggccttctgatggttggccckggaaatcaactgattccatggaggctgtgaatggggctagcaatgaattttctcccttagctggtgaacagatattccagccagaagaattggaacagttgttacagtcactgcaagaagactctcatatgggttcaactatctctgatcccccacattcatctataacaaatttagctaagccagaggaagattgtctaatgttctatgatgcaccctttgattcttcaatgtgtgatgatggttttagacagctcaatggatttcttggctccccatcgaccaatctatctggtattgacatggtggacgatggtatgccgtactatgatgcgatggatgataacttgtttaatgatcttctgagctcagtacagccatcagctggtagcagttcccatgcttttagtgggccagtccttactcaagaggtcaacaattcaacctatacatatagtccaactcaaaaggttttagaacctaattttgtagttggtgccccatcatctgctaggttacctgaagcgggtagtcagttaaattatgttgttttaccagattcccagaccaagagtagtctgatcgggaagcgttttgtaaagatactggattcaatctctgctccccctgcttttgcagcagcagagttcccagctagccttcgcaaatccttggctcctatttctggagctcatcacaacactatccgtgtctctgctgaagtaatcagcataggaagtttaactcctgattctcaagataagtggtcccttgagaaggatgaaggcatggagctgctcttctcggcaggttttgagcctgatacccgtgtacactttggctgcaacacaataaccgcagtactgcgtggtggcttctgcctcttcttcttttcagcaataatgctcttggtgagctacgaggtgggcatgtgcatctatggcaagta

SEQ ID NO: 4043 - DNA, 810 bp, Oryza sativa
atgtggtgtacgtgggcgttggggcgggtggtgttggcggtggtgttcctggttgcgttggctgccggcgatgcagcgccgcccaaggttcaccggaaccacggcaagttcacggcggggccatggaagcaggcgcacgcgacgttctacggcgggcgcgacgggtccggcacgctggacggcgcgtgcgggtacaaggacacgtccaaggaaggctacggcgtgcagacggtggcggtgagcacgccgctgttcggcgccggcgccggctgcggcgcctgctacgaggtcaagtgcgtggacagccccgacggttgcaaggtcggcgccgcccccttggtcgtcaccgccaccaacctctgcccccccaaccccggccagtccaacgacaacggcggctggtgcaacccgccgcgcgagcactttgacctctccatgccggcctttctgcagatcgcgcaggagaaggccggcatcgtgcccatatcgtacagacgggtgccgtgtgtgaaggtgggtgggatcaggtacacgataaccgggaacccgtacttcaacctggtgatggtgtcgaacgtgggcggggcgggtgacgtggcagggctatcggtgaaggggaacaagagggtgaagtggactccgctgaagcgcaactgggggcaggagtggcagacgtcggaggtcctcaccggagagtcgctgacgttcagggtgatgaccggcgaccaccgcaaggccacctcctggcacgtcctcccccccgactggcagttcggcgtcacctaccaggctaccaagaacttcaactaa

SEQ ID NO: 4044 - DNA, 1578 bp, Oryza sativa
atgagcccctcgctgctccgcgcygcgcgcarcggcaactarcgccggttcgtgaaggcgctcytggcgacccgggcgccccggaacttgaagccgttggcaaccgcgggggggaacasgttccttcacgtggccgcgtggggggggcaccccgcgyttgcgtygctcctcctccgccgsgccccgggcctccttgccgcgcggaacgcggcgcttgaaaccccgytccaccttggcgcccgcgccggggcgcacaaggtcgtcgccctcctcgtcgccgcgttctcctcctcctcctcctcctccgccgccgcggatgcctcctccccgtccttgcgcgccctyacccgcgccaccaacaggcgcggcgagacgccgctccacgacgcggtgcggggcgggcacgaggccgcggcgcgcgcgctgaccgccgcggacccggggctcgcggggctgtgtggcggcgcgggggagtcgccgatttacatggccgcggcggccggatcccttggcatggtgcgccttctcacaaagacttacaggaacgacgaggaggaggaggaggaattgcccgtattgtgttcgtgcactggcccgggcgggcgcacggtgctgcacgctgctgtgctcacgagcaacgtaatagaaatgacacagggattgttgcagtggaacccaacacttgtgaaagaagtagatgattctggaagtactcctcttcattatgttgcatctgttggaaatattcctgcgttgaagctgttattgggatatgatacatctccggcatatgtcccagattcaaatggtttatttcctgtacatattgctgctaaaatgggatatggtcaactgatctatgaactatcaagatacttcccagattgtgatgaaatgcttgacagcaaaggaaggaacttcctacatattgctgttgagcacaagaaatggaaagttgtttggcatttctgtggaacccaagaacttgaaagaatgttgaatgtcatggattatgaagggaatacagctctgcatcttgcagtcaagaatgctgaccagatgatagtgagccttctgatggcaaataaagctgtattgccaaatatagtgaacaaccaggggctcactgccttagatcttgccgtgttggcaactgacaaaggaattagttatacactgaatccacaggtcattatacttcgctgtttggcatggacgggagctgtccttagtcctcgtcgcttggatcatttcatagatgagtttaacatcgggaaagcttctggaaatgaactaaagaaattcaccaacatttcacagaacttagtagttggttctgtgctgatctccacagtcacattcgcagcagtgttcactctgcctggcggttacatatctgatggtcatccacatgccggtgcaccgattttatggcacagatataccttcaaggcatttgtgatggcaaacacccttggcatttgtgggattccacgctgtccaccatttggctcacttatgctggttcagagcatgtccacccactgctccgggcactctacatgttcttctcagtga

SEQ ID NO: 4045 - DNA, 1098 bp, Oryza sativa
atgggggtggtcagcttctcctcgacttcctccggcgcgtccacggccaccaccgagtccggcggcgccgtgcggatgtcgccggagccggtggtggcggtggcggcggcggctcaacagctaccggtggtgaagggagttgactcggcggatgaggtggtgacgtcgaggccggcggcggcggcggcgcagcagtcgtcgcggtacaagggggtggtgccgcagccgaacgggaggtggggggcgcagatctacgagcggcacgcgcgggtgtggctcgggacgttccccgacgaggaggcggcggcgcgggcctacgacgtggcggcgctccggtaccgggggcgcgacgcggccaccaacttccccggggccgcggcgtcggccgccgagctcgcgttcctcgccgcgcactccaaggccgagatcgtcgacatgctccggaagcacacctacgccgacgagctccgccaggggctccgccgcggccgcggcatgggcgcccgcgcccagcccacgccgtcgtgggcgcgcgagccgctgttcgagaaggccgtgacgcccagcgacgtcggcaagctcaaccgcctcgtggtgcccaagcagcacgccgagaagcacttcccgstccgccgcgcggcgagctccgactccgcctccgccgccgccaccggcaagggcgtgctcctcaacttcgaggacggcgaggggaaggtgtggcgattccggtactcgtactggaacagcagccagagctacgtgctgaccaaggggtggagccgattcgtgagggagaagggcctccgcgccggcgacaccatagtcttctcccgctcggcgtacggccccgacaagctgctcttcatcgactgcaagaagaacaacgcggcggcggcgaccaccacctgcgccggcgacgagaggccaaccacaagcggcgccgaaccacgcgtcgtgaggctcttcggcgtcgacatcgccggcggcgattgccggaagcgggagagggcggtggagatggggcaagaggtcttcctactgaagaggcaatgcgtggttcatcagcgtactcctgccctaggtgccctgctgttatag

SEQ ID NO: 4046 - DNA, 1287 bp, Oryza sativa
atggtgaacaaacacttcttgtccctttcggtcctcatcgtcctccttggcctctcctccaacttgacagccgggcaagtcctgtttcagggattcaactgggagtcgtggaaggagaatggcgggtggtacaacttcctgatgggcaaggtggacgacatcgccgcagccggcatcacccacgtctggctccctccgccgtctcactctgtcggcgagcaaggctacatgcctgggcggctgtacgatctggacgcgtctaagtacggcaacgaggcgcagctcaagtcgctgatcgaggcgttccatggcaagggcgtccaggtgatcgccgacatcgtcatcaaccaccgcacggcggagcacaaggacggccgcggcatctactgcctcttcgagggcgggacgcccgactcccgcctcgactggggcccgcacatgatctgccgcgacgacccctacggcgatggcaccggcaacccggacaccggcgccgacttcgccgccgcgccggacatcgaccacctcaacaagcgcgtccagcgggagctcattggctggctcgactggctcaagatggacatcggcttcgacgcgtggcgcctcgacttcgccaagggctactccgccgacatggcaaagatctacatcgacgccaccgagccgagcttcgccgtggccgagatatggacgtccatggcgaacggcggggacggcaagccgaactacgaccagaacgcgcaccggcaggagctggtcaactgggtcgatcgtgtcggcggcgccaacagcaacgccacggcgttcgacttcaccaccaagggcatcctcaacgtcgccgtggagggcgagctgtggcgcctccgcggcgaggacggcaaggcgcccggcatgatcgggtggtggccggccaaggcgacgaccttcgtcgacaaccacgacaccggctcgacgcagcacctgtggccgttcccctccgacaaggtcatgcagggctacgcatacatcctcacccaccccggcaacccatgcatcttctacgaccatttcttcgattggggtctcaaggaggagatcgagcgcctggtgtcaatcagaaaccggcaggggatccacccggcgagcgagctgcgcatcatggaagctgacagcgatctctacctcgcggagatcgatggcaaggtgatcacaaagattggaccaagatacgacgtcgaacacctcatccccgaaggcttccaggtcgtcgcgcacggtgatggctacgcaatctgggagaaaatctga

SEQ ID NO: 4047 - DNA, 879 bp, Oryza sativa
atggccgtcgcgaggctggtggtcatcacccccgccgtcctcctsggccgcaccgcccgcgtctcgccgtcggcggtgccgcggctgcggcccatcgtcgccggccgccgcgccgtggcggcgcccacacgcgccgtcctgggagacggggcgggtgtcggcggcgaggaggatgcggtggtggcggtggtggaggaggacgcggtcgcccggcgcgcggcgaggaagcggtcggagcggcgcacgtacctggtggcggcggtgatgtccagcctcgggttcacgtccatggccgccgccgccgtctactaccgcttcgcctggcaaatggaggccggcggcggcgacgttccggcgacggagatggtcggcacgttcgcgttgtcggtgggggcggcggtggggatggagttctgggcgcggtgggcgcaccgggcgctgtggcacgcgtcgctgtggcacatgcacgagtcgcaccaccgcccgcgcgacggcccgttcgagctcaacgacgtcttcgccatcgcaaacgccgccccggccatctccctcctcgcctacggcctcctcaaccgcggcctcctccccggcctctgcttcggcgcggggcttgggattacgctgttcgggatggcgtacatgttcgtccacgacggcctggtccaccggcgcttccccgtggggcccatcgagaacgtgccctacttccgccgagttgctgccgcccaccagatacatcacacggacaagttcgaaggcgtgccctacggcctgttcctcggacccaaggagttggaggaggtgggtgggactgaggagctggacaaggagatcaagaagaggatcaagaggaaggaggccatggacgccatcagatga

SEQ ID NO: 4048 - DNA, 2100 bp, Oryza sativa
atggcctcggagacggagacgttcgccttccaggcggagatcaaccagctgctgtcgctcatcatcaacacgttctactccaacaaggagatcttcctccgcgagctcatctccaactcctccgatgcgttggacaagatcaggttcgagagcttgacggacaagagcaagctggatgctcagccagagctgttcatccatattgttcctgacaaggcctccaacacactgtcgatcattgacagtggtattggtatgaccaagtcagatcttgtgaacaacctgggtaccattgccaggtcagggactaaggagtttatggaggcactggctgctggtgctgatgtgtccatgattggtcagttcggtgttggattctactctgcctaccttgttgccgagagagtagttgtgaccaccaagcacaacgatgacgagcagtatgtgtgggagtctcaggctggtgggtccttcactgtcacacgtgacacatctggggagcagcttgggaggggtactaagatcaccctctacctcaaggatgatcagttggaataccttgaagagcgccgcctcaaggacctgatcaagaagcactctgagtttatcagctaccctatctctctatggactgagaagaccactgagaaggaaatttctgatgatgaagatgaggaagagaagaaggatgctgaggagggcaaggttgaggatgttgatgaagagaaggaagaaaaggagaagaaaaagaagaagatcaaggaggtttctcatgagtggtccctggtcaacaaacagaagcctatctggatgaggaagcctgaggagatcactaaggaggagtatgctgctttctacaagtccctgacaaacgactgggaggagcatcttgctgtcaagcacttctctgtggagggtcagctggaattcaaagctgttctctttgttcccaagagggcaccattcgacctctttgatacgaggaagaagctcaacaacatcaagctctacgtccgccgagtcttcatcatggacaactgtgaggagctgatccctgagtggctgagctttgtcaagggcattgttgactccgaggatcttcccctcaacatctcccgtgagatgctgcagcagaacaagattctcaaggtcatcaggaagaaccttgtcaagaagtgcgttgagctcttcttcgagattgctgagaacaaggaagactacaacaagttctatgaagccttctccaagaacctcaagctcggtatccacgaggactccaccaacagaaacaagattgccgagctcctgaggtaccactccaccaagagcggcgatgagctgaccagcctcaaggattacgtgacgaggatgaaggaaggccagaacgacatatactacatcaccggcgagagcaagaaggccgtggagaactcccccttcttggagaagctgaagaagaagggttacgaggtcctctacatggttgatgccatcgacgagtatgctgttggccagctcaaggagtttgagggcaagaagctcgtctctgccaccaaggagggactcaagcttgatgagagcgaggacgagaagaagcggaaggaggagctcaaggagaaattcgagggtctctgcaaggtcatcaaggaggtgctcggagacaaggtcgagaaggtggtggtctcggaccgtgtggtggactccccgtgctgcctcgtcaccggcgagtatggctggacggccaacatggagaggatcatgaaggcccaggcgctgagggactcgagcatggccgggtacatgtcgagcaagaagacgatggagatcaacccggagaacgccatcatggaggagctccgcaagcgcgccgacgccgacaagaacgacaagtccgtcaaggacctcgtcttgctcctcttcgagacggccctcctcacctccggcttcagcctcgacgaccccaacaccttcggcagcaggatccaccgcatgctcaagctcggcctgagcatcgacgaggacgagacggcggaggccgacaccgacatgccgccgctcgaggacgacgccggcgagagcaagatggaggaggtcgactaa

SEQ ID NO: 4049 - DNA, 1400 bp, Oryza sativa
atggccaccggcgccggcgtcctcgagaggtctctcagcttcaagaactgggagcccactgccgccgaggaggccgccgtcgccgctccgccgccgcacgatgaggcggccagccggtgcatcaacggcgcgcggccggggatcctgctgctgcagcagagccccaaagccaagcagggcgacgccgcgacgtcgccggcgcaggccgcgctgatcgatccatctccttcyttcgacgaggccaagcaggagaccgcggcgtcccgctggtccagggccggcaagcgcatcgccaaggtcggcaagggcctctccaagaacgagaaagcccagaagctcgcgctccagcactggctcgaagctatcgacccgcgccaccgctacggccacaacttgcatctgtactacgacatctggtctgcgagctcgagcactgagccattcttttactggctggatgtaggagctgggagagacatgcatcaccaaaagtgcccgagaagcaagctttattcacagctgatcatgtaccttggaccaaacgagagggaagcttttgaagttgttgtggagggtgggaagctgatgtacaggaagagtggagttcttgtgaacaccactgaagattccaagtggatatttgtgttgagcacaacaagatcattgtatgttggacagaagaagaagggtaaatttcagcactcaagtttcctagctggggcagctacaacggctgctggaagattggttgccaaagatggtgttcttcaggcgatatggccatacagcggtcactacctcccaacagaagagaacttcagagagttcatcagcttcttggaggagaacagtgttgatcttgccgatgtcaagagatgttcggtcgatgacgatgaattcccgtcattcaagaagacagaggagaaaccagaggaagctgagaagcctactgaacccacacatgatgagatcatggacagctcacaaattgagctgcctgaggtagacatagtgaaggaagcggttgtcgaaaacagcgaggacaccaaggtggcaccgatcatggccagccgcccatccttcaaatgggcaaccgcgaatggtgctcgcattggctgtgtccgggactacccggctgatctacagagcatggctcttgagcatgtcaatctttcaccaagagtggtgccctctcctactacaaacaggctgccgataccgtctcctcggccaagcccgaagatcaggctgtcacctaggctgcactacatgggtctcccgacgcctaccggttgcaagctcccgatcccgagcccggagatcaggaggtcaccaagggatcagttcatggggtttcagacaccgtcagtgtctctcacactcccaaagcttgggaagtg

SEQ ID NO: 4050 - DNA, 2037 bp, Oryza sativa
atgggggtccgcccggcggccaccaagctgaacatctcccccgccgccgcgcggcgcccctcctccttcctgcccatcgccaccgtggcgctcctctgctccgcgtcctacttcctcggcgcgtggcagcacggtggcttctcctccccctccgcctccccatcctccgtctccgtcgccaccgctgtcgcctgcaccaccaccaccacggccaccacccgctccgccacgcggccgcggaagcgracgcccgcggggcaggggcaggcgctcgaawtytcggggaaamacgcggcggccgcgracggcgccgtgctcagctcgtccggggattcggcggcgacgcggaggtaccaggcgtgcccggccaggtactcggagtacaccccgtgcgaggacgtgaagcggtcgctgcggtacccgcgggagcggctggtgtaccgggagcggcactgccccacggggcgggagcggctgcgctgcctcgtgccggcgccttccgggtaccgcaacccgttcccgtggcccgccagccgcgacgtcgcgtggttcgccaatgtgccgcacaaggagctcaccgtcgagaaggcggtgcagaactggattcgcgtcgacggcgacaagttcaggttcccaggcggcgggaccatgttcccccacggcgccgacgcgtacatcgacgacattgggaagctcatcccgctccacgacggctccgtccgcaccgcgctcgacaccggctgcggggtggcgagctggggcgcgtatctgctgtcccgcgacatcctggccatgtccttcgcgccgcgggactcccacgaggcgcaggtgcagttcgcgctggagcgcggcgtgccggccatgatcggcgtgctcgcctccaaccgcctcacctacccggcccgcgccttcgacatggcgcactgctcccgctgcctcatcccctggcacctctacggtagtgtatcccatattgcccgatcaccatacacactcatgatctcttcatccgaatacactctcattggtcactaccgaacatgtcaatgtgcagatgggttgtatctgatcgaggttgaccgtgttctgcggccgggagggtactggatcctgtccgggccgccgatcaactggaagaagtactggaaagggtgggagaggaccaaggaggacctgaacgccgagcagcaggctatcgaagccgtcgccaggagcctctgctggaagaagatcaaggaggctggcgacatcgctgtctggcagaagcctgccaaccacgccagctgcaaggcctcccgcaagtccccgcctttctgctcccacaaaaaccccgacgcggcatggtatgacaagatggaggcctgcgtgacgccgctcccggaggtctcagacgccagcgaggtcgctggtggcgcgctgaagaaatggccgcagcggctcaccgccgtgccgcccaggatatctagaggtagcatcaagggcgtgacatcgaaagcgtttgtgcaggacaccgagctgtggaggaagcggattcagcactacaagggggtgatcaatcagttcgagcagaaaggacgataccgcaatgtgctcgacatgaacgccggcctcggcggtttcgccgcggcattggccagcgaccccttgtgggtcatgaacatggtccctaccgttggtaactcctccacgcttggggtggtctacgagcgtgggctcattggaagctaccaggactggtgcgagggcatgtccacttatccacggacgtacgatctcatccatgcggactcggtcttcaccttgtacaagaacaggtgcgagatggatatcatcctgctggagatggacaggatcctgaggcccgagggcacggtgatcatcagagacgacgtggacatgctggtgaaggtgaagagcgccgcggacgggatgaggtgggacagccagatcgtcgaccatgaagatggcccgctcgtccgggagaagatcctcctggtcgtcaagacgtactggacagccaaggagcaagaccaatag

SEQ ID NO: 4051 - DNA, 1113 bp, Oryza sativa
atgtactacatgagtggagatgcatggaaggagggtggcattgatgcaacaggtgctttaatggttttaacattgaaaatcatttcatgtgcaataaactacagtgacggtatgttgaaggaagagggtttgcgtgatgcccagaaaaagtatcgtttggctaaacttccttctttgatcgaatattttggctactgcctctgctgtggcagccattttgctgggccagtatatgagatgaaagattatcttgaatatactgaacggaaaggattatgggccagcccaactccttcaccactattgcctactttgcgtgctctagttcaagctggcgcatgtatggggttatatttgtatctatcacctcaatttccactttcacggtttagcgagcccttatattatgagtggggtttctggcaccggctcttctatcagtacatgtcaggctttactgctcgttggaaatactactttatatggtcactttcagaagctgcaatcattatatctggtctgggttttagcggctggtctgattcatctcccccgaaagccaaatgggatcgtgcaaaaaatgttgatgttttaggtgtcgaattagctacaagtgcagttcagttgccgcttatgtggaacattcaagtgagcacatggctgcgatactatgtttatgagaggttagttcagaaaggaaagaaacctggtttcctccagttgctgggtacacagacagtcagtgctgtctggcatggtctttatcccggatatatcatattctttgttcaatcagcattgatgataaatggttcaaaagtcatatacagatggcaacaagcagtcagcaatccagtcttccacgctatcctggtttttgtaaatttttcatacaccttgatggtccttaactactcatgtattgggttccagtttgtatttaccatgctgtatactcttcgtttcctccaggtactgagcttcaaggaaaccctagcatcctaccagagcgtatattatatcggcacaattgttcccattgtagttgtcttgctgggttatgttatcaagccagccaggccagtgaagccaaaggctcggaaggcagaatga

SEQ ID NO: 4052 - DNA, 720 bp, Oryza sativa
atggaaggcagcggcggtggcagtagcaagcatttcatccctgtccatggcctttgccatggagcatggtgctggtacaaggtggtcaccatgctccgctctgaggggcaccgtgttacggcactcgacctcgctgcgtccggcgtgcacccggcacgcatcgacgagtcgcgaccgctcctcgacacagtggctgtggctcctgcgggtgagaggctgatcctcgtagggcacagcttcggcggcctaagcatcgcgctcgcaatggagaggttcccggacaagatcgccgtggccgtgtttgccgcctcgtccatgccatgcgtcggcaagcacatgggaatcgtcagggagttgatgagggaaagagctcccaaaggtctgctcatggatagcaaaatgataccaatgaacaacaaacgaggtccaggaacagcagatttgaccctggcaaaattattgatgacacctggcagccagttccaggatgatccgatgatgaaggatgacaagctgcttaccagtgccaactatggttcggtgaagagggtgtgcctgataggcatgggggatgacatcaaggagctgcatcgttatttgatcacgttgagcccgggcacggaagtcgaggagattgctggagccgaccacaacatcatgtgctccaaaccaagggagctctgtgatcttcttgctaaaataagcagcaagtatgactga

SEQ ID NO: 4053 - DNA, 1878 bp, Oryza sativa
atggcggtgatggaggagcagcaggagggagccgcgggggtgatgcggcggaggcccaagacgaagatcgtgtgcacgctggggccggcgtcgaggtcggtggagatgatcgggcggctgctccgcgccgggatgtgcgtcgcgcgcttcaacttctcccacggatcccacgagtaccaccaggagacgctcgacaacctccgcgccgccatggagagcaccggcatcctctgcgccgtcatgctcgacaccaaggcgcgtgatttcgttcttggggtgttaattttggccaccttttattttcttcaagacttttgtgcggtcgttttcacagtaggccgttgctcgtccctgattcttgggttctcaccccctgactattctgctggtcaaaagacaatatcagtcatgttttgttggctcaaaatcagcttagacgatgataagatttgtgtggtacatgaccaattttctgaaagactttgttcaggatttctcaatggcattaaacctatattggatttgcttaaaatacaggggccagagatccgaactggatttctgaaagatggaaaacccgtacagttgaagaagggtcaagaaatcacagtttcaactgattatagcataaagggtgatgacaacatgatatcaatgagctacaagaagctagcggtggatctgaagccaggcagtgtaatattatgtgctgatggcaccatcactcttactgtccttcactgtgataaagagcaaggcttggttcgctgccgttgtgagaacactgctatgcttggtgagaggaagaatgttaaccttccaggagttattgttgatctcccgacacttactgagaaggacaaggaggatattcttaaatggggtgtcccaaacaagattgacatgattgctctgtcttttgttcgtaaaggctcagaccttgtagaggtcaggaaggtgcttgggaagcatgcaaagtcaataatgctgatgtcaaaggttgagaatcaagagggagtggctaactttgatgatatcctggcacaatctgatgcttttatggttgcaaggggtgatttgggaatggaaattccgatagagaagatcttttatgcacagaaggtgatgattttcaagtgcaatattcagggcaagccagttgtgactgcaacccagatgttggaatctatgatcaagtctccccgccctactagagcagaagcgactgatgttgccaatgcagttcttgatggcactgactgtgtcatgctcagtggtgagacagctgctggggcttacccggaactggctgtacggaccatggccaagatctgcctgcaagcggagtcatgcgtcgaccatgccgctgttttcaagtccattaccgcatcagctccaattcccatgagcccattggagagccttgcatcatcagctgtgcgtacagcgaactctgccaaggcggcgctcatcttggtcctgactaggggaggaacaactgctaggctggtggccaagtacaggccatccatgccgattctgtccgtcgtggttcctgagctgaaacagaccgactccttcgactggacctgcagcgacgaagctcctgcgcggcacagcctcatcgtcaggggagtgatcccgatgctgagtgcagccactgccaaggccttcgacaacgaagccactgaagaagctctcgggttcgccatcagcaacgccaaggcgatggggctctgcaactccggtgcaccttcggtgtttgctgttcatgggttaaccattgaaacagttaaattcgttattgctaccgcagcttatttcgctgcctctgctgctactagtattaaacttgacagccgttacgtaatttgttag

SEQ ID NO: 4054 - DNA, 1899 bp, Oryza sativa
atgaaacaagggaaagtggagatgacgccggcggtcgccgccgcggcggttctgccggtggggttccgtttccggccgacggacgaggagctggtgaggcactatctgaagggaaagatcgctgggcggagccaccctgacctcctcctcatcccggacgtggacctctccacctgcgagccctgggatctcccggccatgtccgttatcaagtccgacgaccccgagtggttcttcttcgccccccgcgaccgcaagtatcccggcggccaccgctccaaccgctccaccgccgccggctactggaaggccaccggcaaggaccgcctcatccgctcccgccccgccggccccctcatcggcatcaagaagaccctcgtcttccaccgcggcagagctccgcggggcctccgcaccgcctggatcatgcacgagtaccgcaccactgagcctcacttccaatcaggcaaaaacggtagcttcgttctgtatcgcctgtttaacaagcacgaacaagatgatacccataccccggcctccaatttggaccaacaattgtccacgtcttctcaaggcaatccccaaaatggcacacctgctgtccaaccggccctcgcctcaataatgaaggatcatcagaccttaccatcatctggtttcagccaactgactgaaatacaagatgctagtacatctgtccatgacaaagagcaaactgtagcccatgacgatgcttttctggacgtgttatctcaacttccagacctagagcctgagcaaagatacaatggattccctaatatcacctctccaattcgcccttacagcgatcacccttttgtcggcaatctgggtgagcaagatctttcagcgcattttggcagtaccttgtctgagcaggacctgcaaagtttgttgtttagtccaaattacaccaaaatggataagcaccccactggaaacgtagagtctaatcctaccgcgtcgtccaacaatccaaacaataacacattactcatggatagttggaggaagaatgattcatatcagatgcttctaattcagcgtgcagacaacacagatgctacttgctgttcttcttcaatcaatgcaccacaaacagaaacaagtgatgctaatcttgaagcaagagcccagagtagcagcatggtctacagtggagtagccgagggctcccccttgtgcaaccaagatcaactacactccgcattcaatcctcacatggagtcacaaaagagtggagccttctgttgggctggattgtggaccccttatccccagcattggttcgatactatcgtagaaccgggcaggagtggcatgacattttcagatgccttgaaagaacaaggtcaggaacaggcaccttcaatgaagcacttgacagctcaagatctcgttgatccacaacaaggaactgctgcaagaaggatccgccttgtatgctctgttgagagggcatcagtctctcaacctgtatcctcacatttgcagagtgaatatgaagctggatcatgctgtaacactcgcaattcatctaataacaagaaggaaagtgtcaggagtgaagatgaagctggatcatgttgtaacactggaagttcatctaataaccacagcgaggaaaatgacgatgcagcctcccagattatggtactactacagtttattgatggagaaccaatgcatattcagtgcaaagaggatacccctattcaagtggatcattcagtggaagttatggacaagctccaaggcttctcctttcatgaacttgagacattgaaatttatatcttccacctggcaaaaagaaatttatatcttcctacatatacctcatgaagggtcctggactttttctttcttgctagtgtaa

SEQ ID NO: 4055 - DNA, 1790 bp, Oryza sativa
atggcgatgcagacgatgcagacggagcagcagcagcagcagcggaggaagggttcgccagagatggatttcttcagcgaatatggtgatgctaacagatacaaaatwccggaagtcattggcaaaggaagctatggtgtagtttgttcagctattgaccaacatactggcgacaaggttgcaatcaagaaaatacacaatatctttgagcacttatctgatgctgcccgaatcctccgtgagatcaaattgctccggctattacggcatcctgatatagttgagatcaagcatataatgctacctccatcaaggagggacttcaaggacatatatgttgtctttgagctgatggataccgatctccaccaagtcatcaaggcaaatgatgacttaaccaaagaacatcatcagttctttctttatcagatgcttcgtgctttgaaatatattcatactgctaatgtctatcatcgtgatttgaagccaaagaacatattggcaaacgctaactgtaaactcaaaatatgcgatttcggtctagcacgagtggcatttaatgacactcctacaacggtattctggacggattatgttgctactagatggtatagggctcctgagttgtgtggttctttctttactaagtattcaccagctattgacatatggagtattggctgcatttttgctgagattttaactgggaagcctttgtttcctggtaaaaatgtggttcaccagttggatctgatgactgatctcttgggtactccatcaatggatactgttacaaggattcggaatgagaaagcaaggaggtacttgagcagtatgaggaaaaagcagccagtacctttttctgagagattcccaaaagcagatcctgctgcactcaaacttctgcagaggcttttagcattcgacccgaaggatagaccaactgccgaagaggcgttggctgatccatattttaaaggccttgcgaaagcagagagagaaccatcatgccagccaataacaaagatggagtttgagtttgagcggagaaaggtgactaaagaggatgtgaaggaacttatattccgtgaaatactggagtatcatcctcaacttcttaaggattacatgaatggaaccgaaaaaacaaacttcctatatcctagtgcccttgacaactttcggagacaatttgctaacctggaagaaaatggagggaagaatggagatgctgttccatcagacaggaaacatgtttcgctcccaaggactactacagttcattctgctccaattcctcccaaagatcatcaaaatataacttcccaagtaccccaaaggattccaggtagaacaggacgaggggcttgccctgtaataccatttgagaatttgagtgcaatgggcccatacaatcaacgaagggtggtaaggaatccagtgcttcctccagccaccaccaacctatcagcatatgcctaccaccgtaaatcggatagctcagaaagagagctccagcaggagcttgagaaagatcgcatgcggtaccagccatcagagcatttcatggatgctaaggtggtgtcacatatgtcccatgatttgagagcttcctcttactacgtttcaaaggcgaaatctgatgtagcagacagagctgccttacaatccaacatgatgcagggaattggcccttttaatggcattgctgcagttggaggattgtcagaactgaccgcaccactaactactgagatgtatttggttaacggttacaggcttacagcatg

SEQ ID NO: 4056 - DNA, 1695 bp, Oryza sativa
atgggtgcgagtgaggtgcggagttgggggccgttgggccatttgtctccgaggtccggtccgtccggagattccatgaagaatcaacggttctgttttgtcaatcatgttggaaagatagtactgaacagtgacacattactaggcaatggagttgttgggattcttgccgagactgctaatatgtgggaaaggagagcaccattaaccccatcccattgtgctcgccttctgcttggaggaggcaagaggggaactggggtaaatcggattatcgtgcaaccaagtacaaagaggatccatcatgatgctcaatacgaggatgttgggtgtgagatttcaaaagacctgtcagagtgtggtcttattataggaatcaaacaaccaaagctggagatgattcttccacatagagcatatggattcttttctcacacccataaggcccagaaagaaaatatgccactattagatgagatccttgaaaaaagagtatccctgtttgattatgagctaattgctggagatgatgggaaaagattgcttgcatttgggaaatttgctgggagagctggactgatagacttcttacacggtctcggacaacggtacttgagccttggatactcgaccccatttctctctctagggcaatcacatatgtatccttcactcgctgcagccaaggctgcagtcattgccattggtgaagagatagcaacatttggacttccatctggaatttgcccaatagtatttgtattcactggaactggaaatgtttctcagggtgcgcaagagatattcaagttactgccccatagctttgttgatgctgggaagcttccagagctttctgcggctagaagtctgtctcaacatccacaatcaagccagagagtattccagctgtatggttgtgttgtctcttctagagacatggtcactcccaaggatcccaccagatgcttcaacaaagctgactattatgctcatccagaacactacaagcctgtttttcatgaaaggattgctccatatgcatctgccattgttaactgcatgtactgggagaggaggtttccacgattactgagcattgaccagttacaacaactgatgaagaatggttgccctttggttggtatttctgatataacttgtgacattggaggttccatagaatttgtgaacaagagtacttcaattgagagacctttcttcaggtatgatccttgtactaattcatgccatgatgatatggaaggaaatggtgtgatctgcttagccgttgacattctccctacagaattttccaaagaggcctcccaacattttggagacatattatccaaattcgttgctagattggcctcagctaaggaactgttggagcttccttcacacttgagaaaagcttgcattgcgcatgctggcagactcacttctctgtatgagtatattcctcggatgagaaagactataatagagttgccaccagctccaacaaatctattacctgataagaagtacaacagcctggtgtctctcagtggccacctctttgataagttccttattaatgaagctctggatattattgaaacagccggaggttcttttcacttgattagatgcgatgttgggcaaagcattgatgatatgtcatactcagagcttgaaagcttgaagtaa

SEQ ID NO: 4057 - DNA, 3645 bp, Oryza sativa
atggcgcatagcccgctctgctcccggagccggccggtgctcgtcgtccgcccggcgacggccgccactggcttcgcgcagccgatcataaggtgcaggagatttacaaggacaaggcttctccgatgcttggtggcaagtgcagattattctaagagaaacccaaggagagcctccactccgaaacctaaaggtgctgcctctagaacatatgctccgagacctactgttgaatccagcatgaagaagattggacaaagcggcacagatgaaggtgatcttggcacaagcaatgggaagctcagtagtgaagcaacagagcaaactagtaatgtagaagaatcatcggaggtggacttctctggaaatgtatcgagcagtgtattcttggagggaatggatgatgcttttgaagctgagactgaagaagaggtcgagcaaaatcagtctccagaactgtcttctgaatctatggatgatgatgcaattgacagaaaacttgatgaataccgtggtaaaataagtgcactaataagttcgaaacctgaacctacatcagtttctagcactcatgtacaggacagatcaattgttggttttcatgaacaagaaaaatctgtagttagtttccatgagcaagatagatcaattgtctctgttcccgaacaaagccagccaagtagtggtgtcagtggacaaaatccaacagaagagaaaaccattattagtggacaagatgtcaccgaagaagcaccagaagagataactggcaagagtattgagagggaaccattaagtagagaaactgagaaagttctgtttgctgatgatgaccctaggataatcaaggatgaacagtatgaacctgatatagcaccagtacaggatgatgtggatccacaagtgctcaggaggcggcttgaagagcttgctgagaaaaattatttggctgggaataagtgttttgtttttcctgaagtagtacaggcggattcggtcattgatctttacttgaaccatagcatgtcagccttagccagtgagcctgatattcttatcaaaggggcattcaatggttggagatggaaaaaatttacccaaaaaatgcataaaagtgagttaacaggggattggtggtgctgcaaactccatatacccaagcaggcttacagattagattttgtattctttaatggtgacaccatctacgaaaataacaatcataatgatttcgtcctacaaatagaaagcgaaatcaatgaacactcatttgaggacttcttggttgaagaaaaacaaagagagcttgaaaggcttgctgcagaagaagctgaaaggaaaagacaggctgaggaggagcgtcgtaaggaggaagaaagggctgcaatggaggctgacagggcacaagcaaaggctgaagtcgagatgaacaagaataagttgcaaaatttattaaattcagccagcagatatgctgataatctatggtatatagagcctcacacatacaaagcaggggatagggtcaaattgttctacaacagaagctcaagaccgctaatgcataacactgagatttggatgcatggcggttacaataattggagtgatgggctctctattgctgaaaaattaatcaaatcatatgaaaaggatggtgattggtggtatgcagatgttactctacctgaaggggcattggtgttagactgggtttttgctgatgggccacctgggaatgcaaggaattatgataacaatggacgccaggatttccatgctgttgttccaaataacatatctgaggacctgttttgggtggaagaagagcacatgatatttaaaaggcttcagaaagaaaggaaagaaagggaggatgctgatcgaagaaagtctgagataactgcaaaaatgaaagctgagatgaaggaaaagactatgagagactttcttctctcgcagaaacacattgtgtacactgagcctctcgaagtacgtgcaggaaccaccgtggatgttctatacaatccgtctaacacggtgctgaacggaaagccagaggtttggttcagatgttcctttaatcgttggactcatccaagtggtcctttgccgccacagaagatggtgaatgcggagaatggttcacacttaagagcaacagttagggttcctttggatgcatatatgatggactttgttttctctgagtcggaagaaggtggaatatatgacaacaggaatggcatggactatcatagtcctgtgactgattccgttgcaaaagaacctcctatgcatattgtgcacattgcagtagaaatggctcctattgcaaaggttgggggtcttggtgatgttgttacaagtctttcacgagccgttcaagatttaggccacaatgttgaggttattcttcccaagtatgactgtttaaacctaagcaatgtgaaagatttacattaccgtcaaagttttacttggggtaatacagagataaaagtatggtttggaaaagttgaagacgtccctgtttacttcttggaaccacagaatgggatgttttgggttggatgtgtctatggaagaaatgacgagagtagatttggcttcttctgccattctgctctagagtttctccgccaaaatggatcttctcctgatattatacattgtcatgattggtcaagtgctccagttgcttggctattcaaggaacaatatgctcaaaatggactgtcaaatgggcgggttgtatttaccatccacaaccttgaatttggtgcacatcacatcggcaaagcaatggcacgttgtgataaggctacaactgtttcatatacgtattcaagggaagtgtcaggacatggtgctattgsccctcacttttccaaattycacggtattcgtaacggaattgatccagatatttgggatccatacagtgacaattttatcccggtccactatacctctgagaatgttgttgagggcaagagtgctgccaaaaaggcattgcaacagaggcttggactacagcaaactgatacccctgttgttggaattatcagtcgtctgacagtccagaagggaattcaccttatcaaacatgcaatttatcgaactcttgaacgcaatgggcaggtggttttactaggctcagctccagatcatcgcatacaaggtgactttaccaacttagctagtaaactgcatggcgaataccatggtcgtgtaaagctttgtttaacctatgatgagccactatctcatttgatttatgctggtgccgacttcatccttgttccttccatgtttgaaccttgtggtttaacccagcttactgctatgcgttatggatctatcccaatagttcggaaaactggaggcctttatgacaccgtttttgacgtcgacgatgataaggatcgagctcgagaacaaggtcttgagccaaacgggttcagtttcgaaggagctgacagcaacggtgtggattacgcccttgacagagcgatcaccacatggtatgatgctcgcgattggttccactccctctgcaagagggtgatggagcaagattggacatggaaccgacctgctctggactatatggaattgtaccattccgctcgcaagaactga

SEQ ID NO: 4058 - DNA, 2535 bp, Oryza sativa
atggaggacggcatctactcgtcctccgggccgccgtcgacggcgacggcggccgcggcggcggcggcggtkgggtcgtcggtgatcccgatcgtgaacaagctgcaggacatcttctcgcagctggggagcagctccacgatcgacctgccgcaggtcgccgtcgtggggagccagagcagcggcaagtccagcgtcctcgaggcgctcgtcggccgcgacttcctgccccggggctccgacatatgcacgcggcgacccctcgtgctgcagctcgtgcaccagccccgccgccccgccgacgccgaggcggatgagtggggcgagttcctccacctccccggccgccgcttctatgacttccgcgaaatccgccgcgagatccaggccgaaacagacagagaggcgggtggtaacaaaggtgtgtcagataagcagatacgactgaagatctactcaccaaatgttctaaacattacgttggttgacttgcctgggataactaaggtgccagttggtgaccaaccaactgacattgaggccagaataaggaccatgatattgtcgtatatcaagcacaagacatgtatcatcttggctgtttcgccagcaaatgcagacttatcgaattctgatgctcttcaaattgctcgaaatgctgaccctgatggttctcgaacaattggtgttataacaaagctggacataatggacaggggcacagatgctcgtaactttctgttgggaaatgtgattccattacgactaggctatgttggtgtggtaaaccgcagtcaacaggatatcaaatcagatctcagtatcaaggaagctctggcgcgcgaagaaagtttcttccgtaatcatccagcgtataatggtcttgctcagtactgtggtataccacaattagcaaagaagttaaaccagattttggtccagcatataaagactgttctgccaggattgaagtcacgtataagttctcaattgacaactactgctaaggagctttccttttatggtgatccagtcgagtccaaggcyggtcaaggtgctaagcttttgaacattctggcaaagtactgtgaagttatagaactttttacacaggatgttgacccttgtgaagatgttaccgatgaagacatccgtatggctatacagaacgcaactggtcctaggagtgctttgttcgtacctgaggtaccttttgaggtccttgtacgcaggcagatcagcagattgcttgatccaagccttcagtgtgcaggtttcatatacgatgagctagtcaagatgagccatcgctgtcttgctgttgagctgcagcagtttcctctgctccgtaggagcatggatgaagtcatcgggaggtttttacgggatgggcttaagcctgcgcaggatatgatagcacatatcattgagatggaggcggattacataaacacatctcatccaaatttcatcggcggcagcaaggctgttgagcaagcacagcagcaagttaggtcttctagactggcagctgtggctagaagagcacttacacctggcatttcttcttttgattttgtcatccactatcagggtttacggcctgctgctgaggctgagaggccaggatcttcaggtagtggaagcacatctttctggggatcaatatcaatattttcttctactagtgatgatcgtacacattcttctgcaaaagacaactcatcgaacaaatcttatacagcttctacttcccacctggagcattcactctctacgatacagttgagagagccaccagttgtcttgaaaccttcagaaagccagtctgagcaggaggcgcttgaaatagcaataactaagttgctactgaagtcatattacaatatagtgcggaaaaatgttgaggacttcgttccaaaggcaatcatgcattttctggttaaccacacaaaacgggagctgcataattaccttataactaagctttatagagacgacctctttgcggacatgctcagagaacccgatgaaataaccataaagaggaggcaaatacgtgacaccctcaaggtccttcagcaagcatacaagactttggatgagataccacttgaagcggacacagttgagagaggctattccctggatgccgatgcaacaggtctaccaagggctcatgggctttcttcatccttccaagatggaagctcgccatattcgaccccaaagcaaccaaggtcaaggaaatctagccactcaggggagcagctgccattcaatcccgatgcaagcggaagaagggagtatgaggctgatataagagatgcattttttaaaagaaaaatgatgacgggagtactggacagatgtgtcacccccatgtcagacaaaaccgccttcaaacagggacaagggtgtacagtagtactagaagattgccagcacttcgatgctgcgtcagtaattccattcaatcaatgtgatcaagggcatatcaagcagataacacaaatcactcatcttgataagtaa

SEQ ID NO: 4059 - DNA, 1370 bp, Oryza sativa
atggccttgtctgcgacagtggtttgcttaactcgcagttgccagctaaatctgatgaactttttgatcacttgtggccataggaagagaaattttataaatcatgatcctctaccctggaactctgaaaggtgtttgataacaggtgcagctaagatttctcgtaactttagttacttttcaaatctcctagattccttcaccaatgatctgttctggtgcaatttggatcaagtgctagcggcatcagctcaaggcatgtcaatcgggatcaactacgggcagatcgcggacaacctcccttctccgaccagggtctcgggtctcctccggtcaatgcagatcagcaaggtgaagctctacgacgccgaccagaacgtcctgagcgcgttcctcgacacgggcgtggagttcgtcgtcggcatcggcaacgagaacgtgtcggcgatggtggacccggcggcggcgcaggcgtgggtgcagcagcacgtccgcccctacctcccgagcgcgcgcatcacctgcatcaccgtcgggaacgaggtgttcaagggcaacgacaccgcgctcaaggccaacctcctgccggcgatgcagtccgtgtacaacgccgtcgtcgcgctcgggctgcagggccaggtgaacgtcacgacggcgcactccctggacatcatgggcagctcctaccctccctccgccggcgcgttccggcccgacgccgtgccgtacatccagccgctgctcaacttcctgtccatggcggggtccccgttcctgatcaactgctacccgtacttcgcctacaaggccgacccgggcagcgtgccgctggagtacgtcctcttccagcccaacgccggcgtgaccgacccaaacacgaagctcaactacgacaacatgctgtacgcccagatcgactcagtgtacgccgcgatgcaggcgctgggccacaccgacgtcgacgtgaagatctccgagaccgggtggccgtccaggggcgaccccgacgaggccggcgcgacgccggagtacgccgggatctacatcggcaacctcctgcggaggatcgagatgaagcaggggacgccgctgaggccgtcgtcgcccatcgacgtctacgtctttgcgctgttcaacgagaacctcaagccggggccggcatccgagcggaactacgggctgttctaccccgacggcacgccggtctacgacgtcggcctgcgcgggtatctcccgccgatggacgaatcgaaaagcgcgcgaaagttttgccgcgaaagcgtgaagtgtccgttctatgaatgtgcaaatgaaacatcagagatagtacatcctccttttgcatctctaatttacaagagacctgacta

SEQ ID NO: 4060 - DNA, 1659 bp, Oryza sativa
atggcgacggcgagggcgagggccgcgctggtgtttgtggctctgctgcagatggcggcagtggtggtggtgcgcgcgtcgcacgtcgtctacccggagctccagtcgctggaggcgaagcacgtcgacgggaagctccggaccgggtaccacttccaaccacccaagcactggatcaacggtccgatgtactataagggcttgtaccatctgttctaccagtacaaccccaagggcgccgtgtgggggaacatcgagtgggcgcactcggtttcgacggacctgatcgactggacggcgctggagccggggatctacccgtccaagacgttcgacgagaagggctgctggtcgggctccgccaccgtgctccccagcggcgtgccggtgatcatgtacaccggcatcgaccccgacgagcggcaggtccagaacgtcgcctacccggtgaacctctccgacccgtacctccgcgagtggtacaagcccgactacaaccccatcatcaacccggacggcggcatcaacgccagcgcgttccgcgacccgaccaccgcctggtacgggcccgacggccactggcggctcctcgtcggcagcaaggtgaacatgaaggggctcgccgtgctgtaccggagccgggacttcaagaagtgggtcaaggcgcaccacccgctgcactcggcgcacaccgggatgtgggagtgcccggacttcttccccgtcgctgtggcgggcgggagccgccactaccgccgcggcgtcgacaccgccgagctgcacgacgccgccgtggcggaggaggtcaagtacgtgctcaaggtgagcctcgacctgacgcggtacgagtactacaccgtcggctggtacgaccacgccaccgaccggtacgtccccgacgccgccttccccgacaacgactacggcctccgctacgactacggcgacttctacgcatccaagtcgttctacgacccggccaagcgccgccgcatcgtctggggctgggccaacgagtccgacaccgtacccgacgaccgccgaaagggctgggccggcatccaggcgataccgaggaagctctggctgtcggcggacgggaagcagctggtgcagtggccggtggaggagctcaaggcgctgcgagccaagcacgtcaatgtcactgacaaggtcatcaagaagggcaactacttcgaggtcaccggcttcaagtccgtgcagtcggatgtggatatggcgttcgcgatcaaggacctgagcaaggcggaggagttcgacccggcgtggcggacggacgcggaggcgctgtgcaagaagctcggctcggacgtcgacggcggcgtggggccgttcgggctgtgggcgctggcctccggcgacctcaaggagaggacggccgtcttcttcaggggtgttcaaggccaacgactcctcgcacgtcgtcctcatgtgcaacgaccctaccagatcgatcactccgtggtggagagcttcggggcgcgcggcaagacgtgcatcctgacgagggtgtacccgaggaaagccgtcggcgacgacgcgcacctcttcgtcttcaacaacggcgagtcggacgtcaaggtcaccaacctggacgcctgggagatgaagaccccgaagatgaacgcggaggagtag

SEQ ID NO: 4061 - DNA, 1362 bp, Oryza sativa
atggacaccgggatgagggtggcgctgcaccggcaggtgtcgtcggggtcgctgaaggagagcgggagctccggcggcagtcgtcgcggagtctccccggaacggggaaggcsgcgacgaggsgaagccgccggcgtcgaggccctgctccgcggcggcgtcgacgtcaacagcatcaacctcgacggccgcaccgcgctgcacatcgcctcctgcgagggccaccccgacgtcgtccgcgtgctgctcacctggaaggccaacatcgacgcccgcgaccggtggggcagcacggctgtagctgatgccaagtgttatggccacacggaggtgtacaatcttctcaaggctcgtggtgcaaagatcccgagaaacaggaggacaccgatgatggtgtcgaatcctggggacgtaccagagtacgaattgaaccctagtgagctccaattcaagaaaggggatgaggtggtcaagggcgtgtaccaagttgccaaatggaatggaaccaaggttcatgttaagatacttgatagagaatgctactgcgatcaggaagtcataaactctttcaggcatgagctgaccgtattggagaaggtccggcacccgaatgttgttcagttcgtcggagccgtcactcagaacatacctatgatgattatttctgaatacctcccaaatggtgatttatcaagctgtattccgaggaaaggaaagctacatggtcagaaggttctaaaatatggccttgagatcgccaggggcatgacttatcttcaccagtgcaagccagaccccatcatccactgcgacctaaagccaaaaaatatcttcctggatagtggaggccaactgaaaatcgcaggattcggtctgacgaggctgtcgaaaatctctcctggcagagtgaaactggccgatcatgagtccatggttgacagcttcagtcactacactgcacctgagctgtacagaaacgaaatattcgacgcaagcgtcgacgccttctcatttggtttcatcctctatgagatggttgaaggaacacacactgtacatgggaagtcatcagaggaatctggccacacaattcgatatgatgggatgcgtccatcgctgaagaacaagctcaggggatatcctccagatttcaaagcgctgatcgaagaatgctgggatactcagggtatagcaaggccaacattttcagagataatcatcaggctcgacaagatatacgcccagtgcatgaagcaagggacctggaaggactcgctaaagatttggtccgtatctcggcgatttaagaatatcagatctaagcatttcagaaccaaaaagagagtccatgtcgcaatgtga

SEQ ID NO: 4062 - DNA, 1602 bp, Oryza sativa
atgtcgtccaacatgttcggcaagaaagggtgggactcgaatgggatggatacatctggttctgtctgcagaagttcttcagatatcaattacattaatcaacgggcaagattgaagagtgcgagcctaaactgtgtgggttcgccgccaaggaagaacaacaatgctacacagtaccggatgtttgttgccacatggaatgtgggaggaagaactcctaataaacgacttaaccttcaagactttctgcaggttgaagaatctcctgacatctacgtcttagggtttcaggagattgtccccctgaccgccggcaatgtgctcgtcctcgaagacaacgagccggcggcgaggtggctggcgctgatccaccaggcgctgaacatgccccaagaaccggccgacggcgacgagccatcgcctttgacgccgccgccgtcgtcgtcgacgacgacgtcggagtcgtcgaacggcgcccggacccggcggcgcracgccgtgtcgaggtcagccagcggcaacctcttcttccacacgccgtcgctcaagatgctcagcaacagctaccgcgtcgacagcgcgctagtcaagacgtgcaactgctcgccggagcactcctccgtgcgccgccgtgccgcggaggtgcgcgagtccgtgtacctcgccgacgcacccgcgccagccggcgagacggcggcgccagctgccgacgaagacgacgcgccgacgacggaggcgcagtgcgaggcaggatgcggcggcggcggcggcatgagctactgcctgatcgcgagcaagcagatggtggggctcttcctgtcggtgtgggtgaggaaggagctcgtcgagcacgtcggccatctccgggtggactgcgtcgggcgcggcatcatggggtggctcggcaacaagggctgcatcgccatcagcatgacgctgcaccacaccagcctctgcttcgtctgcagccacctcgcctccggcgagaaggaaggcgacgagctgcggcgcaacgccgacgtcgccgagatcctcaagagcgcgcacttcccgcgcgcctgccgcccggcgcccgccgccgcccgccgcgtccccgagaggattcttgaccacgaccgaatgatctggctcggcgatctgaactaccgcatgtcgttaagctacgacgagacaagaacactactggaggacaacgactgggacgctctactggagaaagatcagctgttgatcgagagagaagcggggagagtgttcagaggctggaacgaaggaaagatctgcttcgcgccgacgtacaagtacacgcacaactccgacgcgtacgccggcgagacggccaagtccaagaagaagcggaggacgcccgcatggtgcgaccggatactgtggcagggagacggcatcgagcagcttcagtacctgcgcggagagtcgaggttctccgaccaccggccggtctgcggcgtgttcgccgtcgaggtggacggcggcgatggcgacggcggcggcgccgccggcaagatcatgaagggttactactccctcaacgcccggatcggcggtgacagatcgcagtgtcaccagggtgacgtgtcgtga

SEQ ID NO: 4063 - DNA, 2310 bp, Oryza sativa
atggccatgtctcccctgctcttcatcgtcttcctcctcatgctgctcgagccctgctcatcttctcgcagcaatgtgtacattgtgtacatgggggagaggcaccacgggctgcggccggagctggtccaggaggcgcaccacggcatgctcgccgccgttcttggcagcgagcaggcggccatggatgccatcctctacagctacaggcatggcttctccggcttcgccgccgtgctcaccggcggccaggcggcgcggctctccgattggcctggagttgtgcgggttgttcggaatcgtgttcttgacctgcacaccaccaggagctgggatttcatgggggtgaatccgtcgccttcaggtggtggaatcctcttggagagcagatttggggaggattccatcatcggtgtgctagatacaggaatctggccggagtcggccagtttcagagacgacggcatcggcgaggtcccgcggcgctggaaggggcaatgtgtcgccggagagaagttcaatgcctctaactgcaacaggaaaataataggcgcgaaatggtacgtcaaagggtatgaagctgagtacggcaagatgaacaccagtgatatctatgagttcatgtcggcaagagacgccgttgggcatggcacacacacggcatccacagcggctggagctctggtagccaatgccagcttcaggggccttgccaaaggtgtagcaaggggaggggcacagagggcaaggctggcagtttacaaagtatgctgggctactggagattgtaccgctgcagacattcttgctgctttcgacgatgccatacacgatggcgtcgatgtgatctcggtgtccctaggacaagcacamctctycctgcttatgttgaagaagtccttgtcaattggatccttccatgctgtcgcaaaaggagtcgtcgtcgtttgttctgcagggaactccggtccttattcagagacggtgatcaactcggccccatggattgtcactgttgctgcgggcaccattgatcggatattccttgcaaagatcattcttggcaacaatagtacttacgtgggccaaacactgtattctggaaagcatccttcaaaaagtgtgcgtatagtctatgctgaagacatttcatctgataatgccgacgatactgatgcaagaagctgcactgcaggatctctgaatgctactctagtaaaaggaaatgtagtgctttgcttccaaacaagagcacagaggtcagcctcagtggccgtagagactgtaaaaaaggctcgaggtgttggagtcatctttgcgcaattcttgaccaaggatatagcatcttcacttgatattccttgtgttcaagtggattaccaagttggaacagctatacttgcatacacgacaagcatgagaaacccagtggcccaatttagctttccaaaaacaattgttggagagctggtagccccagaagttgcatacttctcatctaggggcccaagttctttgtccccctctatcctgaagccagacattgccgccccaggtgtaaacattctggctgcatggtcacctgctgctgccatatcatcggccattggatctgttaacttcaagattgactccgggacttcaatgtcgtgcccacacatttcaggtgtagttgctcttctgaaatcaatgcatcctaattggagccctgctgcagtgaaatcagcattggtcacgacagccaatgttcatgatgcatatgggtttgaaatggtatcagaggcagcaccctacaatgacgcaaatccatttgattatggaggtggccatgtcaatccaaacagagctgcgcaccccggtcttgtgtatgacatgggagtatctgactacatgcgcttcctttgctccatgggttacaacacctcagccatcagctccatgactcaacagcaaacaacatgtcaacatacgccaaaatcgcagttaaacctgaatgttccatccatcaccatccctgaactgaggggaaaattgacggtgtcaagaacggtcaccaacgtcggccctgctttgtcgaagtacagagctcgtgtagaagctcctccaggcgtggacgtcaccgttagcccctcgctcctaaccttcaactcaaccgtcagaaagttgccattcaaggtgacattccaggccaaattgaaggtgaaagggaggtacaccttcgggagcctgacatgggaggatggcactcacacggtgaggatccctttggtggttaggataataatcagtaagttctacgtcaatgcttga

SEQ ID NO: 4064 - DNA, 1992 bp, Oryza sativa
atggcggcttacgagcccaagaacattcttataaccggcgctgctggtttcatcgcatcacatgtggcgaaccgcctagtcaggaactatccgcactacaagattgttgtcctcgacaagctcgattactgttccagcctgagcaatctcaacccttcacgtccatcgccgaatttcaagtttgtcaagggtgacattgcaagtgctgatctggtgaactaccttctcacaactgagtcaattgacactatcatgcactttgctgctcagactcatgtggataattcatttggcaattcctttgagtttacaaagaacaatatttatggtacccatgtccttcttgaggcctgcaaggttactggtcagattagaagatttattcatgtgagtactgacgaggtgtacggagaaactgatgaggatgctgtggttggcaaccatgaggcctcacagctgcttccaacaaacccatattcagctacaaaagctggggctgagatgcttgtgatggcttatggaagatcttatggccttcctgtgattacaactcggggcaacaatgtatatgggccaaatcagttccctgagaagctcattcccaaatttattcttttggcaatgagaggcttgccccttcccattcacggtgatggctcaaatgtcagaagctatctgtattgtgaggatgttgctgaagcttttgaggtggttcttcacaaaggagaggttgggcatgtgtacaatattggtactgtgaaggaaaggagggtgattgatgtggccaaggacatatgcaagctctttggcttggacaccgagaaggtcatcagatttgttgagaacaggcctttcaacgaccagagatacttcttggatgatcagaagctgaagaaattgggatgggcagagcgcacactatgggaagaggggttgaagaaaacaattgaatggtacactaacaatcctgattactggggagatgtcgcaggtgccttgctccctcatccaaggatgttgatgacacctggagttgaaaggcataactggactgatgagatcaaatctctttccacttcaccagatgaagctaaggaatctagcactgcggttcctgcagccactgccaaaagcaccagcagtgcccctcaaaaggcctcatacaagttcttgatatatggtaggactggatggattggtggtctacttggtaagatatgtgagaagcaagggattccatatgagtatgggaaaggacgcctggaagagcgctctcagctcttgcaggacattagaaatgtgaagccaactcatgttttcaatgctgctggtgtcactgggaggccaaatgttgactggtgcgagacccataaacaggatactatccgcaccaatgttgttggcaccttgaaccttgctgatgtttgtcgttgcatatttgagtatgatgctaagcaccccgaaggatcaggaattggttttaaagaggaagataagcccaactttactggttcatattattccaaaactaaagctatggttgaagagctgttgcaagaatatgacaacgtctgtacgcttcgagtcaggatgcccatatcatcagatttgagcaacccccgtaacttcatcacaaagatagctcgttatgacaaggtggtaaacatccccaacagtatgacaattttggatgagcttttgcccatctccattgagatggcgaagcgggactgcaggggcatatggaacttcaccaatcctggggttgtcagccacaacgagatcctggagatgtacaagaaatacctcaaccccgacttcaagtggaccaacttcactcttgaggaacaggccaaggttatagttgcaccaagaagtaacaacgaaatggatgcatcgaagttgaagtccgagttccccgagctactgtccatcaaggattctttggttaagtatgtttttgagccaaacaggaaggttcctgctaactga

SEQ ID NO: 4065 - DNA, 378 bp, Oryza sativa
atggcggcggagcagagacagcagcagcagatgatgcaggaggggttcgaggactacctgccggtgatggcggagaggctgggggaggaagggctgatgcaggagctcgcaagcgggttccgcctgctcatggacccggcctccgggctcatcaccttcgacagcctccgccgcaacgcgccgctgctcggcctcggcgggatgtccgacgacgacctccgggggatgctcgccgagggcgacttcgacggcgacggcgccctcagcgagatggagttctgcgtcctcatggtcaggctcagccccgacctcatggacgagcctcgccggtggctcgacgacgccgtcgcccaggcctcacagttcctctttcattag

SEQ ID NO: 4066 - DNA, 4179 bp, Oryza sativa
atgacgatagtcgtcactccacatgacatgacacaggggaaaaagtcagaaaaagcccatggcaggatggtcggcaagcacgcagattataacaacgccgcatacatgcagctgcagcaggaggaggacgaggatgcgatgcagctgcagcagctggtcaggtcggtccgcgtcgtcgccgccctgagctacgaggtcgcggtggccggttctcatgtcgccgtggaggccctgctgctgcccgcggtgcaggcgctggcgtgggcggcgctcctggcgctcgcgatgcaggcccgggccgtcgggtggggcaggttccccgtactggtgcgcgtctggtgggtggtctccttcgtgctctgtgttggcatcgcgtacgacgataccaggcacctcatgggcgatgatgatgatgatgaggttgactacgctcacatggttgccaacttcgcgtcggcgccggccctcgggttcctctgcttggttggtgtcatgggttccaccggtgttgaattggagttcaccgacgacgacagcagtgttcatgaaccgctcttgctcggttggcagcggagagacgccgacgaaggagcccgggtgcttgcgggtgacgcccttgcaacattatcatggcttagtccgctgctgtcagttggtgcgcagcgaccacttgagctggctgacatacccttgatggcacacaaagaccgtgccaaatcctgctacaaggcgatgagcagtcactatgaacgccagcggatggagcgccccggcagcgaaccatcactggcatgggcaatattgaagtcgttctggccggtgaacacaattgtctcctatgttggcccatacctgatcagctactttgtggactacctcagtggcaaaattgaattcccccatgaaggttacatccttgcctctgtattttttgtagcaaagttacttgagacgctcactgctcggcagtggtacttgggcgtggatgtcatggggatccatgtcaagtctgggctgacggccatggtgtacaggaagggccttaggctgtcgaattcctcgcggcagagccacaccagtggtgagattgtgaattacatggcggttgatgtacagcgtgtgggggactatgcatggtactttcatgacatctggatgcttccactgcagatcatcctcgccttcgccatcctgtacaagaatgttggaatcgccatggtttcaacattggtagctactgtattatcaattgctgcctcagttcctgtggcgaagctgcaggagcactaccaagataagcttatggcctcaaaggatgagcgcatgcgcaagacatcagagtgcctgaagaatatgaggattttgaagctccaagcgtgggaggatcgatacaggctgaagttggaagagatgagaaatgtggaatgcaagtggcttcggtgggctctgtattcacaggccgcagttacatttgttttctggagttcaccaatctttgtcgccgtgataacatttgggacttgtatattgcttggtggcgaactcactgctggaggtgttctttctgctttagcaacatttaggatccttcaagaaccacttaggaatttcccagatcttatctctatgattgctcagacgagggtatctttggaccggttgtctcactttcttcaacaagaagaattgccagatgatgcaactataacggttccacatggtagtacagataaggcaatcaatataaatgatgctacattctcttggaacccatcttctccaacccctacactttctggcatcaaccttagtgtggtgaggggtatgcgagtagcagtgtgtggtgtcattgggttctggcaaatcaagcttgttgtcttctatactcggcgagatacccaaattgtgtggtcaagatcagtggatcagcagcatatgtccctcagactgccctggatacagtccggaaacattgaggagaacattctttttggcagtccaatggacaaacagcgttacaagagagttattgaggcttgctccctgaagaaagatcttcagttgctccaatatggagatcagaccatcatcggtgataggggcattaatttgagtgggggtcagaaacaaagagtacagcttgcaagagcactataccaagatgctgatatttatttgctcgatgatcccttcagtgcggttgatgctcatactgggagtgaattatttagggaatatatattgactgcactagcaagcaagaccgtaatttatgtaacccatcaaattgagtttctaccagctgctgacttgatactggttcttaaggatggtcatatcacccaagctggaaaatatgatgatcttctccaagctggcactgatttcaatgctttggtttgtgctcataaggaagctattgagaccatggaattttccgaagattccgatgaggatactgtctcttctgttcctatcaaaagactgacgccaagtgttagcaatatagataatctgaaaaacaaggtgtccaataatgaaaaaccatctagtacgcgtggaataaaagaaaagaagaagaagcctgaagagcgtaagaagaagcggtctgttcaaaggaggaggaggaggggagcgaggaagggttatggcttacaggtttacttgtcatacatgggagaagcatacaaagcaactgcacagaagctgtttgtaaagatgctaaggtgtgtttttcgagcgccaatgtcattctttgatactacaccatctggtcgaattttgaaccgagtttctgtagatcaaagtgtcgtggaccttgatatagcattcagacttggtggatttgcatcaacaacaattcaactacttggaattgttgctgtcatgagcaaagtcacatggcaagttttgattcttatagttcctatggctgttgcatgcatgtggatgcagagatattatattgcttcatcaagggaattgactaggatcttaagcgtacagaagtcgccggtgatccatttgtttagtgagtcaattgctggtgctgctacaatcagaggttttggtcaagagaaacgattcatgaaaagaaatctttaccttcttgactgttttgctcggcctctattttccagcctggcagctattgaatggctgtgcctgcgaatggaattgctctcgacctttgtcttcgctttttgcatggcgatactagtgagcttccctcctggcacaattgaaccaagtatggctgggcttgctgtcacttatggacttaatttaaatgctcgcatgtcaaggtggatactgagcttctgtaaattagagaatagaatcatctctgttgaacgcatttatcagtattgcaagcttcccagtgaagcaccactcatcattgagaatagccgtccctcatcctcgtggcctgagaatggaaacattgagctggtcgatctcaaggtacggtacaaagatgacctgcccttagttctacatggaatcagttgtatatttcccggtggaaaaaagattgggattgtggggcgaactggaagtggtaaatctactcttattcaggcccttttccgcttaattgaacctacaggagggaaagttatcatcgatgacgtcgatatttctagaattggcctgcatgatctgcggtcacggttgagcatcattccccaggaccctacgttgtttgagggtactatcagaatgaatcttgatcctcttgaagaatgtactgatcaggaaatttgggaggcactagaaaagtgtcagctcggagaggtcattcggtccaaggatgaaaagctggacagtccagtactggagaatggagataactggagtgtgggacaacgccagcttattgcattgggtagggccctgctgaaacaggcaaaaattttggtgcttgacgaggcaacagcatcagttgacacagctacggacaatcttattcaaaagattattcgcagtgaattcaaggattgcacggtctgcaccattgcacaccgtatcccgacggttattgatagtgacctagtcctggtgcttagtgatggtaaaattgcagagtttgacacaccccagaggctcttggaggacaagtcctccatgttcatgcagctagtatctgaatactcaactcggtcaagctgtatatag

SEQ ID NO: 4067 - DNA, 1146 bp, Oryza sativa
atggccggcggggtgtcgtccgtggaggtcgtgaaggacggcgccactgggctggagaagctcgtcctgcgcgaggcccatggctgctccgtccaggtcgaccccctctcctcaaccctagctttcagttgcaatgtggataaattgtttattgggggtggacaccatgatgctattgttagctgtggttttgattggccttttgccattattttaagtattctcggcaacgttatattagataaccttacaggttccttattatctttttttttcctcagaaatggtcaagtatttctgtacggaggccaagtgatcttttgggaaaatgaatatcgagaacaactgctctttgttagtagaaaggcttatttcaaaccaccaaaggctattcgtgggggcatacaaatttgctttcctcaatttgggaaccatggagttcttgaacaacatggatttgcaaggaaccgattatggagtgttgatgaaactccccctccttttccagctaccacttcaaactgtcatattgacttgatactcaagcagtccccagaagatttgaagatctggccgcatagttttgagtttaggctgcgagttgctcttagccctacaggagatctgatgctcacatctcgaataaaaaataccaatgcagatgggaagccattcaaatttggattttcatataacacatatttttcagtctctgacatcagtgaagtacgggttgagggtttggagaccttggactacattgacaacctgcaatgtggaaaacgttgtactgaacaaggagatgccgttgtattcgaatctgaagcggagaaggtatatttgagtgctccacccaagattgtgatcattgaccatgacaagaagagaacttttgagttaaggaaagagggacttcctgatgttgttgtttggaacccatgggacaggaaagcaaaaacgatactggattttggggaggaagagtacaaatgcatgctatgtgtaggggctgcaaatgctgagaagccaattacattaaggcctggtgaagagtggcaaggaaggcaagagatatctgttgttccatccagttacagcagcggacaatgggatcctgaaataattcatcggatacaggacatctga

SEQ ID NO: 4068 - DNA, 2442 bp, Oryza sativa
atggcccgaatgcaggcctcacagatgcaaggcaacatctttaccactgagctaaacctagcttcagaggaaccacgaattaagaaacttctggtacagcacattgagacagtacaccattctgaggcagttcaagatgttttgcactctcttctgcattctgacttggatgccaaagagataaagagcaagacaaaggaatggaacaacagaactaatcaagataaaaaacaagaccagctacgatcagcagccagacagaggcatgagagaagagatgtggcagtgccttcttgtgctgttcccacatttttatgcaagttttgttcattaatcctttataggaccttggaagaaatgctcgctttgcacaaatttggaggagtcggaaaggagacaggaatgaagttgatgaatcactacgagaaatatgccatctttatgatgctgtccaagattacctcttttgaagagggtgcaattttatgcaattttcttccacttatacgggaacatttgccatcagctgctgaagaaattgaatcagatattatttcgctggcacaatcggaagattcagatgtttatgacatatatactgtcaaagaggtggatgatgatacaacaatggagggcacatcttcagctccatacccactgttacaagtggacaatggcgatgatgtgtgttatgatgatgacgatccttatgatacagatgattcaaatgcggaggataatccattatatgattatcctgcggagttgtcagaagatgaggatgatgattccaatagcgagaatccattttcagacctagacggttctgatcccgagtatgagaaggaagaggataaagagccaaccatggaggatttaccttcaaatctgggtcagccttctacttctgcatcatctgttgatgctagttattcagccaacaggattgaagattcacagctcttcctctccgtcccagctttaaaccaagctgcgtcttatctggcccagacagcttcatatcttacccagtgcctcccagtatctggttacacagctatttctgacgaagggcaagagctagcgacgctgccacctgcatcaactgctggtggatcctcttttcaggcttcttccgaacagtcagcagactcatctcctggtgaaattgataatactggaagctcatctcaagaaatcacagaacagatggcacctttgcgcgtcttccagaatggggcttcactgtttcaaggtcttgtagaacgtgctcggaaaactgttcgtggctcagccgatgatattggatggcttcagcaggatcaaagcttacctccaactgaggacggaactgccagattcttggaaattcttgatgctgtgaggcaagtttgctgccactttggttgtgaattcgcattttggcaattttctgtgttgacattagcttttctattgtttgcaggcttgtttagtaaccatgggcctctttactttgtcaagaccaaatcatatttctccaagatgggtctggcttgtcacattgccaagattcacagtgagtcttcagtaagtaaaaatgcaagggaaataaaggaatatatagaagaaatatactggggatcgaagaagcgggtgctacttctcggccatagcaagggtggtgtagatgcagcagcagccctctccctttactggccacaactgaaagacaaggtcgcaggtttggctttagctcaaagcccatatggaggaagcccggttgcttcagatatcttgcgagaaggccagcttggtgattatgtcaggttacgtaaactcatggagattttggtatccaaagtccttaagggtgatcttcaggctctggaagacctgacatatgagaggaggaaagaattcctgcggcagaacccattgcctcctgaggttcccattgtctcattccatacagaggctagcatcaccccaagtgtgcttactgccctctctcatgttgcacacttggagctcccagctgcagctgatgggaatcctactaggatcccagttgtaatgccactttcagctgcaatggcagcatgctcacaacttctggtggcaaggtatggtgagaagagtgatggtcttgtgacaaggaaggatgctgaagttcctggatcagtagtagtccggccagagcggaagttagaccatgcatggatggtttattcttcactcaaagaggaacctagggatcaggcagacacatcacagagttgtgtggctgtgtccaaacttatgctgaaactgcttctgggccacttttttgtttgggtttacagaagctttatatatcaagtgaatctgaaagggaatggtccaacaatagtgttcagaacagctcctgctaggccccatgaggaagtctccattctggagcatgtccatggtgtctgttga

SEQ ID NO: 4069 - DNA, 1218 bp, Oryza sativa
atggcaggcaattcatgcgcggaaacattccctgctctctctgacgaccacctcatctccgccctcacctactccaccgccgaccaccacgacctcgtcgacgctgctcctgcggttgcctcccaacccaacgaggacgtctgggatggcccctgcaccgccaccggcgccgcctgcgagccctgctccctcacgctccacttcctccgcaacacctgcggcctctcggaggatgaggcggccgcggccgccgcgcgcgtccgcctgcgctccaccaagaaggcgcacgccatcgtcgccctcttccgcggcatcggcttctcggccgccgacatcgcccgcctcgtcacctcgaacccgtccttgctctcttaccgggccgacgccaccctcatgcccaagatcgagttcttccgccgcgagctcggcctcaccgacgccgagatccgccgcctcgtcctcgccaacccctaccgcgtcctccgttacagcctcaagcgctgcatccgccccaactacctcatcctcagagacctcctcggcagcgacaagaacgtgaccgctgccgtcttgcagtccacggatctcatccacggggacgttcgtggcatcctcctccccaagatcaagatcctccaggactacggcgccacgaacgatgtcatcgtcaagctggtcaccacgcaccccagggcactcatgcatagggcctcccgcttcgaggagagcttggctgccatgaaggagctcggggtcagaccttcctctggaatgttcccctattccttcgggctctttgccagattgcatccaaggaaatggaagggcaggatggacaatttcttgagcttgggatggacaaaggagcaagtgattgaggcgtttgtgaggcacccgtactgcatgtccgtgtcgaatgacaaggtgaagctcatctggcagtttctcgcgaagaagctcaggtggaccaccgattatgtcgcaaggagcccgatggttctctccttcagctacgataagcgaatcttgccaaggtgcacggtgctgaacttgttggcatcgaggggcatattcaacagggacatcaagacatcccatctggtactgggggagaagaagtttaaggagaagtatgtcaccccttaccaggatgaaattcctgaggtactggaagcttattcttctgtggcagaaagtcgagtccccgtgtataagtag

SEQ ID NO: 4070 - DNA, 2562 bp, Oryza sativa
atgcggcggcatccgctgctccctctcctcgccgccgtccttgtcggcgccgccgtccgcgccgggaagatcgccacggaggtggtcgtgccggacttcgtggcgtcgtacctgctgttcattgacacctacggcgtgttcctccagtccggcggcggcggcgcgttccaggccgtcgtgtacaacccggcggggcagcaggaccggtactacctcgccgtggtgcacgcgccgtccaagacctgcgtctgggtcgccaaccgcgacgcgcccatcaccgaccgcgccgcgccgctgcggctcacggcgaggggatctccgccgaggatcccaacgggaccgtcgtgtgcggctcccgtcgggggcttcttggcgtcggccgtgtcggactcggactacacggtgggcggctaccggctcgacgtgacggcggccgatgcggcgctgacatggaacgggtcactgtactggctcctgtccatcgacgtcaaatccaccagagatcgcgacggcgccgtggcgtctatggcggtgaacggcaccggcctgtaccttctcgccgcggacgacaccgtcctcatccagctccccttgccggacgccaagctgcgtatcgtcaagctgggcgtggaagggaagctggtcatcacaagctacgcttcggcgaacgccacgtcgccgtcgccgacggacgctgggttcgtcgcgccgaacagcgggtgcgacctgccgctctcctgcggcgcgctcgggttctgcgcgcccaacgggaacgcctccagctgcacgtgcccgccgctgttcgcgtcgtcgcatgacggtggctgcacaccggccgacggctccaaggcgatgaccgtcgcctcctgcggcggcgccggtggtgatgccgccccgacctcgtacatcagtctcggcaatggtgtcgcgtactacgccaataggttctcacggccagacatggtcggctccaacgggtcgtcgtgccaagcactctgctccggcaactgctcctgcctcggttacttctacgacgagtcgtccttgtcttgcttcttggtgcagcaccagatcggctccctggttaacgccaactcgaggcgaggcgacatggtcggtttcatcaaggtccagagctcgcagtcaccggggtcgccgagcggttcatcttccaacaacagcacgctcatcgccatcctcctgccgacgatcgtcgcgttcgtgctcgtcgtcgtcgtcggcgccgtcatcgtcgtgtcgtggcgcaagcaagagcggcgcgcggggaggcgggcctcgcgatccagggacgtgcagctccggcgccaccgctcgccggcgtccgactcggcgcaccttgtctacggcaacgacgacgacggcaacgacattgtgatccctggactcccgacccggttcacgcacgaggagatcgaggacatgaccaacagcttccgcatcaagatcggcgccggcgggttcggcgccgtgtacaaaggcgagctccccgacagctccgccgtggccgtgaagaagatcgaaggcgtcgggatgcagggcaagcgcgagttctgcacggagatcgccgtcatcggcaacatccgccacgtcaacctcgtccgcctccgcggcttctgcgtcgagggccagcgccgcctgctcgtgtacgagtacatgaaccgcggctcgctcgaccggacgctgttccggccggccgccggccagccgctcgagtggaaggagaggatggaggtggcgatcggcgcggcgagggggctcgcgtacctccacttcggctgcgaccagaggatcatccactgcgacgtcaagccggagaacatcctcctcgccgacggcggccaggtgaagattgccgacttcgggctcgcgaagctcctcacgccggagcagtcggggctcttcacgacgatgcgcggcacccgcgggtacctcgcgccggagtggctcaccaacacggcgatcaccgaccgcaccgacgtgtacagcttcgggatggtgctcctcgagctcgtgcgcggccgcaagaaccgcagcgagcacgtgagcgacggcgccggcgccgccaccggagacgactccaactcctcgaacgggacgacgggcagctcgtcgcgcggcgcccggagcgattacttcccgctcatggcgctggaggggcacgaggcggggcagtacgccgcgctggccgacccgcggctggaggggaaggtggtcgccggcgaggtggagagggtggtaaaggtggggctctgctgcctccacgaggacccgcagctgcggccgagcatggcgatggtggccggcatgctcgagggcaccatggaactgtgggagccacgcgtgcagtcgctcgggttcctccggctctacggccgggggttcgccggaccggccgacggctcgggcggcagcggcggcggcatcaagcaagccatggcgggttccaatggggaccacacaaggtcggggacgacgacggtgacgacgatgagcgggtggccgtcgtacatgtcgtcgtcgcagctctccggtccaagatag

SEQ ID NO: 4071 - DNA, 2175 bp, Oryza sativa
atggcggacagtaacgccggcggcaacaacagtagcggtgccgcgaacaacgccgaggtccagataccgatcccagctccatccaaggctgaagctgcagcagctccggaaacaccagcaggcaagccatttcgatggtgggcgatggtggcagtggacgtcttcttcctcatcgccggtcagacatcggcgacactgctgggcagatactactacacccaaggcggccgcagcaagtggatatcggcgttcgtgcggacggccggcttcccgatactgttcttcaccctcttcttcttcccctcgaagtcaccgtcctcctgcaccaacactcccatggccaagctcgccgtgatatacatcgtcctgggcctcatcatcgccgccgacgacatgatgtacactggtggcctcaagtacctccccgcttcgacctactcgctcatctgtgccagccagctcgcgttcaatgtcgtcttctcatacgtgctcaactcccagaaggtcactcctctgatattcaactccgtcgtgctgctcaccatgtccgcttcgctcatcggagtcagcaaggagtctcagggggtcaccggcgtctcgggagggaagtatctgctcggtttcgtgctgacgctgggggcgtcgtgcacctactcgctgatcctcgcgctgatgcagctcaccttcgagaccatcatcaagaagcacaccttctcagccgtcctcaacatgcagatctacacggcgctcgtggcgacggccgcgtcggtggtcgggctgttcgcgagcggcgagtggaggtcgctgaggggggagatgaacgcgttcaggtcggggcagttctcctacctgatgacgctgctgtgggcggccgtgtcgtggcaggtggccaacatcggggtgctcggcctcatcttcgaggtgtcggcgctcttctccaacgtgatcagcacggtgtcactgccggtcatcccgttcttcgcggtggtggtgttccacgacaggatgaacggggttgttcgtcagataaaaactagtgtccgaggccaagaagacgtggtagcagagtctgacaagagcacgtctcgagcagatggaactgcggcggcggcggcggcggcggcgccgctgccgcctgtgtccagccagcggctgcggtggtgggcsgtggtccttgccaacatcgtgttcgtcctcggcgggcagagcgtggccacgctcctcggccggatttactacgaccagggcggcggcagcttgtggctggcgacggtggtgcagtcctgcggcgcgccgctcgccgtcccactgctgctctacttccggcggccagaggcctccccggtggcacgtccgccgctgctcaagatcgctgccatctacgccggccttggcgtcctcctcgccggcgacaacctgatgtactcctacgcgctcctctacctgccgctgtcgacgtactccctcgtctgcgccacccagctctgcttcaacgccgtcttctcctacttcctcaacaaggagaggttcaccgcgctcgtgctcaaatccgtcgtgctgctcaccttctccgccgcgctcgtcggcgtgagccactcctcggaggagaccaacagcagcgtcccggagggcaagttcgcgctggggttcgtcctggcgctgtcggcgtcggcggcgttcgccctgatcctgtccctgatgcagctcacgttcgacacggtgctcaggagcaacgcggcacacgccgtgctggagctgcagctctggagcaacgccgccgcgtcgtgcgtgtcggtggccgggctgttcatctccggcgagtggagctccctgacggcggagatggacgggtacaagaagggcgaggtggcctacgggatgacgctggcgtggacggccatctcgtggcagctcgccacgatgggcatggtggggctcgtcgcgacggtgtcgtcgctgttcacgaacgtgatcagcacggtggggatgccgctgtcgccgatcatggcggtgatcttcctcggcgaccggatggacggtgccaaagtgatagccatgctcattggcatctggggattcttgtcctacgtttaccagcactacctcgatgacgccaagagcaagaacacagctgggtcagctgacgtcacacaaacttcagaagcaaaactctga

SEQ ID NO: 4072 - DNA, 417 bp, Oryza sativa
atggccggcaagaaggtgcaggtttgtgcgctgttccttgccctcaatgtgctcttcaccatgcagatgggtgcagtagtgcaggcatgcgagccctactgccccacaccgacgccgccggtgacgccgcctccgtcgccgccgtcgggtggagggaataagtgcccgatcgacgcgctgaagctgagcgtgtgcgccaacgtgctcaacctgctgaagctgaagatcggcgtgccggagagcgagcagtgctgcccgttgctgggtggcctcgtcgacctcgacgccgccgtctgcctctgcaccgccatcaaggccaacatcctcggcatcaatctcaacatccccgtcgatctctctctccttctcaactactgccacaagacctgcccctccgacttcacctgccctctctaa

SEQ ID NO: 4073 - DNA, 378 bp, Oryza sativa
atgggcggcggcaagaataaggtgcagatgggtgcagtgcaggcatgcgagccctactgccccaccccgacgccgccggtgacgccgcctccgtcgccgccgtcgggtggagggaataagtgcccgatcgacgcgctgaagctgggcgtgtgcgccaacgtgctcaacctgctcaagctcaaggtgggggtgccggcgagcgaggagtgctgcccgctgctgggggggctcgtcgacctcgacgccgccgtctgcctctgcaccgccatcaaggccaacgtcctcggcatcaacatcaacgtccccgtcgacctcgtcctcctcctcaactactgccacaagacctgcccttccgacttctcctgcccactcatctga

SEQ ID NO: 4074 - DNA, 1455 bp, Oryza sativa
atggaaggcaacaccggcggcgttcgggtcgtgtcacggcgcgtgatccggccggagttgccgccggagcatgagacgacggtgcacctgacgccgtgggatctccctctgctcaccgcggagtacatccagaagggcgtcctcctgcccaagccgcccaccggcggcgagcacctcgtcaaacacctggcgtcgtcgttcgctcgcgcactcggccgcttctaccccttcgccggccgcctcgccgtggccgaggtggaggacggagcgtcgcctccgagcagcatctccgtgttcttgcgctgcaacgacgaaggcgctgagttcgtccacgccacggcgcccgacgtcgccgtcgccgacatcgccgcctcgctgtacattccgcgggtggtctggtccttcttcccgctcaccgggctgcttcccgcggtcgctgcggcggactccctgccggttcttgccgcgcaggtcaccgagctctccgacggcgtgttcatcgccatgtcgctcaaccatgtcgtcggcgacggcaccaatttctgggagttcatgaacacatggtcggagatcagtcgaagcagaagcaaactggacatctcgccgtcgccacctctggtggtgaagaggtggttcctggacacctgcccggtgccgatccctctgccgttcgccaagctcgagcacatcatcccgcgacgcgaccacccaccacctccattgcaagagtgcttcttcgctttctccgcggagagcataaggaagctcaaggcgaaggcgaacggcgagatcgccggcgccgccgccaccatctcctccctccaggccctgctcgctcatgtttggcgctcggtgtcgcgagctcatggcctcacgccgcgccaggagacggcgtacgtactggtcatcggttgccgggggcgcgtgagcggcatctcgccggggtacgtggggaacgccgtcgtgcccggcgcggtgaggctgacggccggcgaggtcatggagagagggctcgggtggacggcgtggcagctgaaccgcttcgtggcgtcgctcgacgaggccgccatgcggggcgcgatcgcgccgtggccgcgggcgccggagttcgccaacttcgcgaaggcggcgggaggcaccgccgtccacacggggagctcgccgcggttcgacgtgttcggcaacgacttcgggtgggggaggccggcgagcgtgcggagcggcggcgcgaacaagttcgacggcaaggtgacggtgtacgaggggccgggcggtgccgggagcatgtcgctggaggtttgcctggctccggcggcgctggggaagctcgtcgccgacgaggagttcatgggcgctgtgaccacgccctctattaatagaaattttggtcaagcattttatgcaatcacaactaattggacagtcaatgaggcatgcaaggacatgaaaggttga

SEQ ID NO: 4075 - DNA, 1670 bp, Oryza sativa
atggcggaggcggcggccggcggcgaggtgcggcggcgaggggggtgctgcggcggcgggggaggcggcggggggttgttcccggaggagtcgttcgcgagctggggcgcgtacgggagggcgctgatggagacggggccgcggctggtggagcggccgacggcgaggtcggcggcggcggtggaggtgaacgaggtgagggggcggagcggcgcggagatgaagaggaacctgacgtggtgggacctcgcctggttcggcgtcggcgccgtcatcggcgccggcatcttcgtgctcacggggcaggaggccagggacgccgccggccccgccgtcgtgctctcctacgccgtctccggcgtytccgccatgctctccgtcttgtgctacaccgagttcgccatcgagatccccgtcgccggtgggtcgttcgcttacctgcgagtggagctgggcgacttcgtggcgttcatcgccgccggcaacatcctcctcgagtactgcatcggcggcgcggcggtggcgcgcgcgtggacgtcctacttcgccaccctcctcaaccaccgccccaacgacttccgcatccacgccgcctccctcgccgccgactactcccgcctcgaccccatcgccgtcgccgtcatcgccgtcgtctgcgccctctccgtcctcagcaccaaggcctcctcccgcttcaactacgccctctccatcgcccacctcgccgtcctcgtcttcatcgtcaccgccggcctctcaagggccaggctctccaacctcaccgccgacttcgcccccttcggcgcccgcggcgtgttcgcggcgtcggcggtgctcttcttcgcgtacgtggggttcgacgccgtcagcaccatggcggaggagacccgggacccggcgagggacatccccgcggggctcgtcggcgccatggcgccctaccgcgagatcgaccccgacgcgcccttctccgtcgcgttctccgccgccggcatggggtgggcmaaggctggggacgccggtgaacgccacggtggccatgctcgccgcgacggcggccatcgcgctgttcaccgacctcggcgtcctcgcaacctcctctccatctccacgctcttcatcttcatgctcgtcgccgtygcgctgctcgtccgccgctactacgccaccggcgagacggcgcgcggagaccggaacaggctcgccggctgcctcgccgtgatcgtggcgtcgtcggtcgcgacggcggcgtactgggggctgggcggcgacggcggcggktggscggcgtacgcggtggccgtgccggcgtggctcgcggcgacgctgttcctgcagctgagggtgccgatggcgaggacgccggagaagtggggggtgccgctggtgccatggctgccgtcggcgtccatcttcatcaacatcttcctcctcggctccatcgacggcaggtcgttcatgcggttcggggtctggacggcggcgctgctcgcctactacttcttcttcggcctgcacgcctcctacgacaccgccaaggcgtcgccgccgaggtcgccgccggcaaggtggaggaaggcggcagcaagccggcggtcggcggcgccgccggcaactgaaaaaaaagttactattatactattactatccactgaagttatctatgtgta

SEQ ID NO: 4076 - DNA, 1608 bp, Oryza sativa
atgggagagcccctcctcaccaccctgtccatggagaacaccaacagccatccctgcacccgcctctccatggatcccgccgggtcgcacgcggcctcgggtgactcctccggtggcggtggaggtggcggcagcaccggtgccggtggtggtggtggtggtggcggtggtgacagggaattgttcatcattccgcggcgtgaatctgcgcatccaggaccaccggacattaacctgcccctttctgcagacccctcaccaccaccgccgccgcatccgccgtcgtggggtatcgaccagttcgacatgcttgatgtcggtctcggcacgcagacttatgagtctgaggttgcgctcacgcttccaaagttgactggcaatggcaacactgcggttggcgtcggtgcgaggaagtgtgccaagaggggggacagcatttggggtgcatggttcttcttcaatcactacttcaaacctgcacttgtggaaaagccgaagggcaaggtgacacgggactcttctgggagcgtttcgggctttgagaagtctgatcttcgccttgatgtcttcctggtgcagcatgacatggagaacatgtacatgtgggtttttaaggaacggcctgacaatgccctcgggaagatgcagctccggagcttcatgaatgggcattccaagcatggtgagccatcctttccattcagtgcagataagggctttgcaaggtcacaccgcatgcaacgaaagcactatcgagggctgtccaacccacaatgccttcatgggatagagattgtgagttcaccaaatctgtcagctgttcctgaagctgaaatgaaaaggtgggcggaacttacaggaagagaacttaatttctcaattcctcctgaagcaagtgactttgaatcatggaggaatcttccaagcactgatttcgaacttgataggccactgccactgtcatcaaagattacacatggctctcacagtcacaaaaaggcactgaatggttcaggtcttaacctttctacgccaccatcatcagacgatgggatggacctttcaccaaaatgcgccaagcgacggaaggacttctttgctcatggtgcagatgaggattgcgtgatggcaaataattcttgttctgacagagagcaagagatagaagttcacacaggtgagccgtcatggatgcatgagttcactggtgtagcaaaacatgcaagtggacctgttacggctgccaagacaatatatgaggacgatgaaggctacttaatcatggtgagcatgctcttctctgatcctcacagtgtcaaggtctcttggaggaacacattgacacatggcattgtgaagatatcgtgtgtgagcactgctcgaatgccctttgttaagagacatgacaggacattcaagttgactgatcctttccctgagcactgccctcctggagaatttgtgagagagatacctttggctacaaggattccagaagatgcaaagctcgaagcgtattatgacgagactggcactggactggaaatcatggtccccaagcaccgagttggacccgaagagcatgaagtccaggaaagtaacaagtga

SEQ ID NO: 4077 - DNA, 927 bp, Oryza sativa
atgccatgctctgaattaattggatcagggtttgcatctgagcaaggtggcatgtccaccgatgcaatcaagagggcattccatgccacggaggaggagttcttgcacatggtcaagcgatcctggctcaagcagccacagattgcctcggttggttcatgctgcctcgtcggagcaatcaccgataacgttctatatgtcgccaatttaggggactcgagggccgtccttggccgtagggggcctgatggtcgggaggtagtggctgagagactatccaatgaccacaatgttgcagaggaggaggtcagaaaggagctcactgagcagcatcctgatgattcacgtatagtcatctatacccgaggagtttggaggattaagggcatcattcaggtttccagatcaattggagatgtatacctgaagaagcctgaatttgctagagaccctatattccggcaatatgtttgttccattccattgaagcgacctgtcatgacggctgaaccatcgatcaaagaacatcagttgaggcagcaagacttattcttgatatttgcatcggatggtctgtgggagcagctaactgataaagcagcggttgatatcgtcttcaagaatcccagagcagggatagcgaagcgattggtgcgagcagcgctgactgaagcggcgaggaaacgagagatgagatacactgatatcaaacatatagagagaggcagcaggcggaatttccacgacgatatcacagtcgttgtggtctatcttgaccatcacaagcatggtgtgcggcctaatttgggtaacagaaacagtttccggttcaccaatgcgccggttgacatcttctccggcagctcagaagaggtggatcaccaccctctcaggctgaatcttgcaatggatggtgctgtgggttag

SEQ ID NO: 4078 - DNA, 2784 bp, Oryza sativa
atggcggcggcggcggcggcggcgagcaggttcgcggcggcgctgttccacaggaggacgcggagggtcacgtcggcgctggcgtacgccgtcctggagtggacgctcatcgcgctgctgctgatcaacgggctcttctcctacgccatcgcccggttcgccgcctacttcgggctcaggccgccgtgcctcctctgctcccgcgtcgaccgcctcttcgagaaggcgacggaggaggaggatggcgcgcggtggctgcggagcgtcctctgcggcgcccacgcggcggagatctccgggctcgggtactgcctgcaccacggtcggctcgccgacgccggcgacatgtgcgaggcctgcctgtcttcttccaaggaggagagcataaaagatgcaggggaggagagcgccacggtgtgctcttgctgctacgccgttgtgaaaacctcctcgcgcgagctgccggataaaggacaaggccaatcggaggagaagacaaccgaagaagacagaaaccaagggtatgttccattggctcaagaagagcacggcgaagaagaagaccaaggatatgttattttggctcaagaggagcacgacgaggaaaacgaagaagagcatggagaatttcaggaggaagagcggcaagaagaggtggacgataaagacgagcaagaggagaagatggccgccgtccaggacgagtccttggaagtcatggctgtcggagaagagatcgagctcgacggcgagcgcttgctgtcggtggcagccatcgatgagatgacaatcgccgacgagtcaggtttgcatcaggcgtgctgtgaaaaggagaaagaaatggaccatatcgacggcgagcacgagttgagagatcttgatatcggagttgttcttgaggagaagaggatgttggattcttcggctgcaacggcggatgtcgcgattgaggacgactttgttgtgcccgttccttgtgcagagcctgtcacaagcccacctgatcctcatgagaatatcatcccccacgatgatgaattggttattgaagatgttgctcaaattggagatgccactgctgaagaagaaacagttgaagaagaagaagttgagacagctgaagaagaagaaattgttgtgcccgaagtcattgaagaagtttctgaagatgacaatcaattgtccagtcttgtcatctggtatgccagtctcatcgttttcctttcagtcactgaagcagttcctgaagatgacaacagatcagcagaggtggacactaactgtgaggtatcaatcggaagtgagatatgcgaacgggagcaagatgaccatgtcgtgccgtttcatgaatcagcagagtttgaggagccaactgatccattggcgtacccagatgagcagccactgccattggaaagtctccatgaaacagacccaactgcgcaagaagcaagtgaaaccgaacaggaggaggaggcgacggcgagccagagattagaccagccaccaaacgaacagaacgaggttgaagacgacaaggcacctgagacaccgacctacagcgttgccacacaaatctcagacaaaaagtttttgcttgagaggaaacggtcactatccttatctttggacgggagtgtggcaagcgagatggagttgtccgagccttccaccgttgatcagctgaaatcggcgctgcaagcggagcgaaaggcactcagcgcattgtactccgagcttgaggaagagaggagcgccgctgccatcgcgaccaaccagactatggcaatgatcaacaggttgcaggaagagaaggcagcaatgcagatggaggctctgcaataccaacggatgatggaggagcagtcggagtacgaccaggaggcgctgcagttgctgaacgagttggtcaccaagagggagagggagaagcaggaactggagagggagctggatatgtgcaggcagaaggtgctacactacgaggacaaggagaggaggagaatggcaagcttcaaggctaacgggcatagccccaatggtaatggcacttctgtgtcatccagtggtgaggacagtgacgggcactccgatgaatactgcgaactaggtgagtccccggatggcagcaatcttcagagcccgtctcatgctgcttttagccccaggacagatcaagaaaacaagaaacatctggtggctcttgatgactccttgacgtactttgagatggaaaggctatctatcttggaagagctcaagacattggaggagaggctcttcacattggaagatgatgacatcaacgacaccagtgctgctgtgggccgatcttcagatgaatatgaactgtcggctgacggtctccattctccgggaaatggtgatatcaccagtgacaaggcaaagtttgaaggtcgaaattctatttgcaggggaaagagtcttcttcctctattcgatgcagctggagatgagagcagtgatcagacaccatctgcaagggttggggatgtgcaagttgataattcgacaaaaccggtttctgtgcttgtaaaagaacaggagaggctggcaataatagaggaggttgatcatgtatacgagagactgcaagcactagaggcagacaaggagttcctcaggcactgcatcaagtccctgaagaaaggtgacaggggcatggaccttcttcaagagatcttgcagcatcttcgcgaactccggagcgtggaacttcatgttaagcatgctggtgatgcccttgctgcaaattcagcatag

SEQ ID NO: 4079 - DNA, 1092 bp, Oryza sativa
atggagcgggtgtcgtgcgtgccgctgcttcggcggctgcttctcttggccgcggccgggctcgcgggcgccgagccgcaggtgccgtgctacttcgtgttcggggactcgctcgtggacaacgggaacaacaacaacatcgcgtcgatggcgcgggccaactacccgccctacggcgtcgacttccccggcggcgcgaccggccggttcagcaacggcctyaccacggccgatgccatctctcggcttctgggcttcgacgactacatccccccgtacgccggcgcaacaagtgagcagctcctyaccggcgtcaacttcgcctctgctgcggccggaatccgggacgacactggacagcaactgggtgaacggatcagcttcagcgcgcagctgcagaactaccaggcggccgtgcggcagctggttagcatcctgggcggcgaggacgccgcggcgaaccgcctgagccagtgcatcttcaccgtcggaatgggcagcaacgactacctcaacaactacttcatgccggcgttctaccccaccagccggcagtacacaccggagcagtacgccgacgtgctcatcaaccagtacgcgcagcagctcaggacgctgtacaactacggggccaggaaggtggcggtattcggggtagggcaggtggggtgcagcccgaacgagctggcgcagaacagccgaaacggcgtcacctgcatcgagcggatcaacagcgcagtccggatgttcaaccggagggtggtcgtcctcgtcaaccagttcaaccgcttgttgcccggcgcgctgttcacctacatcaactgctacggcatcttcgagagcatcatgcgcacgccggtggagcacgggctggcggtgacgaacagggggtgctgcggggtggggaggaacaacgggcaggtgacgtgcctcccgtaccaggcgccgtgcgctaaccgggacgagtacctcttctgggacgcgttccacccgacggaggctgccaatatcttcgtcggccggagggcctacagcgcggcgatgcggtccgacgtttacccggtggacctgagcacgctcgctcagctctag

SEQ ID NO: 4080 - DNA, 663 bp, Oryza sativa
atggccgccgcctcccctcccctcctccccaccaccgtcctccccgccaacgccaccgccaccgtctcccccgcccccacctccgtctcctccgccgacgccaaccctgccgccacgcgcgccttcctcgcccgcctcctcgactccgtcaagcgcgcgctctcgggggcgcgcccctggccggagctcatcgaccgcagcgccctctcccgcccggaatccctctccgacgccggcgcccgcctccgcaagaacctcgcctacttccgcgtcaactacgccgccatcgtcgccctytccctcgccgcgaccctcctcgcccaccccttctccctcgccgcgctcctcgccctcctcgccgcctggtgcttcctctacctcctccgcccctccgacgcgcccccgctcgccgccttcggacgcaccttctccgacagggagaccctcgggggactcatcgtcgcctccgccttcgtcgtcttcctcacctccgtcggatccctcatcttctccgcgcttgccctcggcgccgccattgtctgcgcgcacggcgcattccgcatccccgaggacctcttcctcgacgagccagaccaggccaacggcgccgcctccgtcaacctgctctccttcatcaccagcgccaccggaggccgcgtctga

SEQ ID NO: 4081 - DNA, 2157 bp, Oryza sativa
atggcggcgacctcgccgccgatgacgtctgtcgccgccgccgcgcttgtcctaaccccttctccagctctcaacctgctgctcctcctcctcggtggaggcccacgcggttgccgcgggaagcccggtgtcacggaagttgtagccgagaaggagacttcgccggatggcgaagaggaggaggtgcgcgggcgcggatggttcatggttgatgagattggtatggacatcctcaccatcgccttgcctgctgtgctcgccctcgccgccaaccccatcacggctctcgtcgacaccgccttcgttggccatgtcggttcgactgaacttgctgccgttggagtatccatttctatcttcaatctggtatgcaagctgctcaatgtgccattgctcaatgtcaccacatcctttgttgccgagcagcaggcagtggatgcagctgaaatttttagtcctcgcataggaaatgaaatttcaataccccaagagaaagcaagtaaacaaaggaggtttcttccagcggtctcaacatccttggctctagctgctggcataggattgatggaaatggtggcactgatacttgggtctgggacactaatggacatcgttggtatacctgtcgattcagcgatgcgtgtacctgcagagcaatttcttactttaagggcatatggtgcacctccagtcatagtagcacttgcagcacaaggtgcttttcgtggattcatggatacaaagacaccgttgtttgccgtgggtgttggtagcctagtgaatgcattgctggatgccatatttatttttccacttggtctaggtgtaagtggtgctgcattggcaactgtgacttcagagtacttgacagcatttatcctcctttggaagctgaacaacaaaattgttctgctctcatggaatatcattggtggagacgttgtccgctacctaaaatcaggtgcactgctaattgcaagaaccattgcggtagtcctgacattcacactgtcgacatccctggcagccagggaagggtctgttccaatggctggatatgagatatgtttgcaagtgtggttaacaatctctctgctcaatgatgcactagctcttgctggtcaggctctactcgcaagtgaatacgcaaaaggaaactacaagaaggcccgcgttgtcttatacagagttctccagattggaggcataactggtgtagcacttgctacaatcttgttccttgggtttggatatttgtccttgctgtttacagatgatccagcagttttagatgttgcccaaactggagtctggtttgtcactgtttctcaaccgataaatgctgttgcttttgtggccgatgggctctactgtggtgtttctgactttgctttcgcggcgtactctacagttcagatttctattcttgtcatattccattgcattgttttatttgctggagctgtctcatccgcagtactgcttgtggccgctcctaagtttggtcttggtggaatctgggctggccttgctctatttatgagtttgcgagcaattgctgaccacaaagatacacagcatgaacaggaaagctatgggcctatcgtatctggaggcccaataagctccaaggatagagccggagtgggaggcagggcagcagaggcgcagccgagcagaaagaacatcaggaaggagaggctgaggcctgagggagacgacgacgagggaatcaagggattcggaatcggaatcggagaaggaaagatgccttgcctcaacgtgtccaccaacgtgaacctcgacggagtggacacctccgccgtcctcgccgacgcatccaagaccgtcgccaccatcatcggcaagcccgaggcctatgtgatggttgttctcaagggttcagtgcctatggcatttggaggtacccaggagcctgccgcttatggcgagctggtttccattggtgggctgaaccctgatgtcaacaagaagttgagtgctggcattgcctctatcctggagtcaaagctatccattcccaagggccgcttctacctcaagttctacgattccaagtttagtttctctctgcagtttggcagtaaacccttgccacagcacgtatactcttccatgctaattatgagcaactga

SEQ ID NO: 4082 - DNA, 1350 bp, Oryza sativa
atgcgccgcttstcggccgccgccggggcgcggcagcagcagcagcagggggaggccgtgtccgaccgcgtcctccgcttccgcggggtcctcgtcgtggtgctcgcgccggtgctcctcatctcgctcgtgctccttctcatgcctcgcgcgcccgcctccgctaccgtcgagggctctgccggtgagctcgtcgccgctgccggacggaggtggggcccccgggccgtcagcggacttggggacggatccaccaggtacgctgtgatatttgatgccgggagctccgggagccgcgtgcacgtgtactgcttcgatgggaacctggatctgctgcctattggaaaggaaatcgagctgttcaagcagaaaaaaccaggcctcagtgcctatgccatggacccacaagaagctgctaagtcacttgtttctcttctagaggaagctgaaaaagtaattcctgtggaattacgtgagcaaactcctgtcagggttggggctactgcaggcctgagagcattagggactgaaaagtctgaagaaattttgcaagcggtaagggatcttcttcaagacaagagctctttcagatcccaaccagaatgggttaccgttctagatggatctccaggaaggtgcattccagttaccatcaattatctgttgggaaatttgggaaagccttactcacacacggttggagtggttgatctaggtggtggttctgtccaaatggcttatgccatctcagagaaggatgcaggaaaggctcctccagttgcagaaggtgaagattcatatgtgaaggagcttctacttaaggggaacaacatattatctttatgttcacaggtacacgtcaaatgttatttgcgttatggattgctggcggctagagcagagatcttaaaagcaggtgaaggcaatgattaccgcaactttgtatcaatttacgttttcttggaaagatggtaccggattctaattgtccttgtaaattgtacacaggacaatacagatatggtgacgatatattcgaagcatcaggccggttttgtaaacccgaaggcaccatttgctaaggttaaaccctcagacttcgaagaagctgcacgacgtgtttgtaaactgaatgtgaaggatgcacaggccacctacccggatgtttcagaggagaacgttccatacctttgcatggatctagtctaccagtacacgttacttgtggatggatttggtgtggatccctaccaggatattacattggtaaagaaggtgccttatagcaattcatttgttgaagcagcatggcccctgggtagtgccattgaggttgcatcttcatcatag

SEQ ID NO: 4083 - DNA, 1512 bp, Oryza sativa
atgctggaatggttgtgttgtatcttctggaccgagtcatgtgccaaacttgacattgttgttctagaaggtgatttcaacaatgaagatgaggagggatggtcgggagaagagtttgaaagtcatgtagtgaaagagcgtgaaggaaagcgccctcttttaactggtgatgtacaagtcacactaaaagaaggtgttggcactgtaggggagcttacattcacagataactctagctggataaggagtcggaagttccgacttggtttgaaaatttcctcaggattttgtgagggtattcgcatccgcgaggcaaaaactgaagctttcatggttaaggaccacagaggagaattgtataagaagcactacccacctgcgttgaaagatgaggtctggaggttagaaaagatagggaaggatggatctttccataagagactgaacaaagctggaatttctacagttgaagacttccttaggcttgtggttcgagatcctcagaagttgcgcagtatccttggaagtggtatgtctaataagatgtgggatattcttgtcgaacatgcaaagacttgtgtcttaagtggaaaatattacatatattattcagacgagaatagatctattggtgctattttcaacaacatctatgcattctgtgggttgatttctggcgagcagttctattcatctgaaagtcttgatgatagccaaaagctctttgctgatgcattggttaagaaggcatatgataattggatgtatgccattgaatatgatggtaaagctctcttgaactctaaaccgaagaaaaaggctgcacccactggacacgttgagacacatcctcctctgagtcaacctgcttcatacgaacaacgcatctcatcagcgagcatgacaggaccatctccagcaggaggaagtggaactggaactgattccatagggtatgatggcaaccaagcagctacacagccatctcaacttcaaagtacatctgccaatgtccctgtgccatacgatgacaccttttcatttttaccgcctagtatgttgatggggtctgataatcaagaaaccggaaatgatggcatgggcctggaactaggccaattgcaacaagcaatttcacagagtcagtcgattcagccagcaaatgttggctatgatgattggactcgaagtcaaaacggtcagttcgctgatgacttcaccgaagatattcgcatgaaaagccaccaaatgctcgagagcgaagacatgcagcagctgctcagggtcttcagcatgggtggagcgtctaccagtttgcaggaagacgccttcggcttcccgacgtacatgccatctccattaccaaaccttgggttcgaaggtgagcgcacccgttcatctgggaaagctgttgttgggtggctcaagataaaggccgccatgagatgggggattttcgtcaggaagaaagctgccgaaagaagggcgcagcttgttgagctggatgattaa

SEQ ID NO: 4084 - DNA, 1130 bp, Oryza sativa
atgcgcctctgctccaagctcgcggcgctgctccggaggtcccgccagttcgcgcccgcagccgccgccgcgtccgggtcagcgacggccgcggccgcgtcggcgaacgggatggaggaggcggccgcgggcccgctgcgggcgcgcgtgtgcatcatcgggagcgggccggcggcgcacacggcggcggtctacgcggcgcgcgccgagctcaagcccgtgctcttcgagggcttcctcgccaacgacatcgccgcgggggggcagctcaccaccaccaccgacgtcgagaacttcccgggcttccccgacggcatcctcggcgccgacctcatggaccgctgccgcgcccagtccgtgcgcttcgggaccaggatcctcaccgagaccgtcaccgccgtcgacctctcgtcccgccccttccgcgtcgcctccggcgacaccgtcgtgcacgccgacgcggtcgtcgtggccacgggcgccgtcgcgcgccgcctccatttcgccggctccgacgcattctggaaccgcggcatctccgcctgcgccgtctgcgacggcgccgcgcccatcttccggaacaagcccattgccgtcgtcggcggcggggactccgccatggaggaggccaacttcctcaccaagtacggctcccgcgtctacatcatccaccgccgcaacgccttccgcgcgtccaagatcatgcaggcccgggccctctccaaccccaagatccaggtcgtctgggactccgaggtcgtcgaggcgtacggcggcgccgacggcggtccgttggccggcgtcaaggtcaagaacgtggtgagcggcgaggtctccgacctccaggtcgccgggctcttcttcgccattggacacgagccggcgacaaagtttctcggcgggcagctcgagctggactccgatggctatgtcgtgaccaagcccggctccactcacaccagcgtcaagggagtcttcgccgccggtgatgttcaggacaagaagtatcgccaggccattactgccgcgggatcagatcgaagaccttcacaggctcaatgcttgtctgaggaaagggtcaggggtaaaaccataacagaatacctttcgttttctggtgatactagcta

SEQ ID NO: 4085 - DNA, 1764 bp, Oryza sativa
atggccggcgctagatctgctccaagtgtcgctgccgcccccttacccatgccgctcccgaggcccagcagcagcggatccactctccagaagctcgttggccctgccgccccttcccttgcgccgttgacgctgagagccgcgtttgtctccttccccgcgctgcttccgaggcccggcactagcggatccgccctcccaaggcctgcccgcgccggattccctcctcggtgccccctctcccatgcctctactgccgcccccttccccacgcagccaccctttccctcatcattgccattgcccagctcgacccgctttggccagccagatccactagcagggaggttgggtcgccagatccggaagccctctcttatgcgaggcggtactgggcggcggtggagagagaagggacgccggagggaggagggagaagggtgggagagaggtgtagagagaagggaggcggaaggacccgagggaagagggagagagccgaagggagtttgtggcgtcctttacctaccgttagcgaaaacccgatttttgctgagctttgggaatcttggaggaggaggaggagcaggggggagcggcaaggcggcggcgtcgtcgttcctgcagctgccgctgtccacggcggcggcggccaccgcgtactacggcacgccgctcgccttgcaccaggcggcggccgcggctggcccgtcgcagtaccacggtcacggtcacccccaccacggcggcggccaccaccacagcaagcacggcggcgccggtggtggggagatctcggcggcggaggccgagtccatcaaggccaagatcatggcgcacccccagtactccgccctcctcgcagcctacctcgactgccagaaagtcggagcgccgccggaggtgctggagaggctgaccgccacggcggcaaagctggacgcccgccctcccggccgccacgacgcgcgcgacccggagctcgaccagttcatggaggcgtactgcaacatgctggccaagtacagggaggagctgacgcggccgatcgacgaggccatggagttcctcaagagggtggagtcgcagctcgacaccatcgccggcggcgcccatggcggcggcgccggctcggcgcgcctcctcctcgccgatggtaaatctgaatgtgttggttcttctgaggatgacatggacccaagtggccgcgaaaacgagccgcctgagatcgacccgcgcgctgaggataaggagctcaagtttcagcttctgaagaagtacagtggctacttgagcagcctaaggcaagaattttccaagaaaaagaagaaaggaaagctgcctaaggaggccaggcagaagctgcttcactggtgggagctgcactacaagtggccttacccctcagagacggagaagattgcgcttgcggaatcgacaggactagatcagaagcagatcaacaactggttcatcaaccagaggaaacggcactggaagccatcggaggacatgccgttcgtcatgatggaaggttttcacccacagaatgctgctgcattgtacatggatggcccgttcatggcagatggaatgtaccgcctcgacggatggttcgaattaaaatcgaaattacttgtgaaattgctggacctggatgttctacttcctagagctgtgaatttwatagtttctggatttggtaatcaggcatgcttggtgaagcatttagaaattatgtatacatttccagatgataattaa

SEQ ID NO: 4086 - DNA, 2139 bp, Oryza sativa
atgggggcgggacacagaggagggagcggcgaacttcgtgagggagcaggagagaacttcggcgaactccctccggcgcaggagggtctccgcggcacccccattccatcacctgccatgaaatacacctttcttctcttcctttgccttgtatcctttgtcacttctagtgagcaccagtttgtcttctccggcttcaccggcagcaacctcgtccttgatggtgccgccaccatcaccgaagatgggctccttgagctcaccaatggcgcgaataatatcgaaggccatgcgttctacccaactccgttgcgctttcgcaagtcgccaaacgacatggtacaatctttctcggtttcatttgcgttcagcatcctccaaaaatatgccaatcggagcaacgatggcatggccttcttcatagcaccaagcaagaacttctctgatgcatcattgcctgcacaatatttgggcctcctcaacaaccaaaacaatggcaatagaagcaacgatttgttcgccgtcgagctcgacaccttccaaaacaaggagttccaagacatggatgacaaccatgtagggatcaatgtcaacagcatgaagtccttggatgcacactatgctggtttctatgaagacaggagtggcatcttcaggaaccttactcttgtcatccatgaggcaatgcaagtttggtttgattatgatggtgatgccaagaagattagtgtcaccttggctcctgccagattggccaagcccaagagacctctactgtctgtcacctacgacctctcaacggtggttgcagattcagcctacatcggtttctcagctgcaactggaggtgtagtcaacacaaaacactgtgttcttggatggagctttaggatgaatggccctgctcaagctattgatatctccaggttgcccaagctgccaaatcttggcagcaagaagtcccattcttctaggatcttggtaatcatatcaccggtggcaaccgctgtattgattttccttgttggtgttctccttgttctctgtgtacggaggcgactcaagtacacagagattcaagaagattgggaggttgagtttggtccgcatcgtttctcatacaaggttctgtatgatgccactgaaggatttaaggataagaacttacttggtgtcggaggatttgggaaggtgtataagggagtgcttccggtgtctaaacgagtggttgccgtgaagtgtgtttcgcatgagtcgagccaaggtatgaaggagtttgttgctgagattgtcagtatcggtcaacttcgacaccgaaaccttgtgcagttgctcggttattgtaggaggaaaggtgaactccttctggtctatgactatatgtcaaacggtagccttgacaactatttgtattgtgatttgaccgagccaacattggattgggcacagagatttaacattgtcaaaggtgtcacgtcaggactactctacctccatgagaaatgggggaagattgtaatccaccgagatatcaaggcaagcaacgtgcttcttgataaagatatgaatgcacgattaggtgactttggcctttcaggattatatgaccacggaaccgacccacaaactacgcacctggtaggcacaatggggtacctagccccagagctagtgttcacaggcaaggcatctcctgccacagacatatttgcctttggcgtattccttctcgaagtcacttgtggacaaaggccactcaacaacaatcaacaagataatcaacccccaatgctggttgattgggtccttgagcactggcagaaaggattactgcctgagacagtagacaaaagattgcagggcaactacaatgttgatgaggcatgtctagtgctgaagctaggtctattgtgttctcacccaatcgccatggaaaggcctaccatgagtcaagtccagagatacctcgacggcgacgcgccgctgccagagttggcaccgtcggagctgaagttcaacatggtggctctcatgcagggccaaggcttcgactcgtatgtcttgccatgtctgtctttgtcgtcggtggtgagcattgaaacctcacccgaggtagacgatgacactgctagtgtttga

SEQ ID NO: 4087 - DNA, 1104 bp, Oryza sativa
atggggcggcttgcaaattggttggatgacagaaccagtaagtcaactccagactacagaatccaggctggatcattcctgctcaagctatggttcaggccaatttttatcattttttttatgcccacttcttcatgtcagccaatgatgtccagttcatacaccttccaagaatctaagcacactccacagtctgcctactcacttaggcacttcgcattagcaaaagccatggggcaacctagggctcaactcctaccctccatgtccatggcagctttgtatctcatcctagccacctccccagtaatcagcgacatgaccgacagccttgacatgctgtggggcaatacacaggtgctctatgacagcactggccaccaaattgtatcactgtcccttgaccgctggactacttctgcattccgctcaaagactaagtatctctttgcgaggattgacatggacatcaagcttgttgccaaggactcagccggcactgtcaccacattatatatgataactgaggggctgtgggacatacatgatgagattgatctcgagttcttggggaacaccaccggtgagccctacaccttgcacactaacatctatgccagaggaacaggtggccgagaaaagcagtaccggctttggtttgatccaacagaagacttccatacctacaccatcatctggaacccgcagatgatcttaatacttgttgatggcacaccaattcggcagatgaagaatcagctaaggaatgatatacccttcccgctatatcaaccaatgaggctgtacgccagcatctgggatgccgatgactgggcaacgcagggtgggcgtatcaaaaccgactggtctcaagcaccatttaccgcattcttccggaactaccaagctaacgcctgcattccgtacaaaactgcctggatttgcagccaagggtctaatgacagcagctggtttacccaggatttggatgaggaagggaagcagaaacttaaggacgtagatgataactacaagatttatgattactgcactgactcaaggaggtacccaaatgggtatcccccagagtgcgggtcacagtag

SEQ ID NO: 4088 - DNA, 860 bp, Oryza sativa
atggggcaggctagggctcacctcctagcctccctgtgggctttctacctcatcctagcaatctccatggtcactggcgacctcaccaatgacctcgacatactgtggggaaactcaaaggtgttctatgacaactccggcaaacagactatctcactgactcttgaccgctggacgacctccgcattccggtcgaagagcacatacctcttcagtaggatcgacatggacatcaagctcgttgctggagactcagctggaaccgtgactactctttatatgataacagagggcctatggcaattccacgacgagattgaccttgagttcttggggaactccactggcgagccgtacaccctgcacactaacctgtatgccagagggaaaggtggcagagagaagcggtacaagctctggtttgatcccactgcagacttccatacctacaccatcatctggaaccaaagaaatatcctaatccttgttgatgacaagctgatccggcagatcaagaacaatttgatgtacagtgtcccgtacccaacctatcagccaatgagggtatatggcagcatctggaatgccgatgactgggcaacaatgggagggcgggtgaagactgactggtcgcaggcgccattcacagcatacttccggaactacagggctatcgcttgccccccacaacagagctccccactctgcggccagagctccggaaattggttcaaccaggagctggacgtgacacggaaacagcaactacaggaggtggatgccaactacaagatctacgattactgcactgacaccaagaggttcaaagataatctccccaaagagtgtacgataaacta

SEQ ID NO: 4089 - DNA, 783 bp, Oryza sativa
atgacgtccaccgttccggcagcggcgacggcgacggcgagccgcctcatcctcgtacacggcgcgggccacggcgggtggtgctggtacagggtcgccacgatgctgcgcgccgcgggccaccgcgtccacgcgcccgacctcgcggcgtcgggcgccgacgcgcgccggctgcgcgackcgcccacgttcgccgactatcgcgcccgctgctcgacgccgtccgcgcgctcgggcggcgagcgcgccgtgctggtggggcacagcctcggcggcatgagcgttgcgctcgccgcggaggagctcccggagagggtcgccgccgccgtgttcgtcgccgcgttcatgcccgactgcgccagcccgcgccccagcgtcatcgacaagcttccatggctggactggatggacagcgtgagggacgaggagcacgctccgccgtcggtgaagctcgggccggagctgatgcggcggaagttctaccagctgagcccggaggaggacttcacgctggcgcagagcctggtccggatgggctccagctacgtggacgacatgcgccgccggccgccgttcagcgaggcccgctacggcgcggcgcgcaaggtgtacgtggtgtdcggggaggacctggccatcgtggaggcctaccagcggcggatgatcgccgactgcccggtggaggaggtgagggagatcgccggcgccgaccacatggccatgttctccgcgccagcggcgctcgccggacaccttgccgacgtcgccaacacctacgcctga

SEQ ID NO: 4090 - DNA, 3147 bp, Oryza sativa
atgggtggcggtggcggcggcggcgatgagggagagctggaggacgagcttgatgccctcctcggaaccggtggcgctggcgcgcgtcggcgaggtgaggacgcgggagagagggaacgggagctcaacatgttcaggagcgggtcggcgccgccgactatagagggttcgctgaacgccatcagcgggctgctccgcggcggtggagaggcagccgttaccgttgcagcgattcccgacgctgagacgttgaacgggcatggtggtctcctctcggaggatgagctccgggctgacccggcctatctatcctactactactcgcatggcaatctgaacccaaggttgccaccgccggtgctatccaaggaggactggcggtccacacagagactgaaggcgggggtggttggaggaattggtgacggaaggaaggtatcgccggaggagactggacatgagccgacggtggggaggcctgtgttctcgcagaatgttggttttgatcaggaggaggctgcaaggaatgatgtaggtggtgctgcagagtgggtggatggtggaggtgatgggctgattggtttgtcgcttgggcggcagcgcagctttgctgatatccttcaggacaatattggccgcagaactcctgcttcagagcatccctctcgtgcagttagtcgcaattcttttcttgacaatcaggaactactaaattctgctgatagccagtactccatgcataatgatattctggaagcacaacgtgctgtcggaaatgtgcaaaatgtcagtggccttcccagtattaatgcatccgcatctcaaacttttgcatctgttctgggttcatctatttcaaggaatgccacaccagattctcattatgtccctagggtccctagtcctggccttccacctgtcggtgttaggattaattctaatgagaagaagctgaattgctcatcatcattcaacactgcatcttcaaaagcagttgagcctgatgatattttagctgcaatatcaaacatgaacatgtcaaaagatggtactttgggtgacagtaacagcattagtcaatcaaagttccaaagtgagataagtgaccaccagaatatttctcttgatccaaaagctctccaagttaataagaatcagcattcgctgatgttggaagctgatactgattatttgggtataccaccaatttcacaaccttcaaatccttccttttctgatattaacaagaatgtctcaggtttagcgaacataagaaattctactaacacacgtatagatggacacgcggagatgcaaaggtcttctactttgtctactcggtcatatcagaagtccccaacatcttccaatgcgagcccaggtggttctcctgctcaacaccagaatattgacaatataaattcagcctttttgaactatggactcggtgggtatccactcagcccgggtttgccttctatgatgatgaactgtatgggctctggcaatatgcctcctttgttcgaaagtgcagctgctgcatctgctatagcttcattcggggcagattcgagaaaccttggtaacaatattttgtcgtcacctaccttaagtctatctgatgtgcataaccttggcagaactggtaaccaaacagccacaggtcttttgtcgcctctttctgatccattttatgtccagtacttgaaggcaactcaatatgcagcacaaggaactgccaactgcagtgatccttccttggaaagaggtttcatgggtagtcaatatggtgatttaactgctgttcagaaagcttatattgaagctttgcttcagcagcagaaacaatatggaatgccacttggtaagtcaaccacgtcaaaccatggctattatggcaatttggcttttggcatgggcatggcataccctggaagccctttgggaagtcctgttgcttctccatctggtcctggcagtccacttagactcagtgagcggaatatgagatttccttctaacttgagaaacttgggtggctggaattctgatccaagtggctatatgaatgataacttcccatcttcactattggatgaattcaaaagtaataaggccagaagttttgaacttgctgagattgccagtcatgtggttgagttcagcgctgaccaatacggaagccgtttcatacagcaaaaacttgaaaccgcaacagttgaggaaaaagacatggtttttaaggagatcatgcctcaggctctctcgttgatgaccgatgtatttgggaactacgtggtgcagaagttctttgagcacgggagtgcagcacagcgtagggagctggctgatcaactatttggacatgtgttagctctcagccttcagatgtatggatgccgagttatccaaaaggcaatagaagtggttgacctggaccagaagacaaaaatggttactgagcttgatggccatatcatgagatgcgtgcgtgatcaaaatggaaaccatgttatccaaaaatgtattgaatgtgtaccggaagattcgattcagtttatcatctcaacattctmtggtcaagttgttccattatccactcatccctatggctgcagagtcatacagagagtactggagcattgcactgatccaaaaacacaggaaatagtcatggatgaaatattgcaatctgtgtgcatgttggcacaagatcaatatggaaattatgttgttcagcatgttttggagcacgggaagcctcatgagcgatctgtcattattgaaaaactagctgggcagatcattcagatgagccaacagaaatttgcctcaaatgttgttgagaagtgtttaacatttggcggacctgcagagcgggaagttcttataaatgaaatgctcggaactactgacgagaatgagcctcttcaggccatgatgaaggatcagtttggtaactatgttgtacagaaagtactggagacttgtgatgatcagcagcgtgagttgatcctgtcacgagtaaaggttcatttaagtgcactgaagaaatatacatatgggaagcacatagttgcccgggtagaaaaacttgttgctgccggtgagaggaggattgggcttcaggcacaatatccttcataa

SEQ ID NO: 4091 - DNA, 486 bp, Oryza sativa
atggcacaagaaagctggaaaaatgagtctgaggagactgtccacacaccggaggccccaatattgtgtgtaaacaactgtggcttcttcggcagtagcatgacgaacaatatgtgttcgaagtgctacagggactttgtgaaggtcacgacaatggctgccccagtagtggagaagaaggcatttacgccagcatcgtcttcgaagacaccattggagccagcaaagccagatgaagttcctgccgcagctgtagaggataagcaagcggcacaggagcctccaaagccacccagcaaccgatgcctgtcatgccgtaagaaggttggtctgactggcttccagtgccgatgcggaggtaccttctgctcaacacaccgttataccgaagctcacgactgcaccttcgactacaagaaggccggccgggatcagattgccaagcagaatcctgttgtgatagccgagaagatcaacaagatctga

SEQ ID NO: 4092 - DNA, 1626 bp, Oryza sativa
atggcagttgtgttctccaatcccatggttcatgctagacgcttcctgcagacaggactagacattttcagttttggtaactgtgaagattatggcattgttttaccaagagaaactgctgcattgatggatggacatacaaatggcactaatggttcctgctctaagccatgcgagccattaacagactactgcatccctgattacattctgaatcctgactctgaacaagtcctcgttgatcaggcaccatgttgccctgtagtagtattcatcaactctagaagtggcggccaactcggaagcagtttgatcaaaacgtatcgtgagcttctcaataaagcgcaggtttttgatttatcagaagaggctcctgaaaaggtgcttcacagattgtattgcaactttgagaagctcaagtctaatggcgaccctattgcttttcaaattcagagcaacctaagactaattgttgctggtggtgatggcacagcaagttggctgcttggtgtagttagtgaccttaagctctctcacccacctcctattgcaactgtgcctctgggaactggaaacaaccttccattctcatttggatgggggaagaagaacccaaccactgaccaagaggcggtgaaatcatttcttggacaagttaaaaaagcaagagaaatgaatattgatagttggcatatcatcatgaggatgcgagctccacaggaaggtccatgtgaacctattgctccgttagagctgcctcactcattgcatgcattccaccgtgtatcaggaagcgattcacttaatatggagggctaccacacataccgtggaggattttggaattactttagtatggggatggatgcacaagtgtcttacgaatttcactctgagaggaagagaaatcccgagaagttcaagaaccagctaacaaatcagagtacatatgctaagcttggacttaaacaaggatggtttgctgcttcactaactcacccatcctcgaggaacattgctcaacttgcaaaggtgcggatcatgaaaagacctggtggccaatgggaagagcttaagattcctcgcagcattcgatcaatcgtctgtctgaatctgccaagtttttctggaggactgaatccttggggaacacctggcaccaggaaagtwcaagatagagacctgactgcaccatttgtcgacgacggccttatcgaggttgtcggctttcgcgatgcctggcacggtcttgtcttgcttgcccctaatggccatggaactcgtctagcacaggcccatagaatccggttcgagttccacaaaggagcagccgagcacacgttcatgaggatcgatggggagccatggaagcagcctcttcccaaggacgatgacaccgtggtcgtcgagatctctcacctccgtcaggtcaccatgctcgccagcgacccgtgcaagtcgaagagcgtcaacgacccctcgtcgccgatgtgctgtagcaaccacgacgacgacgagcgcaacagcttggaggacgaagatgagtgggaggaggggaggaagaagtttggtgcagctgatacgttcaagttccctgatgaggttgatgttgctcaccttagctga

SEQ ID NO: 4093 - DNA, 1380 bp, Oryza sativa
atggagagttccaacctgggcggcggcggcggcggatgcggcggcggtgggccgccgccgttcttgatcaagacgtacgagatggtggaggacgcggcgaccaaccacgtcgtgtcgtggggccccggcggcgccagcttcgtcgtgtggaacccgctcgacttctcccgtgacctgttgcccaagtacttcaagcacaacaacttctccagcttcatcaggcagctcaacacctacggtttccgaaaaatcgatcctgagagatgggagttcgcaaacgaggatttcataagagggcacacgcaccttctgaagaacatccatcgacgcaagcccgtgcacagccactccctccagaaccagataaacggaccactcgccgaatcggagaggcgcgagctcgaagaagagatcaaccggctcaagtacgagaagagcatcctcgtcgcggacctccagaggcagaaccagcagcagtacgtgatcaactggcagatgcaggcgatggaaggcaggctagtggcgatggagcaacggcagaagaacatcgtggcctccctgtgcgagatgctgcagagacgcggtggcgccgtgtcgagctcgctgctggagtccgaccatttcagcaagaagaggagggtcccgaagatggatctcttcgtcgacgattgcgcggcgggcgaagaacagaaggtgttccagttccagggaattgggacggatgcaccggccatgcctcccgtgcttcctgtgaccaatggtgaggcttttgacagggttgagctgagcctggtctccctggagaaactcttccagagagcaaatgatgcttgcacagctgctgaagaaatgtactcccatggtcatggtggtactgaacccagcactgctatatgtcctgaagagatgaacactgctccaatggagacaggcatcgatcttcagttaccagctagcctccatcccagctcacccaacacagggaatgcccatctccatttatccactgaactcacagagtctccaggttttgtgcagagtccagagctgccaatggcagagattcgtgaagatatccatgtgacaagatacccaacacaagctgatgtaaattctgagattgcctcctccactgatacttcacaagatggcacgtcagaaactgaagcttcgcatggaccgaccaacgatgtgttttgggagcggttcctcacagagactccacggtcatgtttggatgagtcagaaagacaagagtctcccaaggacgatgtaaaagcagaattaggctgcaatggcttccatcaccgggagaaggttgatcagatcaccgagcaaatggggcaccttgcttcagccgagcagactctgcatacctga

SEQ ID NO: 4094 - DNA, 894 bp, Oryza sativa
atggagcatcttattctgcagctgtcccagactgggacgagcgagaggtcgccggcgccggcgcaggagcagcagcaacaggtggactgcagggagatcacggacatgacggtgtccaagttcaagaaggtgatctccatgctgaaccgcaccggccacgcgcggttccggcggggcccggtggtggcgcartcgtcgggcccgggggggtccgagccggcgccggtgaggtcgtccccgtcggcggtgtcgaggcccatgacgctcgacttcaccaaggcggcgtccgggtacggcaaggacgccgggttcagcgtctccggcatctccgccgcgagctcgtccttcctctcgtcggtcaccggcgacggcagcgtgtccaacgggcgcggcggcgggtcatcctccctgatgcttcccccgccgccggcgaccagctgcggcaagccaccgctgtcctccgccgccgccgccatgtcagccggcgcaggccacaagcgcaagtgccacgaccacgcgcactccgagaacgtcgccggcggcaagtacggatccaccggcggccgctgccactgctccaagcgccggaagcatcgggtgaagaggacgatccgcgtgccggcgataagctcgaaggtggcggacatccccgccgacgacttctcgtggcggaagtacgggcagaagcccatcaagggctcccccttcccacgaggatactacaagtgtagcacgctgcgcggttgcccggcgaggaagcacgtggagcgcgacccgaccgacccgtccatgctcatcgtcacctacgagggcgagcaccgccactccccctccgccgccggccaggaccacccgccggcgccgcctccgccgctggcgctgccgctcgcctga

SEQ ID NO: 4095 - DNA, 1554 bp, Oryza sativa
atggttggaaaggcgagtcagggacgaatcatccatccaaatcggatgcagagcggcgggagcaagctgggcgaagagctctgggcgtcgaaactggccagcaacttcttcggctgcagcaacgcgaccaaggcgttcgccgatgccaaggccgtcacggagccgaatcggtatctgatgatcgcaacgagcggcggcctgaaccagcagcgaacagggatcatagatgctgttgttgcagcccgtattctgaatgcaacacttgtcattcccaacctggatcagaaatccttctggaaagatgcaagtgattttgcggatattttkgatgttgagtcattcatatcctcactctcaaacgatgtaaagatcatacggcaagtacctgacaggaatgggaaaacaccatatccttacaaaatgcgtattcctaggaagtgtactgcaaaatgctatgagaaccgagtattacctgcccttttgaaaaaacatgttgtccagcttaccaaatttgactaccgggtttccaataggttggagactaaccttcaaaagcttaggtgcagagtcaattatcatgcactacagttcacagatccaattcttaagatgggcgaaatgcttgtccaaagaatgagagccaaaagtggacgcttcattgcccttcacctaagatttgagcctgacatgctcgccttctctggttgctactttggaggtggggaaattgagagaagagaactcggtgcaatccgtaagagatggaagacactgcatgcaagcaaccctgacagagaacgtaggcacggtaagtgccctctcacaccagaagaggttggcctcatgctccgagcattgggatttgggaaggatgtgcacatatatgttgcatcaggtgaggtgtatggtggagaggagacgctggcacctctgaaagcgctcttcccaaacttccactcaaaggaaactctagctagcaaggaggagttggcgcctttcctctcattttcatctcgcatggcagcgcttgattatatggtgtgtgataagagtgatgtatttgtgacaaataacaacggcaacatggccagaatgttggctggtcgaagaaatagtttgggtacatctggtcatattctgaagagaaaattgaatttcaggaggtattttgggcacaagaggaccataaggcccaatgccaagaagctttactcactctttctcaatcgaaccagcatgagttgggaaacattttcgtccaaagttcagacacttcagaagggatttatgggggagcccaatgagataaaacctggaagaggtgaattccatgagcaccctatggactgtatttgcgcaaagacaaagggaagaagtgggcatagtaagcctcatccaagtaatcggattggggaagcaatggagaaacgtgctaatgatggtgagtttgactggagagatctggactacggcgagaatacacccttgggaagggattcttcaaatgagactgattcagacatgcatgaattggaggacatggtctcagactag

SEQ ID NO: 4096 - DNA, 2960 bp, Oryza sativa
atggagctcctgagcggggcgcgctgcgtgcagcagtaccgcgcctctcgcaagaacgccacgctcacctggcgccacgcgctcgctcctcagctcctctcctcgctcgtcttcatcttcctcatcttctgcatcgaccgcgccatccgctcccgcttctcctacaccaccgcctaccgcaacgtccccgacccggccgccctcgtcgccccgcccatcccgccctgcgaggacaagtacttcgtcagggagccctgctacgacttcctctggagcggcggcggcggcgccgggagcgcacgcgtcgccgggatcgtcgaggccatccggaggaacaaccccggcaggccgatccccgccgagaaggtcttgggttttaatactccagatgaagttgatgcttggcttttccaaaatccaatgcgctgccctggcgccttacattttcaagttataaacgacactcagataaagtatggtattcagacgaactccactccggtagctcggagaggaacatatgaggatcctaccttcaagttccagataccacttcaaattgcagctgagagggaaatggcgaggctgctgattggagttgtcttggcaaataaccagtatatatttatactgatgaatgtgacagacccaaattttagctggactgtggggttcaaggagttcgctcacccagctacagaaaccttctctactattgcccaagctgggccaactttcttccttgctattgctatgttcggattcgtttttcaaatcagtgcgttggtgacagagaaagagcttaagcttcgtcaggctatgtctatcatggggctctacgagtcagcgtattggttgtcttggttaacctgggaggctttcgtcacattactttcagcacttcttactgtgctctttgggatgatgttccagtttgacttctttctgcacaataactttgggatcctattcctcctcttctttctcttccaactgaacatgcttagttttgccttcatgatatccacatttgtaacaaaagcagcatcagctactactgttggatttgcaatattcattattggcttcttgacacaacttgttacaacctttgggttcccatattcaacttcctaccagaagtactaccggacaatatggtccttgtttccacctgatgtttttgcccaagccctcaatattctgggcaaggcaacggccactcctgaagacaaaggaatcagctggaatcagcggggacaatgccaatcttttgagacagattgcgtcattactattgatgatatctacaaatggctcatctccacatttttcttgtggtttgtcctggcgatctactttgacaacataattccaaatgtcaatggtgttcgaaagtcagtgttctactttctgatgccttcatactggacaggaaaaggaggaggaaagttgcaagagggaggactctttagcttttttggttcgaaccgcccagctgatgatgcttctcctactgatgaggatgttattgctgaggaaaatctagtaaaacaacaagctgcaaacaatgaagtagatcctggtgttgcagttcaaatatgtggtttgcggaaaacatatccagggagttttagtatgggttgctgcagatgcaggacaactaaaccgtttcattctgtcaaaggtttatgggtgaaccttgagaaggaccagttattttgccttcttgggcccaatggagctgcgatgatttatgggcattctgttcgaagcactgctgggatgtcgaatattcggaggatgataggagtctgtccgcagtttgacatcttgtgggatgcgctaacagctaaagagcacatggagctgtttgctagcattaagggactgcctccatcaacaatcaagtcggtagcagaacaatccttaatccaagtgaagctcagccaggcagctaatgttagagcaggtagctacagtgggggaatgaaacgccggctaagtgttgcaatagctctaattggtgatccaaaattggtctttcttgatgaaccgactactggcatggatccaataacaaggaggcatgtctgggacatcatagaggaagcaaagaaaggaagagctattgtcttgaccacccattccatggaggaagctgacattctgagtgacaggatcgcaatcatggctaaagggaaattgcggtgcattgggacttcaattaggctgaagtcgaaatttggaacaggatatattgctaatgtgaatttctctggaaatggtcacacacaaagccctaacatcaacggcaacactgaagtcccggttaaccctaacatagaatctgtcaaatggttcttcaaggaacggcttgatgtggacccaaaagaggagagcaggacattcttaacgttcgtcatcccccatgagaaagaaccacttctgacggctaatatattttccattaagcagaggttctttggggaactccaagacagggaacgggaattcggtatctcagacattcaactcggcctcacgacgctcgaagaagtattcctgaacatcgcaaagcaggcagaactggagagctctactgctgaaggcaccctggttactctgaacctatcatcaggttcatctattcagaaaactctgaatatctctttgatatcacttccattttctatggcaatgcagataccaaagggggctcgttttgtcggaattcccggaaccgagtcggaggatcacccaagaggcgtgatggttgaagtttactgggatcaagatgacaatggatcactctgcatttctggtcactctgatgaaatccctgtcccagccaatgttcagctgggtcggcccccttcgctgtctcgtagggcctcagtgggccgtggaaaccctgttgggtacatcattgatccgaatgaggtcacagcagcaagatg

SEQ ID NO: 4097 - DNA, 1023 bp, Oryza sativa
atgggttcctcacaggaatccactttttcctccgcctcaacggccgcgcaggtgaatgcctgcgcgctggacttgctcccggtatacgccaaggagcttatcgccgggggtgcagccggtgcattcgcaaagactgcggtagcgccgctggagagggtcaagatcttactgcagaccagaactcatgggtttcaatcccttggtatcctccaatcattgaggaagctgtggcagtatgagggaattcgaggcttctacaaggggaatggcgccagtgtgcttcggattgttccatatgcggcattgcattacatgacttatgagcagtatcggtgctggatattgaataattttgctccatcagtgggtacagggcctgtggttgatctattggctggctcagccgcaggtgggactgcagttctatgtacctacccattagaccttgctaggacaaagctggcatatcaggtttcaaatgtgggccaacctggcaatgctttgggaaatgctggtagacagccagcatatggtggtatcaaggacgttttcaaaactgtttacaaggaaggaggcgcacgagctttataccgtggagtaggcccaactctgatcggtatcctaccatatgctggactaaaattctatatatatgaagacctgaaatcgcgagttccagaggattacaagagatctgttgtattgaaactctcttgtggtgctttagctggtctttttgggcaaaccctcacttatccactggatgttgtccgaagacagatgcaggttcagaataagcagccccataatgcgaacgatgccttccgtataagagggacatttcagggtctagcactcattattaggtgccaggggtggaggcaactcttcgctggcctaagccttaactatgtgaaggtcgtcccttcggttgctattggtttcacaacatatgacatgatgaagaatttgctgagagtgccaccccgagagagactttatcaatcgtctggtaacgcatga

SEQ ID NO: 4098 - DNA, 456 bp, Oryza sativa
atgtcgagcttgatggacaaggcgaaagggttcgtggcggagaagatcgcgcacatcccaaagccggaggcgtcgctggacagcttgtcgttcaaggggatgagccgcgagtgcatcaccgtgcacagcaacgtcaacgtctccaacccctacgaccaccgcctccccatctgcgagctcacctacaccctcaagtgcgccggcaacgttgtggcgtccggcacgatgcccgatccggggtggatcgcggcgagcgacacgacgaagctggagataccggccaagatcccctacgacttcctcatctcgctggtgaaggacgtgggccgggactgggacatcgactaccagctcgacgtcggcctcaccatcgacctccccatcgtcggcaacttcaccatcccgctctccaccagcggcgagatgaagctccccacactcaaggacatgttctaa

SEQ ID NO: 4099 - DNA, 1107 bp, Oryza sativa
atggatcacttcggcggacgtgctctcggcttcggcggtggcggcggctgcggcgcggtgcggtgcaggcactgcagcgcgtccctcccggctatgcctggcgcccgcgtcatccagtgcgcgcagtgctacggcgtgacgcgcgtcggcggccgcggccggcgccgccaccccaacccggtcgagccgtggcgcccggccgtgccgatgcccgtggccggcggcggcttcttcccgggctcccgcggcaagaagcgcgccgtcctgatcggcatcacgtacgccggcatgcggcggcgcggcagccagctgatgaggggccccgtcaacgacgtcaagtgcatgcggtacctcctctgcgagcgcttcggcttccccaacgactgcgtcctcatcctcaccgacgaggagaaggacccgtgcaggttggcgacgaaggagaacatcaggatggcgatgaactggctggtgcaggggtgcagctccggtgactcgctggtgttccacttctccgggatcggggtgcaggtgccggacgacgacggcgacgaggtggacgggtacgacgaggcgatctgccccatggactcgttcagccagggccccatcctggacgacgagatcaacgaggccatcgtccgcccgctcgtccacggcgccaagctccacgccgtcgtcgacgccgagcacagctccaccgtcctcgacctccccttcctctgctgcctctcgtccaggtccggcggctggcagtgggaggaccaccgcccgcccaccggcgcctacaagggctccagcggcggccaggccatgctcttcagcggctgcagcgacggcaacaacaagcatagcctgctgccggaggcgtcgacggtgggggccatgacgcacagcttcatcaaggcggtggagtgcgagccgcgcgccacctacggcagcctgctcaccaccatgaggagcatcatgcgcgacggcggcgtcacctgcaacctgcagggccccatcggcgcccccatccgcaaggtcgccaacttcagcggcatccaggagcctaacctgtcttgctctgagatgttcgacatctaccgcaagccgttcgtcctgtaa

SEQ ID NO: 4100 - DNA, 2232 bp, Oryza sativa
atgtgtccaaagattcgatgtgatgtttttgggaaaaagtttgtggaaactaaacggggcccaatttggtcgttgagctcgagccgtggtggtgttcttgatccggtccatgggtcyctgtcatggcaagccgagccaaatcccggagcccgaggcggaggaggcggcggcggcggccggtgtaaccgtcgccggkccgcttcgccgggtccggctgcggcggcggcggcggcggcggcggcgaarccgggcacgccgaagcagccgaagttcccgttctacctgccgagcccgctgccggcgtcgagctacaagagctcgccggcgaactcgagcstggcgtcgacgccggcgcgcggcgggttgaagcggccgttccccccgccgtcgccggcgaagcacatccgcgcgctcctggcgcggcggcacgggtcggtgaagcccaacgaggcgcccatcccggagggcggcgagaccgaggtcggcctcgacaagggcttcggcttctccaagcacttcttcgccaagtacgagctcggcgacgaggtcggccgcggccacttcggctacacctgctccgccaaggccaagaagggcgaccacaagggccacgacgtcgccgtcaaggtcatccccaaagccaagtatttggtagaacgttggttgattcaagcacgaggatattggaaaaaaggagccacctttagccggcacttcgttttcgttttagctcccggggtgctcgtgattattgttgggagcattgattggcttcatgccatgctcatggtttcaacgcttgtcgagttcttggtgccaccaccatcttttgtcctcacgcttccatcatcggggtcggggagggtaaatggagcagatgaccctctttggatagatctgcagatgacgactgctattgccattgaagatgtcagaagagaagtcagaatattgagttcgctgacaggacacagtaacctagtgcagttctatgatgctttcgaggatgaagataatgtgtatatagttatggagctatgtaaaggaggtgaactactggataggattttggcaagaggtggaaaatactctgaggaagatgcaaaggttgttatggtgcaaattttgagtgttgtgtcattttgccatctccaaggtgttgtccatcgtgatctgaaaccagagaattttcttttcacctcaaaggatgaaaactctgccttgaaggtcatagactttggcttgtctgactttgtgaagccagatgaaagacttaatgacattgtcggaagtgcatattatgttgctcctgaggtgcttcatcgatcttatggcactgaggcagatatgtggagcattggagtgattgcctacattttgctttgtgggagccgtcctttctgggcacgcaccgaatcaggaatatttcgagctgtgctgaaggcagaaccaagttttgatgaggctccatggcctactctcactgccgaagcaaaagactttgtaaaacgactgcttaataaggattaccgcaagaggatgactgctgcacaagctctcagtcatccgtggatccgaaattctcaacaagtgaaaatacctttagatatgataatctacaagcttatgcgagcttatatcagttcgtcttccttgcggaagtccgctttgagggccctagctaagacattgacggcaaatcaactgttctatctaagagagcaatttgaattgttgggtccaaacaagaatggttatatctccttgcaaaatttgaaaacggccttggtaaagaattctacagatgcaatgaaggattctagggttattgactttgttaacacggtgtgcactcttcagtacagaaaattggattttgaagagttcgctgcttctgccgtcagcgtttatcagatggaagctttggaaacatgggagcagcacgcacggcgtgcatacgagctattcgataaggagggcaaccgacctattgtaattgaggagcttgcatcgccttctggtaccaatgcaacaatctctgctcctcactgtccattgatgatgggagaatctgcatttttactgcaaggctgcatctacccaagcatatgcatatattcatggcgatatgcatatatcaccaatgaccttggccgatccgccagaagccggggatctaaaccatttccattctctaaaattcagagtatcaccagaattctgaagaagtga

SEQ ID NO: 4101 - DNA, 663 bp, Oryza sativa
atggccgccgcttcccctccactcctccccaccaccgtcctccccgccaacaccaccgccaccgtctcccctgcccccacctccgtctcctccgccgatgccaagcctgccgccacgcgcgccttcctcgcccgcctcctcgactccgtcaagcgcgcgctctccggggcccgcccctggccggagctcatcgaccgcagcgccctctcccactcggaatccctctccgactccggcgcccgcctccgcaagaacctcgcctacttccgtgtcaactacgccgccatcgtcgccctctccctcgccgcgtccctcctcgcccamcccttctcccttgccgcgctcctcgccctcctmgmcgcctggtgcttcctctacctccttcgcccctccgaagcgcccccgcttgccgccttcggaagcaccttytccgacagggagaccctcgggggactcatcgtcgcatccgccttcgtcatcttcctcacctccgtcggatccctcatcttctccgcgstygccctcggcgccgccatcgtctgcgcgcacggcgcattccgcatcccggaggacctcttcctcgacgagccagaccaggccaacggcgccgcctccgtcaacctgctctccttcatcaccagcgccaccggaggccgcgtctga

SEQ ID NO: 4102 - DNA, 1719 bp, Oryza sativa
atgaccgccgcgccggggagcctcccgctggtgaactcgaggcccgtctccctctccttggcggcgagcaggtcgtccttctccagcctgctcagtggcggcgccggctcgtcgttgaacctcatgacgccgccgtcttctctcccgccgtcgtcgccgtcgtcctacttcggcggcgtctcgtcctccgggtttctcgactcgccgatcctcctcacgcccagtttattcccatcgccgacgacgacgggcgcattgttcagctggattacgacggcgacggcgacggcggcgatagcgccggagagccaggtgcaaggaggggtcaaggacgagcagcaacagtactcggacttcacgttcctgccgacggcgtccacggcgccggcgacgacgatggccggagccaccgcgacgacgtccaactccttcatgcaggactccatgctaatggctccattgggaggggacccgtacaatggcgagcagcagcagccatggagctaccaagaaccgaccatggacgctgacactaggccagcggaattcacctcgtcggcggcggcgggtgacgtggccgggaacggcagctacagccaggtggcggcgccggcggcggccggcggcttccgtcagcagagccggcggtcgtcggacgacggctacaactggcgcaagtacgggcagaagcagatgaaggggagcgagaacccgcgcagctactacaagtgcaccttccctggctgcccgaccaagaagaaggtggagcagtcgccggacggccaggtcaccgagatcgtctacaagggcgcgcacagccaccccaagccgccgcagaacggccgcggccgcggcggctccggctacgcgctgcatggcggcgccgccagcgacgcatactcctccgccgacgcgctctccggcacgccggtggcgacgcccgagaactcgtcggcgtcgttcggggacgacgaggcggtcaacggcgtcagctcgtcgctgcgggtcgcctctagcgtcggcggcggcgaggatctcgacgacgacgagcctgattccaagaggtggaggagagacggcggcgacggcgagggcgtctcgctggtggccggcaaccggacggtgcgtgagccgagggtggttgtgcagacgatgagcgacatcgacatcctcgacgacggctaccggtggcgcaagtacgggcagaaggtggtcaagggcaacccaaacccaaggagctactacaagtgcacgacggccgggtgccccgtgcggaagcacgtggagcgcgcgtccaacgacctgcgcgcggtgatcaccacgtacgagggcaagcacaaccacgacgtgcccgcggcgcgcgggagcgccgccgccgcgctctaccgcgccacgccgccgccgcaggcgagcaacgccggcatgatgcccaccacggcgcagccctcgagctacctgcagggcggcggcggcgtccttccggccggcgggtacggcgcgtcgtacggcggcgcgccgacgacgacgcagcccgcgaacggcggtggcttcgccgccctgtccggccggttcgacgacgacgcgacgggagcgtcttactcttacacgagccagcagcagcagcagccgaacgacgcggtgtactacgcgtcgagagccaaggatgagccgagagacgacggcatcatgtcgttctttgagcagccgctgctgttttga

SEQ ID NO: 4103 - DNA, 795 bp, Oryza sativa
atggcgagcggcggcggcggcggcggcraggcggtggaggagggtacgacgacgcgggtgggcgacctgccggaggcgtgcctggcggacgtgatcgcgctcacctcgccgcgggacgcctgcaggctggccgccgtgtcgccgtcgttccgcgccgcggcggagtcggacgccgtctgggaccgcttcctcccgccggactaccgcgccatcgcgcccctgccgccgccgccggctacggcggcggcaagcggcggcaagaggatgaagaagggcgtctacctcgggctctgcgacaagcccgtccccgtcgacgacggcagcatggcctatatgaaaaggtttgaggaggtggcgcagctggtggactgcacgtgcctggacatctacgggcggctgccggcggcggcgctgacaccggcgacgccgtacgcggcgtacctggtgttcggcaccgcggcggcggcggaggggcaccgcgggctgagcttcccggaccaggagacgacggtgtccgcggcggggcgcgtcgtggcgcgccamgccgtgtgcctccgccccgacgacgccgaggcgcgcaagttcaggggcgtcggcctcgccggcgccggcgtcccggtcaggcgccccgcgcggcgcggcgacgggtggtcggagatggagctcggccgggtggccgccgacgaggtcgccggcgccggcggcgaggacgtggtggcgagcttcgaggtgctcgggtggtatcccaagcgcggcctcgtcgtcgagtgcatggagtttaggcccgtagtctga

SEQ ID NO: 4104 - DNA, 1554 bp, Oryza sativa
atggggtcgtggcggcgcaaggcctacggcgccctcaaggactccaccaaggtcggcctcgccaaggtcaacagcgacttcaaggagttggatattgcaattgtgaaggccaccaaccatgtagaatgccctcccaaggacaggcacgttagaattggctaccttaatgccaaaatgtatctctttcagcaggttgcattgaagacattgatagtggtacataggctcttgagagaaggtgatcctacattcaaagaagagttcctggcctactcatacaagggaagcgttttgcagagagcaaacttcaaggacgattcaagccaattagcttgggattgctctgcgtgggttcgcgcctacgcgctcttcctagaagaacggctcgagtgtttcaggatcttgaaattcgacatcgaaaccgagcgtctgatgagatctcctgagtgttccagcaagcctgaaggtgcagcaggcacgaactaccttatccaatatgcattagccctggttttgaaggagagcttcaagatctactgtgcaatcaatgatggtatcatcaatcttgttgatatgttctttgatatgccaaagtatgatgctatcaaggctcttgttgtctataaacgagctggccagcaggctgaagatctttctgacttctacgattcctgcaaacaacttgagcttgccaggacattccagtttcctactctaaggcagccaccatcatcattcattgcaacaatggaagagtacatccgagaagcaccccgtccctcgattaacagcgtggagaatggtgagaggaagctagtgacctacgaccaagaagctacagaggagtctgaaaaaccagcagaagaggagaaagatgagcctgcagagtctgaacaagaacaagagcctaaacaagaaccaaagccaccagaaaccactggagatctactaaacttggatgcagaggtgagtccattggttgcagaactggaagaaaacaacgcatgggccctagcaattgtgggaacaggtgatcaaactaaggcatcaacttccctggacttgttttctggcaacacatctgggtgggagcttgcactggctggaggctttgacaagctgctactcgacagcctctacgaagacgagacgaggcggcggcagatcgccggagtcacctacaccggtagcattggaggaggagcacccaaccctttcgacaccaacgatccatttgctacgtcgagcagcttcttgcccccatccaatgtccagtttgcaatgctgaaccagcagcagcatcagtactaccagtctcaacaccagcaacaatactaccagcctcatcatttccaggatcatcaacatcaccataacatgtattttcagacacattatcaacaaaatcagatataccaacaacagcagcagcagcagcatcagtaccctgcacctcaggctggatcttccaatccgtttggtgaccctttcggtgacctcgtaccaatggcaatggctgtctctcaaaaacatggacattcaagtttgatatga

SEQ ID NO: 4105 - DNA, 1242 bp, Oryza sativa
atgaaggcatcgcaggtgtggcaacggggcagcaaggacatgacagccatgccccctccgcgccaacgaggcgccgccaagaagcccatgtggataatcgtgctgctgtcgctggtgtgcgtcgcgctcatcggggcctacgcgtaccctccgcgccgctactccgcgtgctacttcttcgcttcgagcgtctgcactcctttcaaggattggctccctactgtgacccgacgggagcgaacagacgaagagatcgtctcgtctgttgttatgagggatctccttgcaatgcccatgcctgtctcgaagaatccaaagattgccttgatgttcttaacaccaggttcattgccctttgagaaactatgggagaaatttctacagggtcatgaggatcgatattccatttatatccatgcatcgcgtgaaagacctgtacattctagttctttgtttgttggccgagagattcatagtgaaaaggttgtatgggggaggatttcaatggttgatgcggagaagaggctgctagcaaatgcattggaagatgttgataatcaatttttcgtcttgctatcggacagctgtgttccactacatacatttgattacatatataattttttgatgggaacaaacgtcagcttcattgattgcttccttgatcctggaccacatggaagcggaaggtattctgtggaaatgctccctgaaatagaacagagggacttcaggaagggtgcccagtggtttgctgtaacacgaaggcatgctttactgattttagcagaccacctttactacaataagttcgagctgtattgcaagccagtaacaggcatcacagtaggtaccagggtaccaggatttatcccaaagagggaaaatgataccctgccagcagagggacgcaactgtattgctgatgagcattatttgccaaccctcttcaatatggtagatcctggtggaatctctaattggtcagtgacacatgttgattggtctgaaggaaaatggcatccaaggtcgtatagagctattgatgttacctatgcactcttgaagaacataacggctatcaaagagaacttccgtattacaagtgatgataagaaagttgtgacaatgacaccctgtatgtggaacggaacaaagagaccatgctacctttttgctagaaagttttacccagaagctctcaacaacctactgaagcactccagctacacgtccacttga

SEQ ID NO: 4106 - DNA, 3500 bp, Oryza sativa
atggcggcgcgggcgcgggagacgctgaggaagagcgcgtcgtcgtcgtcgtcgtcgccgtacgcgcgtagcaccgacgacggccccgtcgcctccgcctcgtgcgacgcgcgcctcgagcgctgctgccgcgagkttggcgccgcggtggcggtggtggaggagccggagcgggttgtttcggggggcggggcgttgccggagtttgttggtgagggaaggggccaggggatctaccgggtgccgctgcgcgccgcgatgcacccgggccgcccgccgccgctcgaggtgcggccccamccgctgcgggagacgcaggtggggtccttcctgcgggcgctggcgtgcgagccgcggcgccggcagctctgggcgggctccgagtccggggtccgcgtgtgggggctcgacgacgtgttcgccgccgccgggtgcggggcgcgccgcggcgacgaggagagcgcgcccttcagggagtccgtgcccgtgccgcccgtgctctgcgtcgaggcggacgcctcgaacgcgctggtgtggacgggccacaaggatgggaggatcatgtcgtggcgaatggacctcgccgccggcagcgacgacgatgacgcgccgttgttcagggaggccctgacgtggcaggcacacagccgcacgccagtgctctccatggtcatcacgtcttatggtgaaatatggtcaggatccgaagggggtgttataaaggcatggccctgggacgtcattgctaagtccctctcactaatgccagaagaaaaacatgtggctgctttacggattgaaaggtcatatattgaccttaggaacaatgcagcagctggcaacatatcttcgttccccgctgctgatgtgaaacacatgcttgctgaccattcccgggcaaaagtttggtgtttaactagcatggcatttgctgtttgggatgctcggaccagggaactgctaaaagtgtttggcatggacggccaaattgagtcagctcggttagaggcacctgtgatgccagagcaatttatagaggaagaaatcaaagcaaaacccgtgaagaaggataaaccacaaagctctttcaattttttccagaaatcaaggaatgccctgatgggagcagctggtgcagtacgcagagttgctacaaaagggacatttgttgaagataatcgccgaacagaagcagtggttcaggcaatgaatggaacggtttggtcaggttgcacagatggtttgatcattatgtgggatggaaatgggaaccgactgcaagaattccagcatcattgttcttctgttcagtgcatgaaggcacttggagaaagggtgtgggtgggctatgccagtggcattattcaagtcatggatgtggaaggtaaccttctggcagaatggactgggcatagctgtccggtcatacagatggcgattggtggttcttatgtctttactcttgctcatcatggtggaattagaggatggcctctagcttcccctggccctctggatgatattctgcgaactgaattgtcaaacagggagttgtcgtatagaaggctagtgaacattaaaatgcttgttgggacttggaatgttggccaggagaaagcatcttatgaatcactcatgtcatggttgggtcgtgcattttttgatgttgacttggtggtggttggtctacaagaggtcgagatgggtgctggtgttcttgccatggctgcagccaaagaaagtgtagggcttaagggtagtgccaatggtcagtggtggatagacaatattggcaggacccttgatgaggggatatccttccaccgagttggttcaaggcagctggctggattacttattgctgcatgggcaaggaaggaccttaagccacatgttggtgatgttgatgctgctgcagtaccatgtggctttgggcgtgctattggcaacaagggtggtgtagggttaagaattagagtctatgatcgcaggatatgttttgtgaacaatcattttgctgcacatctagaaaatgttagccgtcgtaatgctgattttgatcatatctatcgaacgatgacttttaacaaacctcatggatctgcagcttctgctacatctgttcaattgcataaaaccgtgaatgccaatggaaatcaggtcgatgaagatatacctgagatggcagaagctgatatggttgtctttcttggtgatttcaactaccgactttacggtatcacctatgatgaagcaagggacatggtctctcaaaggagctttgactggcttaaagaaagggatcaacttcaagcagaaatgagggcaggaaaggttttccaaggaatgcgtgaaggtttgatcagatttcctccgacttacaaattccaaagacacctaccaggtcttgcaggatatgactcgggtgagaagaagagaatacctgcttggtgcgacagaatactgtatcgagatagccgtgatgtattaacagcagagtgctcattagaatgccctgttgttgctaaaattacatcgtatgaagcttgcatgggtgtcacagatagtgatcataaaccagtgaggtgtgcatttagtgttgatattgcaagagtggatgagtttacaagaagacaggaatatggaaaaatactccaatctgacaaaagattacacagtttgcttcgagagtcccattttgttccagacactataatcagcacaaacaatataattttggaaaaccaagaacatgttgtcctccggataacaaatgattgtcaaagaaacaaggctgcttttgaaatcctgtgtgaaagccagtcaatcagcaagcaggatggaactaaatccgagtttcctccaagggcatcctttgggttgccgctttggcttgaggttgaaccatcagttggtctcattgaacctgggcaaacaatggaagttaccgtgcaccatgaagactattacacccaagaagtatttgtcaatggagtactgcagaactgttggtgcgaagtcaccagagataaggaggccgttcttttggtcaatgtaacaggtagcacctcaactgaaaccattacacacaggatcaatgtcaggcattgctgctcaacgatttctgcatccccgcccatcaatccaccgtctatcacaaccccatccgttgatgttctatcgggtgaagcatctacaagaagttcaaagaagaatccgttgaattatttgcaacgttctgactttaagccattcggcagctcagagaggacacatggtgatacaaaatattctttacaggttgaatacaaagaaagttacttcgagtcttttcctttcagaagttgttgcctaatacagctcaactctccttctgacctgcaacttgttccagagatggatgcagttctacctactcaactgaaggagaccacccaaaaagttctggttgagctaagatggaagtttgagccaagctcaagcaaaactgactttgcatg

SEQ ID NO: 4107 - DNA, 732 bp, Oryza sativa
atggggaggtcgccgtgctgcgagaaggagcacactaacaagggcgcgtggaccaaggaggaggacgagcgcctcgtcgcctacatccgcgcccacggcgagggctgctggcgctcgctccccaaggccgccggcctcctccgctgcggcaagagctgccgcctccgctggatcaactacctccgccccgacctcaagcgcggcaacttcaccgccgacgaggacgacctcatcatcaagctccacagcctcctcggcaacaagtggtctctgatcgcggcgaggctgccggggaggacggacaacgagatcaagaactactggaacacgcacatccgccggaagcttctcggcagggggatcgaccccgtcacgcacsgccccgtcaacgccgccgccgccaccatctccttccatccccagccgccgccaacgacgaaggaggagcagctcatactcagcaagccgcccaagtgccccgacctcaacctggacctctgcatcagcccgccgtcgtgccaggaagaagacgatgactatgaggcgaagccggcgatgatcgtgagggcgccggagctgcagcgccgccgcggcggcctctgcttcggctgcagcctcggcctccagaaggagtgcaagtgcagcggcggcggcgccggcgccggcgccggcaacaacttcctcggcctcagggctggcatgctcgacttcagaagcctccccatgaaatga

SEQ ID NO: 4108 - DNA, 903 bp, Oryza sativa
atggccgccccggtcgtggacgccgagtacctccgccaggtcgacagggcgcgccgccaacttcgcgccctcatctcctccaagggatgcgcgcccatcatgctccgcctcgcatggcatgacgcgggcacttatgacgtgaacacaaaaactggtggtgcaaatggttcaattagatacgaggaagagtacactcacggttcaaatgctggtctaaagattgctattgatcttctcgagcctattaaagccaagagccctaagatcacatatgctgacctttatcagcttgctggagttgttgcagttgaagttactgggggtccaactgttgagttcattcctggaagacgtgattcgtcagtttgcccccgtgaagggcgtcttcctgatgctaagaaaggtgcactgcacttgagggacatcttttaccggatgggcttatcagacaaagatatagtagctttatctgggggtcacactctgggaagggcacatcctgaaaggtctggatttgaaggcgcatggactcaggagcctctgaagtttgacaattcgtactttcttgagctactgaagggggaatctgaggggcttctgaagctcccaactgacaaggcattgttggaagatccttcatttagacgctatgtggatctttatagccaggaaccatttcttctgttcatatggcaggatgaagacaccttcttcaaggactacgctgaatcgcacaagaagctttctgaacttggcttcactccacggagcagcggccctgcatctacgaaatctgatctttcaactggtgctgtactcgcacagagtgctgtcggggtagctgttgctgcagctgtagttatcgtgagctacctatacgaggcttctaagaagagcaagtaa

SEQ ID NO: 4109 - DNA, 855 bp, Oryza sativa
atggcggccgcggcgccgatgccggttgccggagcggggtggtgggatctcgtgaacggctcgacggcgtggcaggacgggatcttcctctccctcgccgctctctacggcctcgtcgccgcatcctccttcatccaagttgttaggatacagtacagagttcctgaatatggatggacaacacaaaaggtctttcaattacttaatttcattgtgaatggagcgaggtgttctatctttgcagtccgccgccaagtccaacaagtgaaccctgagatctttcagcatgttattcttgatcttccggggcttgcattcttcacaacgtatgcaatgttggcacttttctgggctgagatatcttatcaagcacgtggtctagagactgaagggcttagatcaggtttctacactattaatggtgtaatatatgtgatacaggttctgctgtgggcgttgttgtggcacaatccaaacccatctatgatagtcctttcgaagttgttcattgcaggcctatccttttctgcagccttgggttttctgctatatggagggaggcttttcttcatgctgaagcgttttcctattgagtcaaaagggaggcagaaaaaactgagggaagttgggagagttgccactatatgcttcctttgtttcttggcacgatgcattatgatgtgctttgatgcatttgacaaaaaagctgaccttgatgtgcttgaccatccaattcttaatttcatctattacctgatcgttgaaattcttccttcatctcttgtcctgtttattctgaggagaatcccttcgaagctacggctcgcccagtatcatcccctcaacagtggctag

SEQ ID NO: 4110 - DNA, 2238 bp, Oryza sativa
atgccggagtgtccagcgagggagcggttctccgcgctccgcggcgcccggtggcgcgccgatctcggcgtcctccccgactgcgcctccgtgtccaccgaggagttccgccgagccgccgccgactcccgccgcaggtatgctaatttgcggcggcggctgttaatagatccccatctctctaaggatgaagaaaacgctcctgaccttgctgtggaaaatccactatcacagaacccagaaagcacttggggccaatatttcagaaatgcagaactagagaaaatgttgaaccaagatttgtctcggctctaccctgaattgggaaatttcttccaaacaaccatatgtcagtccatgcttggacgtatactgttagtttggagccttaggtacccagagctcggttacaaacaaggaatgcatgagctcttagctcctcttctctatgtcctccatgctgatgtgcattacttcaaacaagtcagggagcttcatgatgagctttttagtgatgattttgatggccaaacatttccagataggataaaactgaacaggagtgacaggacaaacacaattgagggtagtgcagctaaaataagaagtttggatgatcttgattctgatacgagggaccttttcttgattaatgatgcttatggagcagaaggggagctgggtattattttgtctgaaaagttcatggagcatgacgcttattgtatgtttgagagtttgatgcatggttcgatgaatggtgcacaaggtgtggttgctattactgacttctattctctcagtcctgcaccagaatcaagcacaggtttaacacctgtaagggaggcatcatctgcaatatatcacttgcttgctagtgtggattcccctcttcacagtcatttgatggagttgggagtagagcctcagtactttgcgctacgatggctgagagttctattcggtcgtgaattttcacttgacaatcttctgtttatttgggatgagatcttctcatctcctaaccattcatattgtgcagacataaagaatcaatcagactatcagtttaagattttatgttctcatcgtggtgccctgattttgtcaatggcagtttcaatgatgctccatctcagatcttccttgctaggaagtgaacatgcaacttcatgcctagtaagattgttaaattttcctggagacactgacttaaagagcttgattgataaagccaaattattgcaaccttttgctcttgaagcaaatcttccttcatctcctctcagaggaaaatctcccttgaatccacccaactactgggaagagacatggaagatactccagatgtcagaagagaaaagaagtggtggttcaattaataggatgaaggtaagaggtttgttcagaagaagttcccccaacactgaatcaaatgtttcgagaaccaaggatgctaattttgaagatagcaattcgacttcaggtacgcaatctactgctgatgaacatcacagatctggtatagttccagtaaatttggtaaatggtacacttcacacgcctataagagaacgaacaagtcatgttgaacaatgtactgcagagaatatgatcaccacctcaaacaatgtattggaggcaggacagcctgaagttcaccgctccagttctgttgatgttagagatgctcttggagttgcatgtggaaatttatcaagagacagcagtacctcgttatcatgtggtacggagtatgaccatgagactcatcatgcagatgagccatgtgcttcccatgatgataaggtggttagtgagcctgatccactccctgtgcataatgataagattgatgaagtgacaatcgcagccattcaaacatgtgcattggtcgattatcagcaatcacaacagaataaaccgtgttctgttaatgggaaatcagaggtaaaatatcaacaaaattttgctgtgcatgaagttggccgcaaagaaacatttgaactaggttcaagctcagatgtggctgataaagagctacttggaacattaaggttacttggggaatctatggttgaaaacattgaggttattgacttgttgtttcaaccaaatttgcactctacctcactggataaatcagaggaaattgttcttggtagtatagagcaagctaaagcaaaagcagctctagaaggtctcaagaagattagtgaacttctacgacgaatctaa

SEQ ID NO: 4111 - DNA, 1017 bp, Oryza sativa
atgactgtcatgccatctctgcgccaccgggctgtcgccaagaagcccaaatggataatcattcttgtgtcactggtttgttttgtattgattggggcatatgttttcccaccacggcggtattcgcaatgctacctcttcggttctggtgcatgcgcaactttcaaggattggctcccatctgtaacccgcagggagcggactgatgaggagatcatttcatctgtagttcttagggatatccttgcaatgcccatgccagtgtcgaaaaatccaaagatcgctcttatgttcctgacacctggtacactgccctttgagaaattatgggaaaagtttttacagggtcaggagggaagatactccatctatgttcatgcatcacgtgaaaagcctgtacatactagttctttgtttgttggtcgtgatattcacagtgacgcggtagtatggggaaagatttcaatggttgatgcagagaagagactattggccaatgcactggcagatgttgataaccagttctttgtgttgctttctgacagctgtgttccactgcatacatttgattatgtctataattatctgatgggaacaaatatcagcttcattgattgtttccgtgatcctggccctcatggaaacgggaggtattctcctgagatgctccctgaaattgaggagaaagacttcaggaagggtgcccagtggtttgcaattacacgaagacatgctctactgattctggcagacagcctttactacaaaaagttcaagttgtactgcaagatggtagatcctggtggaattgctaattggtcagttacacatgttgattggtctgagggaaaatggcatccgaggtcatatagagctgcagatgtcacctacgatctcttaaagaatataacagctgttgatgaaaatttccatgtaacaagtgatgacaaaaaacttatgacacagaagccatgcttatggaatggatcgaagagaccatggctatctttttgctag

SEQ ID NO: 4112 - DNA, 1095 bp, Oryza sativa
atggcgccggcggccggggacgacgcggtggtgccgcgaaagggagctggaggtggggggacgacgacgccgccgccgccgccaccggcgcagcagcagcagcagcagccgctcccgccgccgccgccgcaggagcaggggttgcggtgcccgcggtgcgactcgccgaacaccaagttctgctactacaacaactacagcctcagccagccgcgccacttctgcaagacgtgccggaggtactggaccaagggcggcgcgctccgcaacgtcccagtcggcggcggctgccgcaagaacaagcgatcccgctccgcggcggcggcatcgcgcctctcgctcaacctgccgacgcggccgaaccccgctgcggcggctgctgccaggctggggtttcttggcggtggaacaacgatgatgatgtcgtcgtcgacgtcgccgctcggtggcgccgccgccgcggtggccgacttccagcagggcggcgccgtcgggatgctgccgctgccgcggctccaatcccccgccggcggcggcgtcgggcatcatcagtacgtgccgttcggggagtggccctcgggggacattgccggcggcaacgcggtgaacggcggcggcggccacggcgcggtgagcagcaccatcgcgtcgtccatcgagtcgctcagcttcatcaaccaggacctgcactggaagctgcagcagcagaggctcgccaccatgttcctcggcccgccgggctccgcctccgccgccgccgccgccgcccaggccaacgacggtggcggcaacggcgcccaagccacagcgtcagggcatgctgccggaggaggcggtggcgccttcatgcacatggctggtagtgttcccagcatggaggcggccatgccgtcggcgacgtcgtggttcatggacagctgctcctacgggctcccttccccaccgccgcctgccactgccgccgtggccgccaccaccagcagtaacctcaacagcggcggccggagtagcggcggcgatgataacgccacctccaactgcggcagcgcgatcccggcgtggggcgacatctcgacgttcgcgatgctgccctag

SEQ ID NO: 4113 - DNA, 678 bp, Oryza sativa
atggcgccgatgaaagtgtacgggtgggtggtatcgccatggatggcgcgggtgctggtggccctggaggaggccggcgccgagtacgaggtcgttccgatgagcaggtccggcggcgaccaccgccggccggagcacctcgccagaaacccgttcggtgagattccagtactggaggatggcgacctgacgctctatcaatcgcgagcaatcgctaggtacatctttcgcaagtacaaaccagagttcctgggactcggagaaggtggaagcctggaggagtcggcaatggtggacgtgtggctggacgtggaagcccaccagcacgaggccgccgtgaggcccatcctgtggcactgcatcatcaacaagttcgagggccgcgaccgcgaccagggcgtcgtggacgagagcgtccggaagctggagaaggtgctcggggtgtacgaggcgaggctgtcgggctccaggtacctcgccggcgaccgcatcagcctcgcggacctcagccacttctccaacatgcgctacttcatggcgacggagtacgccggcgtggtcgacgcgtacccgcacgtgaaggcgtggtgggaggcgctgctggccaggccgacggtgcagaaggtgatggccggcatgccaccggatttcggcttcggaagtgggaacataccatag

SEQ ID NO: 4114 - DNA, 600 bp, Oryza sativa
atggcgcctgtgaaggtgtttgggccggcgaagtcgaccgccgtggctcgggtgctggtgtgcctggaggaggtcggcgctgagtacgagctggtcggcatacacatccccgccggcgagcagaagagcccggcgcatctcgcccgcaacccattcggtcaagttccagctttccaagatggcgatcttatccttttcgacttgctgaaggaaagcaacctctcgcagtctgcaataatggtcgatgtgtggctcgaagttgagtcccaaactttcgacactgccatgtcagcaatcactttccaatgcttaacaatacccactttcatgggcggaattgctgacgacaaaatcgtggaggagaatttggggaaactgaagaaagcccttgaggtttacgaggcacgctcgtgcaggttcaggtacttggccggtgatttcatcagcctggcagatctcagccattttcctatgacgcactacttgttagctactcctcatgcatcagtgctcgatgcatacccacatgtgaagtcttggatcaatgatttgatgaagaggccggctgtgaagagggtgagagagcttatggaggcatga

SEQ ID NO: 4115 - DNA, 650 bp, Oryza sativa
atggcgccggcgaaggtgtacgggccggcgatgtcgacgaacgtgatgcgcatcctggtgtgcctggaggaggtcggcgccgagtacgaggtcgtgcccgtcgacatgtccaccggcgagcacaagcgcccgcctcatatctcccgtaacccctttgggcaggttccagcgttcgaggatggcgacctgactctgttcgagtcccgcgcaatttcaaagtacatacttcgcaaacatggatctgacctactaagggagagcaacctctctgagtctgcaatggtggatgtttggctggaagtcgagtcgagccatttcgacggcgcgatgtcgccgatcatcttccagtgcttcatcgtccccatgttcatgggtggagcaactgacattggagtggtcaatgagagcttagagaagctgaagaaagcccttgaagtctacgaggcgcagctgtccaaatccaagtacttagccggggatttcattagcttggcagatatcagccatttcccgacggtttattacctgctggcatctgcccatgcttctgtgctcgaagcctatccgcgtgtgaaggcttggatcgatgatgtgatgcagaggccgagcgtgaagaaggtgacagaggctctgaagatgccgtctgctta

SEQ ID NO: 4116 - DNA, 600 bp, Oryza sativa
atggacaatagcatgcctgtagttagcaagattttttgctcaagtactttgacaacactgatgatcaggagaagacccaccgtcgtgaatggtggtggttttgttgttactgacctcggtaataatgttgttttcattgttgatggttgtggaatactaggatccaagggagaattgctggtgaaagatggtgatggagaaccaatactgtttatttctagaaagggaggaattatccaggctctaagcacatggaacaaatggaatgggtactcaatggactaccaaggaaaaaagaagttgatttttagcctaagtgatccaaaatcatgcatagcaaaaggtgctccaattagaatacacattgaacccaagaggcactgcaaaaattgggacttcgagatcagtggatcttttgcagatagaaactgtacaataactgattgcactggcacaatagtaggccagatggggaagacagagcagataggaaccaatgacttctaccatgtggtagtgcagtcaggctgtgacaaggctttcatcattggggcaatggcggttcttgacaacatccatggagaatccaccagatgctga

SEQ ID NO: 4117 - DNA, 1647 bp, Oryza sativa
atggcagcggcggcggcggcggcggaggcgaagcaccggaaggaggaggaggaggacgaggaggagatgacgctggaggacggcgacatcgaggagagcccgcgccgcagcttcgacgacgactacgaggacggcgggagcggcgacgacgaccgggatgacgacggcgaaggtttgggatcgcctcgctcgttccagtcccgccagtggccgcagagctaccgagaaacaactgacacctatacaattgctgcatctccgagctttggttacttgggtccctctacaagcaaatactcgatccttgatggtggtcgtagtagtctgggatccgacctgaagttgcccttgttgtctgataagctagatgggaagcaagactctgtcaagagcttgagaaagactcttggttcagcaatagataggaaaagctcgttacttacgcaacatactggagaagtctacatcgctcaaggatgcagtgtgacacagacggtgttcaatggggttaatgtacttgctggtgttggacttctttccactccatttacaattcatgaagctggatgggtaggccttgcggtcctagctatgtttgctattgtttgctgttatactggagttctgatgaaacactgttttgagagcaaagatggtatttctacatatccagacattggcgaggctgcttttggaaggattggtcgtctgctgatctctattatactctatactgagctatattcatattgtgtggaattcattattttggaaggagataatatgacatcaattttctctcatattggttttgattggcttggcgtccatattgatgggaaacatttctttggagtgttgactgctctaatagtcttgcctacagtatggttgagagatcttcgggttctctcctacctttctgcgggtggtgttattgcaactcttcttgttttcctctctgtcgttttagttggcgctactgatggcgtagggtttcatttgactgggaaagcagtaaacttaggtggtataccgtttgctattggcatttatggtttctgctactctgggcactcagtgtttccaaatatttaccaatcaatgtcagaccgcacgaaattcactaaggcactgtttatatgctttgcaatttgcacagcaatatatggctcgtttgctatcattggctatctcatgttcggagataaaactctctcgcaaataactctgaatcttcctaaacattcatttgcctccaaggtcgcactgtggaccacggttatcaaccctttcaccaaatatgccctgttgttaaacccattggctcggagtttagaggagttgcgccctgaaggatttttgaacgaaacaatctgctctattatactgaggactgcccttgttgcatcaaccgtgtgcattgcgtttcttatgccatttttcggtctcgtgatggctcttattggatctctgttgagtatacttgtggccgtcataatgcctgcactgtgcttcttgaagattaggcaaaataaagcaacgactgcccaggtcgttgcaagtattggtataataatattgggcaccataagcgctgctcttggaacatattcgtcggtactcagaattgtggagaactactaa

SEQ ID NO: 4118 - DNA, 2400 bp, Oryza sativa
atggcggaggagggggaggagaggcggcggttctcgaatcttcgcggcgtccggtggcgggtcgatctcggcatcctgccggcttcgccgggggcgtcggtggacgagcaccgccgcgccgccgccgattcgcggaggagatatgttagtttgagacgacgtcttctggtagaccctcatgttccgaaggaggagggcagatcatcaaacctcattgtcgacaacccgctatctcagaaccctgatagtagctggggtcggtttttcagaggcgcggagttggaaaaaaccgtagatcaagatttgtctcgtttatatcctgaagatggaagttactttcaaacgcctacttgtcaggccatgctgcgtcgaatactattgatgtggtgccttcagcacccagaacatggataccgccaaggaatgcatgagctattggcccctctagtgtatgttcttcaagttgacattgacaaactatctcaagtacgaaaattgcatgaagattgcttcaatgatgattttgatggagttcctttcccagataccgatatggttttcagctataaacctagaaaggacccaaaatggagttttggagctgacaatcagaatgattctgaacgatcttccaaaagtaacactcttgatgagcttgatccggacacaaaagaaataattttacttagtgatgcatatggcgcggaaggcgaactaggcattgttttgtcagaaaggtttatggaacatgatgcctattctatgtttgatggtttgatggatggaggtagcggagtggtacgcatggcagagtttttctccccatcctctgttggatctagctcaaatctaccacctgttattgaagcctcatcagcattatttcatttgctctcaattgttgagccaaccctccataatcatttcattgagttgaaagtggaaccacagtggttcgcacttcgttggttgcgagtcttgtttggacgagaattctgcctcaatgatcttttggtagtatgggacaaagtttttgcttgttcaaacaatatgctgctaagtagtgatgaggaatataactttcgtatcttgtgttcagatagaggagcatttattgcagccatggcagtttctatgcttcttcatattagagggatagctatgagtttgacagagttcacagcaatctctcttcttcaactcctccgagaactccattgcatcctgtttctgagagttactgggaagagaagtggaggaatgtgcacaaggacggaacaacccccaaggaggttgagaggggcaattcttttagtaaacaatttaaagaaatctttgacccagaagcttggtttatctaggacagagtcagatccttctccagtgaaggtcctcagtgtgagtagtaatgatactcggaattcagaagacgaattccctatcatctcagttcacagggagcatcctctgagctctgcagagccttccaagttaaaggcagctggtgaaaatgtaactgtgagcgcatcatgtgtggcaaaactcagccctctaaaaaaatctgtggttgagccagctaatgagaacgcaacacaggggacaaagacacggattctgagagtagccagtgttacctcaaattcctttgctggtgaccatgatagggatgaaattctgaaagatgagccatccagctctaatgatgataacaaaaccatccaagattcagaagcagcatcttctgataaaagtccagaccgaaatggaacctctgagagggctgtcgtttctaatgaaagaaagccattcattagtaaattccagtggctcttgaagttgggaagaccttcggttgaaggcaacatggagaagagtagtggagagacatcagctgataaacaagacggggacacatcctgttctccttctgatgggaattcaaataactcccgtggtagcgtaaagttggcttctggtgataaaaaggtcatgggcagcctaaagaatcttggacaaaacatgcttgaaaatatccaggtgattgagtcggcatttcagcaagaccgtggtcagcctggccctgtggagaacttctcaaacaacattcttggaggcaaaggacagattcgattcgattccattccattgagtaaatcatttcatgtgcagtaccattcagaagcattgtatttggcaacaataagaaaaatcactgctgctctttctggcttccagtgcgatatccagggcattgcaccaaattgttcagagattttgttggcagctgtattatttattagctgggctcatgctgtccatgcatcctggcacaacccagagacagaaatgcagcaaatgctgatgtttctttcacgcatactttccatatggctatggtag

SEQ ID NO: 4119 - DNA, 1377 bp, Oryza sativa
atggcgtcgcgcgacctcgccgagagcctcctccccgtggggggcggcgccgccaccgccaccgccaccgccaccgcccacgacgagtacgacgagcgcgcgtacgactccgacgacaaggtctccatcgccgtctcggactccgactcggaggacggcggcggcggcggcggcgacgccatgcscccggccttctcgtggcgcaagctgtggcggttcacggggcccgggttcctcatgtgcatcgcgttcctcgacccggggaacctggagggcgacctgcaggccggcgcggcggcggggtaccagctgctgtggctgctgctgtgggcgacggtcatgggcgccctggtgcagctgctctccgcgcggctcggggtcgccacggggaagcacctcgccgagctctgcagggaggagtacccgccctgggccaacgcgcgcgctctgggccatgaccgagctcgcgctcgtcggcgcggacatccaggagtgattggcagcgcgattgccatcaagatcctttccgctggcaccgtcccgctctggggcggcgtcgtcatcaccgcgttcgattgcttcatctttttattcctggagaactatggagtgagaaaattggaagcatttttcggagtcctgattgcagtcatggcagtatcatttgcaattatgtttggtgaaacaaagccaagtggcaaggagcttctgattggtttggtggttccaaagttgagttcaaggacaatcaaacaagcagttggaattgtgggctgcataatcatgccccacaatgtcttcttgcactcagcactagtgcagtcaaggaagattgacacaaacaagaaatcccgtgttcaagaagcagtgttctattacaacattgagtccattcttgccctcattgtctcgttctttattaacatctgtgtcacaacagtttttgcgaaaggattttatggatctgaacaagctgatggtataggtcttgagaatgctggacagtacttacagcagaaatatgggactgcattctttcctatactgtatatctgggctattgggctgttagcatctggacagagtagcactattactggcacatatgcaggccaatttgttatgggaggcttccttaatcttcggttgaagaagtggttaagagcaatgattactcgaagctttgcaattattccaactatgattgtggctttattttttgacacggaggatcctacaatggacattctgaatgaggcactcaatgttcttcaatccatacagataccatttgcactgattcctctcatcacacttgtctcaaaggagcaagtcatgggatcatttgtggttggtcctatcacaaaagtcatgtga

SEQ ID NO: 4120 - DNA, 2570 bp, Oryza sativa
atggcggaggcggtggatgggggcagctgggaggacatgctgaggaggatcctcccgccggggtccccaatcccggaggcgccgccgaatctcgattactccatagccctagagtacgacggcccaccggtggcctatgacctacctagggtggaccccgtcgagatccccacggcggagccggtgtccggcccgcagaggcttgggaacggaggagggttgccggttgtggagcccatcccgctcccagtgtcccggattgcccggtgcgccgagcccgtgtcggcgcaggtcggcggcggcagctcggattcggtcaattcggtactgcagaatgaggagtttgacgatgatgatgatgattcccgctcgttgtcgcatgattcagcgcagagctcgccggggccgcaggataggagccgccggacgcaggaggggaggagaggcgccacggtgacgttcgggttcacgccggacagcaagtgtgagagcaaggagttcgaggagatgtccgagcagtacgtggtggtgaccaagaaggagaagaggaggagggcgtgctatcggtgtgggaagaggaaatgggagagcaaggaagcgtgcatcgtgtgcgatgcgaggtactgcggctactgtgtgctgaggatgatggggtcgatgccggaagggcgcaagtgcgtcacttgcattggccagccaattgatgagtccaagcggtcaaagctagggaagaactcaaggacactctcaaggttacttagccccttggaagtaaggcaaatattgaaagccgagaaggagtgccaagcaaaccagcttcggccggagcaacttattgtgaatggttgtccactggggccagatgagctgacagacctgcttagttgctcccggccacctcagaagctgaagcctggaaagtattggtatgacaaggagtcaggtttatggggaaaggaaggagaaaaaccggaaagaattattagttctaacctcagctttactgggaagcttcaggctaacgccagtaacggaaatacccaagtttatataaatggaagggaaataacaaagattgagctgaaaattctaaaggttgcaaatgttcaatgtcctcgtgatactcatttttgggtttatgatgatggtcgctatgaggaagaaggacagaacaacatcaaaggaaaaatctgggagtcggctttgacacgttttgcatgcgcattattttcacttccggtgcctcctgggaactctaatgaaacgagagatgaagttcactattctgcaagaactgttcctgattatttggaccagaaaagaatccaaaagctgctgcttcttggaccagatggtgctggtacaagcacaatttttaaacaggctaagtacttgtacgggacaagattcacccaagaagaacttgaaaacatcaaactgattatccaaagcaatatgttcaagtaccttggaattttgcttgagggtcgtgaacgctttgaggaagaagctttatctagatcaaattgcacaatttcagaggatgaagaaacccaacaagatgaaaataaagcaaatggttcaaattcctgtatatactcgataaatccaaggctgaagaaattctcagattggcttttggatatcatagcgatgggcgatctagatgctttcttccctgccgcaacgcgagaatacgctccatttgttgatgagatgtggaaggatcctgccatacaagcaacatataaaagaaaggacgaattgcatttccttcctgatgttgctgagtacttcttgagcagggccattgaggtatcgagcaatgagtatgaaccttcagagaaagatgtgatctttgctgaaggtgtaacacaagggaatgggttggctttcattgaattcgcccttgatgatcgcagtcccatgtctgagccttacattgagaaccctgaagcacattcccagcctcttaccaaatatcagttgattagagtaagtgccaagggcatgaatgatggctgcaagtgggtggaaatgtttgaggatgtccgcatggtgatattctctgtagccctcagtgactatgaccaagtgggacctcctgtatatggcagcagtcggcctctcttgaacaagatgatgcaaagcaaagagttatttgaggctacgattcggcaaccatgcttctgcgatactcctttcgtcctggtactcaacaagtatgacctctttgaggagaagatcaaccgcgcacctctaacgacctgcgagtggttcaacgacttctccccggtgcggacacaccacaacaaccagtcgctcgcccagcaggcgtactactacgtagcggtgaagttcaaggacctgtactacgagcacacgggccggaagctcttcgtgtggcaggcgcgtgcccgtgaccgccagacggtcgacgaggcgttcaagtacgtgagggagatcctccggtgggaggatgagaaagaggagaacttgtatggcggcggggaagactcgttctacagcaccacggaaatgagctcctctcctttcatccgagcagaatg

SEQ ID NO: 4121 - DNA, 987 bp, Oryza sativa
atggagcacgacggcacggcggcgctcggctgggcggcgcgggacgcctccggccacctctcaccgttcagcttcacaagaagggttcaggaggaagacgacgtgacgatcaaggtgctctactgcggcatctgtcacaccgacctgcacaccatcaagaacgagtggggcaacgccatgtaccccgtcgtccccggccacgagatcgtcggcgtcgtcgccggcgtcggcgccggcgtgaccaggttcaaggccggcgacacggtgggcgtgggctacttcgtcgactcgtgccgcgcctgcgacagctgcggcaagggggacgagaactactgcccgacgatggtgatcacgtcgaacggcacggactacggcggcgccaccacccagggcggtttctccgacgtcatggtcgtgaggcaggactacgtgttgcgcgtcccggcgagcctgccgccggacggcgcggcgccgctgctgtgcgccggcgtgacggtgtacagtccgatggtggagtacggcctgaacgcccccgggaagcacctcggcgtggtcggcctcggcgggctgggccacctgggcgtcaagttcggcaaggcgttcgggatgaaggtgacggtgatcagctcgtcgccggcgaagcgggaggaggcgctggagcggctcggcgccgacgckttcctgtcgagccgcgacggcaaggggatggcggcggcggcggcgacgatggacgggatcatcgacacgctgcccgcgatcgccatcatcgatggcgggaagcgcgtcgccgggagcggcgggggcagcgtggccgagtgccaggcgatgctggacttcgccggcgagcacggcatcgccgcggacgtcgaggtggtcgccatgggcgacgtcaacgccgccctcggccgcctcgagaggaacgacgtgaggtaccgcttcgtcatcgacgtcgccggcaccctgcacgccgccgccgcgccgtcctag

SEQ ID NO: 4122 - DNA, 1152 bp, Oryza sativa
atggaggagcatggcaaggcggctgtcggctgggcggccagggacgactccggcgtcctctccccgtacaacttctccaggagggctcagaaggacgatgacgtcaccatcaaggtgctctactgcggcatctgccacaccgacctgcacgtcgtcaagaacgattggggcaacgccatgtaccccgtcgtccccggccacgagatcgtcggcgtcgtcaccggcgtcggcgccggcgtgaccaagttcaaggccggcgacacggtgggcgtgggcttcttcgtcgggtcgtgccgcacctgcgacagctgcggcaaggggtacgagaactactgcccgacgatggtgatcacgtcgaacggcaaggactacggcggcgcggccacccagggcggcttctccgacgccatcgtcgtgaacgaacactacgtgctccgcgtgccggcggggctgccgctggacggcgcggcgccgctgctgtgcgccggcgtgacggtgtacagcccgatggtgatccacgggctgaacgcgccggggaagcacgtcggcgtggtcggcctcggcgggctcggccacgtcgccgtcaagttcgccaaggcgttcgggatgcgcgtcaccgtcatcagcacgtcgccggggaagcggcgggaggcgctggagcacctcggcgccgacgagttcctcgtcagccgcgacgcgggccagatggcggcggcggcgggcaccatggacgggatcctcaacacggtgtcggcgtggcacccggtcgcgccgctgttcgcactgatgaagccgatggcgcagatggtgttcgtcggcgcgccgaccaggccgctggagctgccggcgtacgccatcgtcccgggagggaagggcatcaccggcaactgcgtcggcggcatcagggactgccaggccatgctcgacttcgccggcgagcacggaatcaccgccgaggtggaggtgatcaagatggactacgtcaacaccgcgatggagcggctggagaagaacgacgtccgctaccgcttcgtcatcgacagttgcagaacttctgaagttctgagtgtcaccatctccggaagaaatcttctaatccttcactgttcaatgtcgcagcacgagctgaatgagccaacagctcatgattag

SEQ ID NO: 4123 - DNA, 1095 bp, Oryza sativa
atggaggagcatggcaaggcggctgtcggctgggcggccagggacgactccggcgtcctctccccgtacaacttctccaggagggctcagaaggacgatgacgtcaccatcaaggtgctctactgcggcatctgccacactgacctgcacatcgtcaagaatgattggggcaacgccatgtaccccgtcgtccccggccacgagatcgtcggcgtcgtcaccggcgtcggcgccggcgtgaccaagttcaaggccggcgacacggtgggcgtgggctacttcgtcgcgtcgtgccgcggctgcgagtgctgcgggaatgggtacgagaactactgcgccaagatggtaaccacctgcaacggcgtcgaccacgaccacggcggcggcgcggccacccagggcggcttctccgacgccatcgtcgtcaacgagcactacgtgctccgcgtgccggcggggctgccgctggacagcgcggcgccgctgctgtgcgccggcgtgacggtgtacagcccgatggtgatccacggcctgaacgcgccggggaagcacgtcggcgtcgtcggcctcggcgggctcggccacgtcgccgtcaagttcgccaaggcgttcgggatgcgcgtcaccgtcatcagcacgtcgccggggaagcggcaggaggcactggagcacctcggcgccgacgagttcctcgtcagccgcgacgcgggccagatggcggcggcggcggccaccatggacgggatcctcaacacggtgtcggcctggcacccgatcgcgccgctgttctcgctgatgaagccgatggcgcagatggtgttcgtcggcgggccgaccaggccgctggagctgccggcgtacgccatcgtgcccggagggaagggcatcaccggcaactgcgtcggcggcatcagggactgccaggccatgctcgacttcgccggcgagcacggcatcactgccgaggtggaggtcatcaagatggactacgtcaacacggcgatggagcggctggagaagaacgatgtccgctaccgcttcgtcatcgacgttgccggcagcagcctcgccggctccggcgacgccaagatataa

SEQ ID NO: 4124 - DNA, 660 bp, Oryza sativa
atgaccagttatgtatataaagggaagttgacttttgggatttgggaagataatgttttattcgactaccttttcaaacttctcctcattggtgattctggtgttgggaaatcgtgcttgcttctcagatttgcggatgattcatacctggacagctacatcagcacaattggagttgattttaaaatacggacagtagagcaggatgggaagaccatcaagcttcaaatctgggatactgctggacaagaacgtttcaggacaattacaagcagctattaccggggagctcatggaattattattgtatatgatgtgacagaccaagaaagcttcaacaatgtgaagcagtggttgaatgaaattgatcgttatgcaagtgacaatgttaacaagctcctcgttgggaacaagagcgacctaactgccaacaaagttgtgtcatctgaaacagctaaggcgtttgctgatgagatgggcatcccattcatggagacaagtgccaagaacgccactaatgtggagcaggcctttatggctatggctgcatccatcaaggacaggatggcgagccaaccggccgctgcaaatgcaaggccaccgacggtgcagatccgcgggcaacctgtcaaccagaagacgtcgtgctgctcgtcctaa

SEQ ID NO: 4125 - DNA, 3330 bp, Oryza sativa
atggcggcatccgtggcgagggtgttgctcgcggcggcggtcttctttgccgctgtcgctgccgccgccgcggcgtcgtcgtcggcggcggcggtggcggcgttgatggagttcaagaccaagctggacgacgtggacgggcgcctctcgagctgggacgcggcgggcggcagcggcggcggcgacccgtgcgggtggcccggcattgcctgctccgccgcgatggaggtcaccgcggtgacgctccacggcctcaacctccacggcgagctctccgccgccgtgtgcgcgctcccgcgcctcgccgtcctcaacgtgtccaagaacgcgctcgccggcgcgctcccgcccggcctcgccgcgtgccgcgccctcgaggtgctcgacctcagcaccaactccctccacggcggcatcccgccgtcgctctgctccctcccgtccctccgccagctgttcctcagcgagaayttcctgtccggcgagatcccggcggccatcggcaacctcaccgccctcgaggagctcgaaatctacagcaacaacctcaccggcgggatcccgaccaccatcgcggcgctccagcgcctccgcatcatccgcgcagggctcaacgacctctccggcccgatccccgtcgagatcagcgcgtgcgccagcctcgccgtgctcggcctcgcccagaacaacctcgccggcgagctccccggcgagctctcccgcctcaagaacctcaccacattgatcctctggcagaacgccctctccggcgagatcccgccggagctcggcgacatccccagcctcgagatgctcgccctcaacgacaacgccttcaccggcggcgtccccagggagctcggcgcgctgccatccctcgccaagctctacatttaccggaaccagctcgacggcaccatcccaagggagctcggcgacctccagagcgccgtcgagatcgacctctcggagaacaagctcaccggcgtcatccccggcgagctcggccggattccgacgctccggctgctctacctcttcgagaacaggttgcaaggaagcatcccaccggagctcggcgagctcaccgtcatcaggaggattgatctgtccatcaacaacctcaccggcacaattccaatggagtttcagaacctcaccgatttggagtacctgcagctgttcgacaaccaaatccatggtgtcatccctcctatgcttggtgcaggcagcaacctttcggtgctcgatttgtcggataatcggctgacggggagcatcccacctcacctttgcaagttccagaagctcatcttcttgagcctcggatcgaaccgcctcatcggcaacatccccccgggcgtgaaggcttgtaggacattgacacagctccaattgggggggaacatgctcaccgggagcctccccgtcgagctttcgctgctgcggaacctgtcgtcgcttgacatgaaccggaaccggttctcgggaccgataccacccgagatcggcaagttcaggagcatagagaggctgattttgtcggagaattactttgttgggcagatccctcctggcattggcaacctcaccaagcttgtcgccttcaatatatcgtcgaaccagctcaccggaccgattcctcgggagctggcgcggtgtacaaagctccagaggcttgatctgagtaagaactccctcactggagtcattcctcaggagcttggcacactggtgaacctggagcaactgaagctatctgacaatagtctgaatggaaccgtaccaagcagtttcggaggcctttcccggctcaccgagctgcagatgggaggcaaccgcttgtccggccaattgccggtcgagcttggccagctcactgcgctccagattgcgctgaatgtcagttacaacatgctatctggtgagatcccgactcaactaggaaacttgcacatgctggagttcctttacttgaacaacaatgagctagaaggtgaagtcccttcctcattcggagagctctcgagtctgctggagtgcaacctttcttacaacaatcttgccgggccgcttcccagcaccacgctgttccagcacatggacagcagcaatttcctgggaaacaatggcctttgtggtatcaaagggaaatcatgttcaggattatcagggtcagcctatgcaagcagggaagcagcggtgcagaagaagcggcttctcagggagaagatcatcagcatttcctccattgttatcgcgtttgtctcattggtgttgatcgcagtcgtttgctggtccttgaaatccaagatacctgatcttgtatcgaacgaagagcgcaagactgggttttcaggtcctcactacttcctgaaggaacggataacctttcaggagcttatgaaggtgaccgacagcttctcagagagtgccgtaattggaaggggtgcttgtggcactgtctataaggctatcatgcctgatgggagaagggttgcagtgaagaagctgaagtgccagggagaaggttccaatgtcgatagaagctttcgagctgagataaccacactcggaaatgtcaggcaccggaacattgtcaagctgtatggtttctgctccaatcaggactgcaatcttatcctgtatgagtacatggcaaatggtagccttggagagttgcttcatggtagcaaggatgtgtgtctactggactgggacacccgttatcggatcgctctcggggctgcggaaggtctgaggtatcttcacagtgactgcaaaccgaaggtgattcaccgtgacataaaatcgaacaacatattgcttgatgaaatgatggaggctcatgtaggggactttggcttggcaaaactgattgatatttccaactccagaacaatgtctgctattgccggttcatatggctacattgcaccagagtatgcttttaccatgaaggtgactgaaaaatgtgacatttatagcttcggggtagtcttgttggagctagtgacgggacaatctccgattcaacctcttgagcaaggaggggatcttgtcaatctagtgaggcggatgacaaacagttcgacaacaaattctgaaatttttgacagcaggctgaatctgaactcaaggagggttctggaagaaatttcactggttctgaagattgcattgttctgcaccagcgagtcgccactagataggcctagcatgcgtgaagtaatatcaatgctgatggatgccagagcctctgcttatgattcyttttcgtctccagcatcggaggcgcctatagaagatgattcttctcttaaacattag

SEQ ID NO: 4126 - DNA, 1143 bp, Oryza sativa
atggagtgggaggaggagagcgaggcggcgcgtcagaaggcggcggcggcgtcggcgtcggtggtgcccgcgccgttcctgaccaagacgtaccagctcgtcgacgaccccgcgaccgaccacgtcgtgtcgtgggaggacgacgacggcggcgagtccgcctccagcttcgtcgtgtggcggccaccggagttcgccagggacatcctccccaactacttcaagcacagcaacttctcctccttcgtccgccagctcaacacatatgggtttaggaaggtcgtgccggagaggtgggagttcgccaacgagttcttcaggaagggcgagaagcagctgctgtgcgagatccaccggcgtaagtccgcggcggcaacgtggccaccgttcccgccgccgccgccgcctttctttgccccgcgccatttcgcggccggtgccttcttccgccacggggatggcatgctccatggccgcttgggcgcgttggtgacgacgacggagcggcgccattggtttgagagcgcggcgttgccggtggcgccgtcgtcgcggctgctctcgcagctggggccggtgatcgcaccggcgcgccgcgcggcggcracgccggaggaggaggcgctgatgcaggagaaccaccggctgctacgcggcaacgcggcgctggtgcaggagctggcgcacatgcgcaagctctacagcgacatcatctacttcgtgcagaaccacgtgcgtcccgtggcgcccagcccggccgcggcggccgcgctgcacggcctcggcgttctacggccgccgccggcgggcgggaaggcgcccgcgtccgaggtgcgcggcgcctccggccggagcgccacgtccagtagctcgctcacggtggccgaagaccagcccacgctgctggctctgcggctgccgcggacgacggagaagatcatcaacgaggtgtccggcggcaacggcggcggcagcaccaagctgttcggcgtgcacctgagcagcgccgacgagcagacgtcatcaggcgcgagccgcaagagatcaccgccgcaagagcagcctcctacgtcgccggcgccgaagcggacgctggtggtggagcacagcgagctgagattgagcatcgtgtcgccaccgtag

SEQ ID NO: 4127 - DNA, 642 bp, Oryza sativa
atgtctgtggaggatgtaacaaagttagtgagctccaacaggaagtttgatttgctagttttcgggttgcaagaggtaccaaaatgtgatgttgcacaggttctgcaagaaaccatggctgagacacacattctattatgccagaaaaccatgcagtctcttcagatgtttctttttggagcaaagagttcagagaaatacatcagagagttgaaggtggacaaacatgcagttggaggttgtggagacataacggtgtggcttggtgacttgaattacagactacagggaataagctcaataccagcaaggaagttgattgaagagaatcgtcaaagtaagctaagaggcaaagaccagcttctgcaagaagctgaaaagggtgaagtattcaatgggtactgcgaagggaccttgttgtttaagccaacgtacaagtataacatagggagtagcaactacgatacaagttataagatcagagttccttcttggacagataggatattattcaaggttgaccacacttctggcttggatgcggtcttaaactcatacgaagcacttgattgcattaggagttctgatcacaagcctgtgagagcccatctttgtctgaaagtacatggtgacagtgcatag

SEQ ID NO: 4128 - DNA, 828 bp, Oryza sativa
atgaagcggaagcggccggcggcgcttcgcggcggggaggaggcggcggcggcggcgctaaagcctgggccctggacgcccgaggaggaccaggtgctggcgcggttcgtggcccggaaagggtgcgaccggtggcgcaagctgccgcggcgcgcgggcctgctgcgctgcggcaagagctgccgcctccggtggatgaactacctccgccccgacatcaagcgctgccccatcgccgacgacgaggaggacctcatcctccgcctccaccgcctcctcggcaaccggtggtcgctgatcgccgggaggttgccggggcgcacggacaacgagatcaagaactactggaactcgcatctcagcaagaagctcatcgcgcagggcatcgacccgcggacgcacaagccgctgacggccgccgccgatcactccaacgccgccgctgccgtcgccgccacttcttacaagaaggcggtgccggccaagccgccgaggacggcatcctcgccggccgctggcattgagtgcagcgacgatcgtgcccgaccggccgacggtggcggtgacttcgcagcgatggtgagcgccgccgatgccgagggattcgaaggaggatttggcgatcagttctgtgccgaggatgcagttcatggtggcttcgacatgggttccgcttccgccatggtgggtgacgacgacttctcctcgtttcttgattctctgatcaacgacgagcagttaggcgatctcttcgtcgtcgagggcaacgatcacgagcatggcaatggtgagattggtcatggagacgtcatggaatccaaacagtaa

SEQ ID NO: 4129 - DNA, 2646 bp, Oryza sativa
atgatgtcgcggtcgtacaccaaccttctcgatctcgcggaggggaacttcgcggcgttgggcccgggaggcggcggcggcgggaggcggaggtcggggtcgttcgggctgaagcggatgtcgcgggtgatgacggtgcccgggacgctgtcggagctggacggggaggacgactcggagcacgcggcgacgaacagcgtcgcctccgacgtgccctcgtcggtggcgggggatcgagtcatagtggtctccaaccagctgcccgtcgtcgcacgccgccgtcccgacggccgcgggtggtccttctcatgggacgacgactcgctgctcctccagctccgcgacggcattcccgatgagatggaggtgttcttcgtcggttccctccgcgccgaaatccccgtcgccgaccaggaagaggtctcccaggcgctgctcgatcgcttccgatgtgctccggtgttcctccccgaccccctcaacgaacggttttaccaccgcttctgcaagcgccacctatggcctctgttccactacatgctccctttctcctcctccgcatccccgatggcccacttcgaccgcggcgcgtgggaggcctacgtgctcgcgaacaagttcttcttcgagaaggtcgtggaggtcatcaacccagaagacgactacgtatgggttcacgactaccatctcatggcgctgcccaccttccttcgccgccgcttcaaccgcctgcgcatcggcttcttcctccacagccccttcccctcgtcggagatctaccggaccctccctgttcgcgaggagatcctaaaggcgctgctcaattgtgaccttattggattccacacttttgactatgccagacatttcctctcttgttgtagtaggatgctgggaattgaataccagtcaaagcgtggatacattgggttggattactttgggcgtaccgttgggatcaaaatcatgccagtgggagttcatatgggtcaattgaagacggttctgagcttgcccgacagggaatggagggtctccgagctgcagcagcaatttgaggggaagactgtgttgctcggtgtggatgacatggatatcttcaagggtatcaacttgaagcttcttgccttcgagaatatgttgaggacacatcccaagtggcaggggcgggcagtgttggtgcaaattgctaatccggcccgtggaaagggtaaggatcttgaagccatccaggctgagattcatgagagctgcaagaggattaatggagagtttggccagtcaggatacagccctgttgtcttcattgaccgtgatgtgtcaagtgtggagaagattgcctactacacaatagcagaatgtgtggtggtgactgctgtgagggatgggatgaacttgacaccatatgaatatattgtctgtaggcaggggtctgactccacatcagaagtgaatggaccaaagaagagcatgctggtggtatcagaattcattgggtgctcaccatctctgagtggtgctatccgggttaacccatggaatatagaggcaaccgcagaggcactgaatgaggccatatcaatgtcggaacaggagaaacacctaaggcatgagaaacattaccgttatgtcagcacccacgatgttgcttattggtcgaaaagtttcatccaagatttggagagggcttgcaaggaccacttcaggaggacatgttggggcatcgggttggggtttggttttagggtggtggccttagatccccatttcacaaagcttaacatggattcaattgttatggcttatgagcggtcagagagtagggctatatttcttgattatgatggaacactggtgccacagacttccatcagtaggacacctagtgcggaagttttgaggatcatcaataccctgtgctcagataggaggaacaaagtttttcttgtcagtgggagacgcagggacaaattgggagaatggttttcctcttgtccagatctgggcattgcagcagagcatggttacttcttaagtgcaaatggtgggaataagagtggactagagacgaagagtggcaaacatggtacccagacctctgacttcgggtggatggaaatggccaagccagtgatgaatctggatgctgacccaggatttggatcctcccaggcaaaggagttacttgatcatctggaaagtgtattagcaaatgaacctgtttctgtcaaaagtggccagttcattgttgaagtcaaacctcagggagtaagcaagggagtagtagctgagaagatactcgtctcaatgaaggagagaggaaagcaggctgactttgtattatgcattggtgatgacaggtcggatgaggacatgtttgaaaacattgctgataccattaaaaagggtatggttgctacaaacacatcattgtttgcatgcactgtgggacaaaaaccaagcaaggccaaattttacctggatgatacgtttgaagtggtcaccatgctgagcgcactggcagatgctactgaaccagaacctgagactgatcttaccgatgagtttgatgaactggccgtgtctgtctcctcagttgatattgatgatgaacaaacgcccagtgataaactgatcggaggatag

SEQ ID NO: 4130 - DNA, 1446 bp, Oryza sativa
atggaggggggcggcgggggcgggtcgctgccgccgttcctgagcaagacgtacgagatggtggacgacccgtcgacggacgcggtggtggggtggacgcccgccggcaccagcttcgtcgtcgccaaccagcccgagttctgccgggatctgctccccaagtacttcaagcacaacaacttctccagcttcgtgcgacagctcaacacctatgattttaagacagtacttgtgaataaccaaggtcaactcttgttctaccaagaaaattcaagtagcttattgcaatgttattgtcttctccatccggttgaagttgtacaaaaatgtttgataatgggctttaggaaagtagatccagaacaatgggaatttgcaaatgaggatttcataaaaggacagcggcaccggttgaaaaatatacatagacgcaaacctatattcagccattcatcacacagtcagggtgctggaccattaacagataatgaaaggaaagactatgaggaagaaatcgagaggctcaaatccgataatgcagcactgtcctcagagcttcaaaataatacgttgaagaaacttaatatggagaaacgaatgcaggctttggaagagaagctatttgttgtggaagatcagcagaggagtctgatatcatacgtcagagagattgtaaaggcaccaggatttctttctagccttgtacagcaacaagatcatcacaggragaagaggagactgccaataccatctccttccatgaggatgcatactcaggagaaccagatcatgccttgtgacttgaccaactcaccagctcagacattttacagagaatcatttgacaagatggaatcatccttgaactcattagaaaatttccttcgagaagcaagtgaagaatttggtaatgatatttcatatgatgatggtgtcccaggcccttcttcaactgttgttctcacagagctccattcacctggtgaaagtgatccccgtgtttcatcacctccaacaaggatgcgtacttcgtcagctggtgcaggagattcgcactcctctcgtgatgtagcagagtctaccagctgtgcagaaagtcctcctattcctcaaatgcattctcgtgtagatacacgagcgaaggtttctgaaatagatgttaattcagaacctgctgttacagaaactggtccatcaagagatcaacctgctgaagagcctcctgctgtcacacctggtgcaaacgatggcttctggcagcagtttcttaccgagcagcctggatcatcagatgcacatcaggaggctcaatcagaacggcgagatggaggaaacaaggtggatgagatgaaatcaggagatcgacaacatctttggtggggcaaaaggaacgttgagcagataacagaaaaacttggacttctcacctcaacggagaaaacctga

SEQ ID NO: 4131 - DNA, 2529 bp, Oryza sativa
atggatccatcgtaccctccctccgccaccgcccgccgcgccgccgccatcgcccgccacctcgccggcctctcccctcgcgacgccgccgccgttgctgcagcgctggagccctccgcgtgcctgagctacgcgcccccggagtcgtcggagcccgcccctgcgttytcgccgctggagctccgctcgctcctcgacgggcaccacctccgggagcgcgactgggcgttccgcgcgatggaggagagcccgctcttctgccagcgccgcagcggcggaaaggtgttcgtgtctccggactacaacgagggcaaggaggggcagcgggaggccacgatgcggcgggtcggctacctggcgcggcggggcgtgttccggggctggctcacggagccggggcccgacgccgagctccgcaagctcgcgctgctcgagtgcctcggcatgtatgaccactccctcgccatcaagatcggcgtccacttcttcctctgccggcgcgccgcagcgattgcccgccacctcgccggcattccggctgccaaattcgcctccctgctcgagccattctcctgcctgggctacgtgccgccggagtccaatgagcagcccccggcgttcgcgctaggcgacctccggaggctgctcgacgggcacgacctgggcgtgcgggactggatgttccgcgtcatggagcagagcacattgttctgcagccggcacgggggccccggacctgcaggcagggtgttcgcatcgccggacttcaacaaggacaaggaggggctgcgggaggcgaagatgaggcggatcgggtacctggcgcggcgcggcgtattccgtggatggctcacagacacggagggcgacgccgaggccgagctccgcaggatcgcgctcctcgactgcattggcgtctacgatcactcgctcgccatcaagatcggcgtccatttcttcctctggggcagcgcaatcaagtttcttggaacaaagcgccaccatgacaaatggttgtcggacacagaaaattatgttatcaagggttgtttttccatgacagaactgggtcatgggagcaatgtccgaggaattgagacagtggctacttatgatattaaaacaagagagtttgtgataaatactccttgtgaatcagcccagaagtactggattggtggagctgctaatcatgctacacatactatagtctttgcgcagctccatataaatgggagaaatgaaggagtccatgcttttgtagctcagattagggatgaacatgaaaatgttatgcctaatatccagatagctgactgtggccataaaattggattaaatggtgttgataatggacgaatttggtttaacaatatacgtgttcctcgagagaatttgctgaatcttgttgctgatgttttgccggatgggcaatatgttagcacgatagatgaccctgatcagaggtttgcagcatttttatctccacttacacttggtcgagttaatattgcagttaatgcggtttatatttcaaaggttggcgttgcaattgctgtgagatatgctttgtcaaggagagccttttcagttacaccggatggtcctgaaatgctgttacttgattatcccagtcaccagcgacgccttctaccactgctagcaaaagcatgtctgatgagcagtgctggtaattttatgaaaaggatgtatgtgaagaggactcctgaacttaacaaatctatacacatttactctagtgctcttaaagctacacttacctggcagaatatgaccacacttcaggagtgccgtgaagcttgtggtggccaaggtttgaagacagagaatcgcataggaattttcaaagctgaatttgatgtccagtctacatttgagggcgacaataatgttctaatgcagcaggtaagcaaagccctttatgctgaatttttgacagcaaaaaggaagaatcaaccattcaagggattgggcttggaacacttgaatggtccttgccctgttattcctgattatctgacaagtggcacactaagaagctccagtttccagatggacttgctctgcttgagggagcgagatttactgaaacgattcaccacggaggtttctaactatctggcacaaggagaaaacagagagaaggctttgatgctgagctaccaactcgctgaagacttagctagagcatttactgagcgcacaattttgcaaatatttttggaggatgagaagaatattcctactggttctttaaaggatatattgggcttactaaggtctttatatgttatggtttgcatagacgaatctgcatcctttttgagatatggttgcctatcgcgagagaatgtagccgctgctaggaaagaagtgatgacactgtgcagtgaactcaggccccacgcacttgctattgtcagttccttcggaatcccagatgccttccttagcccactcgcttttgactggattgaggcaaatgcacggtcttctgggaatgaatga

SEQ ID NO: 4132 - DNA, 2055 bp, Oryza sativa
atgagggggccggtgcggtgggcggtggtggtggtggtgatggcgatggtggaggcggcggcggggaggttcgtggtggagaagaacagcctgcgggtgacgtcgccggaggggatcaaggggaagtacgagtgcgccatcgggaacttcggggtgccgcagtacggggggaccttgcatggatgggtcgagtaccccaaatccaaccagaaggcttgcaagagcttcgaggacttcgacatctcattcaagtcaacccggtccggaggacgcccgaagttcgtgctcatcgaccgtggaccttgggaatttgctatctatcgaactgatttattgttgaaagtcttacattgtaaaacggaggaagtagtaaacacccaagttctatgttccaagaaggtacagaacgtcaaagtagtgaagttaattccactttctggtacagagtgctatttcacaacgaaggcatggaatgcacaaaatgctggggctgcagcagttcttgttgtggatgacaagtcggagcctttaatcacaatggataacccagatgatgctggaacagagcaccttgaaaacatcactattccctctgtgcttataacgaagaaattgggcgatgacctaaaaaaatctgctgaaaatggtgatatggttagcgtccttctggactggagagaatctcttccacatcctgatgagcgtgtagagtatgaattctggacaaacagtaacgatgaatgtggtccgaaatgtgatatgcaaatggactttgttaagagctttagaggaactgcacaaattcttgagaagaagggatacacccagttcactcctcattatattacatggtattgccctgaagcttttgttgtgagcaagcagtgcaaatcacagtgtatcaatcatgggaggtattgtgcaccagacccagagcaggatttcagccagggatatgatggaaaagatgttgtggttcaaaatctacatcaaatttgtgtattcaaggctgctaatgagagtgggaagccatggttgtggtgggactatgtgcatgacttctcaattaggtgccctatgaaggagaagaaatacacacctgaatgtgctgttcatgttattaagtcactcgggttggatgttgagaagataaagaagtgtgttggagatcctgaagctgatgaggaaaaccctgttctgaaggcagaacaagatgcccaaattggtcatgataaacgaggagatgtcacaatactgccaacccttgtcatcaacaacaggcaatatcgaggtaagttggacaaatctgccgtgctcaaagcagtctgcgcaggatttgaggagacaactgagcctgctatttgtttgagcgagggatgtcttcttatatcttatatgatcactcatttgctcatctttttccttctatttgtttcatcagatgttcaaacaaatgagtgtttggaaaataacggaggttgctggcaagatagggataataatgttactgcatgcaaggataccttccgtgggcgtgtttgtgaatgtcccgttgtgaaaggtgtaaagtttgttggtgatgggtacaccaattgtgaagcttctggcattggtaggtgcgaaattaaaaatggaggatgctggaaagaaactagaaatggcaagacaatatctgcctgctcaaatgaagtatctgaaggctgcaaatgtccaccaggtttcaagggtgatggaataaaaagttgtgaagatattgatgaatgcaaggaaaaactttactgtcaatgcaagggctgcagctgtgagaatacatggggtagctatgagtgcagttgtggcggcaaggaggctacgtcagctgttggctggagttttctgtgggttattttctttggacttgttcttgctggggtcggagcatatgcggtgtataaatacaggctacggagctacatggattcggagattcgcgcgatcatggcccagtacatgcctttggataaccaagaagcagctaaccaacatcatgtcgcgcatgctggtgatgatatttga

SEQ ID NO: 4133 - DNA, 1512 bp, Oryza sativa
atggagctcgccgcagccggtaggaccgccgccattgcgctgcttctcgcgcttgccttcgcgtcgagcttcattagcgccgccgatggcgcgaggagtgcccgccaccaccacgccaagcacgccaagcgcaacgccgcgcacccgccgtcgcaggcgccgggccccgcggcgaggcacgccccgggaccggcgaggcaccacggcgcgccggctcctcaccsggggcggcgctctcccccggccccggcgccggccaacccgccgtcgtccgacccaatgcctggcggggcgccgagcgccgcccccgcggccggcgcggccaccgtgtacgacatcgtcaaggacttcggcgcggccggggacggcgtgacggacgacaccgacgcgctcaagacggcgtgggacaccgcgtgcgcggacgacggcgcgggcgtcgtgctggccgccgccggtcgctcgttcctgatccacaccaccgtcttcaccgggccctgccagggcagcgtcacgctgcaggtcgacgggacgatcgtcgcgccgagcgagccggcgacgtggccggcgaacaacaagcgcaactggctcgtcttctaccgcgccgacggcgtgtcgctcgtcggcgccggcctcatcgacggcaagggccagaaatggtgggatcttccctgcaagcctcacaaggggggaaacactcatggaccatgtgacagcccagtggcgatgcggttcgccatcagcaacaacgtgacggtgcgagggctcaaggtgcagaacagcccggagttccacttccggttcgacaactgcaacggcgtgcgcgtcgacggcctgtccatcagctcgccggcgctgagcccaaacaccgacggcatccacgtcgagaacacctcggacgtcctcatcaccaacaccgtcgtctccaacggcgacgactgcgtctccatcggcgccggcacgctcaacgtccacatcgagaacgtcacctgcgggcccgggcacggcatcagcatcggcagcctggggaaggccgggaccaaggcgtgcgtggcgaacgtgacggtgcggaacgcggtgatccggcactcggacaacggcgtgcgcatcaagacgtggcagggcgggtccggctccgtgtcggcggtggcgttcgagaacgtgaggatggacgcggtgcgcaaccccatcatcatcgaccagtactactgcctctccaagagctgcgagaacgagaccaccgccgtgttcgtcaacggcgtctcctactccggcatccggggcacctacgacgtgcgcggcccgcccatccacttcggctgcagcgacgccgtgccgtgcaccaacatcacgctctccgacgtcgagctgctgccggcgtccggcgacaccgtcgacgagcccttctgctggaacgtctacggcaacgccgccacgcccaccgtgccgccggtgtcgtgcctcagctccggcttccccaactacaccgagaaaaaggacctccagtgttactga

SEQ ID NO: 4134 - DNA, 360 bp, Oryza sativa
atggccaggacttccttcaagctcgagcacccactggaaaggaggcaagcagaatctgccaggatccgtgagaagtactcagacagaattccggtgatcgttgagaaggctgacaagaccgatgttccagaaattgacaaaaagaagtaccttgtccctgctgatcttactgttggccagtttgtctatgtggttcggaagaggattaagcttagcccagaaaaggccatctttgtctttgtgaagaacacattgccgccaactgcttctttgatgtctgcaatctacgaagagaacaaggatgaggacggcttcctctacatgacttacagtggcgagaacacattcggctctgcgtaa

SEQ ID NO: 4135 - DNA, 882 bp, Oryza sativa
atggccgcggcggagacctcgggcacggtggcggcgccggggaggtggtctctccatggcaagatggctctggtcaccggaggcacccgcgggattgggcktscggtggtggaggagctggcggcgctgggggcggccgtgcatacctgctcccgcaatgaggcggagctaggggagcgcctcaaggagtgggaggccagggggttccgcgtcaccatctccgtctgcgacctctccgcgcgggaccagcgggagcgcctcatcggcgacgtcgctgaccgcttcggcggcaagctcgacatcctcgtaaacaatgtggggacaaacataaggaaacctactactgagtattctgcagacgaatactcatttttgatggctacaaatcttgaatctgcatatcatttgtgtcaacttgggcatcctcttttaaaagcatctgggtcgggtagcattgttttcatatcatcagttgctggaattgtagccctatttagtggaactatctatgctatgactaaaggtgccatgaatcaattaaccaagaacttagcatgtgaatgggcaaaagacaacataagaaccaactgtgttgccccagggtacatcttaacttcgctttcagaaggaattttggcaaacaaggagttcgagggctctgttaagagccggactcctcttaggcgtgtcggagaaccagcagaaatctcatcgttagttgccttcctttgtatgcctggttcaacttacattactggtcagacgatcgccgtcgatggagacgccaaaaaggcttcacctcgaacactacagcagaacggagtgtccaactgtccacttcgagatgctgctgccttctgcctcgacggccataggccatag

SEQ ID NO: 4136 - DNA, 1167 bp, Oryza sativa
atgtggccgtggctggagaggattgcgtccgcgtgctgggaccgggtccggaggtacgcgcttacgaggagggatgaggaagacggcagcggcagcggcggcgacgccgacgacctgctgctgtggtcgcgggacctcgtgcgccacgcggcgggcgagttctccttcgccgtggtgcaggcgaacgacgtgctcgaggaccacagccaggtcgagactggcgccgccgccaccttcatcggcgtctacgacggccacggcggcgcggaggcttcccgattcatctccaaccaccttgccgcgcacctcgtccgtctggctcaagagcgtggaacaatttcggaggatattgttcgaaatgccttttctgctacagaggaaggcttcttgtcacttgtgcgcaggacacatttaataaagccttctattgcctctattgggtcttgctgtctagtaggtatcatatggaaaggaacactctacctggccaatcttggagattctcgggcagttgttggttgtttaaccgggtcaaacaaaattgttgctgagcagctaacaagagaccacaatgcaagcatggaagaagtgaggcaggaacttcgatcccttcatcccgacgattcgcaaattgttgttcttaagaatggtgtatggcgcatcaaaggcataatacaggtttcaaggtctataggtgatgcatacttgaagaagcaagaattcgctcttgatccatctatgacccgtttccacctttctgagcctctacgacggcctgttctaacatcagagccgtctatatatacgagagttcttcattcacaagatagtttctttatcttcgcatcggatggattatgggagcacttgacaaaccagcaagcagttgaaattgtccacaacaatccacgagaaggtattgcaaggaggttagtaaaagcagctttgaaagaagctgcccggaagagggaaatgaagtacaatgatatcaagaaacttgagaaaggagtacgccgcttcttccatgatgacatcacggttgtggttgttttcattgatcatgagctcctacaagatggggatgagtctactcctgaaatttcagttcgcggatttgttgactcaggggggccctcgagcttttcagggttaaatggcatttcttga

SEQ ID NO: 4137 - DNA, 1284 bp, Oryza sativa
atggggaacatctgtggtggttcagggaaggctcatgtatcgggggattgcaggccgcctagctcagggacaatgacccccaaaacaagcagcagcgtcacaaccagcaatagcacaactgggaagctctcctctgttggcagcagcttcatggcgtcttccggaagcggcggcacgagcagcggattcgacgacggggtgtacccagagggccagatcctggaggcaccaaacctcaggacattcacattcattgagctcaggacagccaccaagaacttcaggccggatagtgttcttggggagggaggctttgggagggtgtacaaaggatgggtggatgagaagacgatgaacccggtgaagggcggcaccggcatggttgttgctgtcaagaagctcaactcagagagcatgcaaggttatgaggaatggcagtcagagataaactttctgggtaggctctcgcatccaaacctagtcaagctcttgggctactgctttgaggacaaggaacttttgctcgtgtatgaattcatggccaaagggagcttggagaaccatcttttcaagaaaggatgtcctccactatcatgggaactgaggctgaagatagccattggtgcagctcgaggacttgcgttcctgcatgcctcagaaaaacaagtcatctaccgtgactttaaggcttccaacattcttctagatgctaactataatgcaaagctctctgattttgggcttgctaagcttggaccaactggtagcaactcacatatcacaacaagggtcatgggcacatatggttatgcagcaccggagtatgtagccactggtcatttatatgtcaagagtgatgtttacggtttcggagttgtgatgctggagatgatgtccggtcagcgagcactagaccccaaccgtcctaatgggcagctcagccttgtggactgggcgaagccctacttggcggaccggagaaagcttgcccgcctcatggacccccggtttgagggccagtataactccaaacaagctgttcaggcggcgcagttgacgttaaattgcctggcaggtgagcccaggagcaggccctcaatgaaggaagttcttgagacactcgaaaggatcgaatcaatgaagagccgagcaagggatgcaagaggaagcggttcatcaagggaccatagccatggtcgcaccacagcgcaccaacggtcatcgccgcgccctgatggtcgccgtggatcaaggaccaatggtcacgccacgaaggcacggtga

SEQ ID NO: 4138 - DNA, 1038 bp, Oryza sativa
atggagagaaggagaagaagcccgtgcgccgccgtcgtgatggcggcggtggcaatgctcgccgtaatgccggcgttccccggcgtggcggcggacttgtcggcggggtactacagctcgtcgtgccccaagctggagtccatcgtgcggtatgaggtgtcgaggaagatcaacgagacggtcgtcaccatcccggccgtcctcaggctcttcttccacgactgcctcgtcacggtgttcagatatctgcaattagaagaaaaaaatcaggggtgtgacgcttcggccttgatttcgtccccaaatgacgacgccgagaaggacgcgccggacaacatgtccctcgccggcgacggcttcgacaccgtgaaccgtgtcaagaccgccgtcgagaaggcctgccccggcgtggtctcctgcgccgacatcctcgccctcgctgccagagacgtcgtctccctcgcgtccgggccatggtggtccgtggagctcggccggctggacggcctcgtgtccaaggcgagcgacgtcgacggcaagctgcccgggccggacatgcgcgtgacgaagctcgccgccgtgttcgacaagcacgggctgtcgatgcgcgacatggtggcgctctccggcgcgcacaccgtcggcttcgcgcactgcacccgcttcaccggccggctgtacaactacagcgccggcgagcagacggacccgtccatgaacaaggactacgcggcgcagctgatggaggcgtgcccgcgcgacgtcggcaagaccatcgccgtcaacatggaccccgtcagccccatcgtcttcgacaacgtctactactccaacctcgtcaatggcctcggcctcttcacctccgaccaggtgctctacaccgacggcgcgtcgcggcgcaccgtcgaggagttcgccgtcaaccagaccgccttcttcgatgccttcgtgagctccatggtcaggctggggaggctaggggtcaaggccggcaaggatggagaggtcaggagagactgcactgcattcaaccactag

SEQ ID NO: 4139 - DNA, 2439 bp, Oryza sativa
atggagccctcggcggccgtcgcgtcgaggccaccgagcttcaccgcgcagacgaatgccctcctccgcaagaatctcatcttccagaaacgaaacaggaaaggaaccattcggctaatcatagttccgatatacctctgcctcttgctcaccattcttcagagagtcatcaacagcgttcttgacaagcccaagttcagatgtggttgcaagtgtgttgatgtcaacggcacaggctcttgccaaaatgtgtgtggaattcagtactctacactggatcaggctggcagttgccccataccgaaccccccggaatggcctgctctcttgcagttaccgcgccctgagtatcgcgccatgcaggaatcctccttgtatgcaggtttcccagatgtatcatgcagaaaatcacaatcttgcgcagctactatacccttcacaggagcaaatgagaccctatctaacattgtcatgcaaaatttgttcacaagctcaccgctttcaaatctttctgataatgcgagcatatccagtcttctccttgggacagatgtaccgggtacttatacaggcttcattgaacccgcttttgtctcagatcgacccatatatgttcttagacctcaatgcaaagccagtgattcagttacagtccccattacgtttggtgatattaatattcggaaagcagagatgttatgtattcaaggtttacccttgtggaggaatagttcagcaataataaatgaggaaaccttcaacggctacaggaaagggaaaagtcaggaagggataaatgagattccaatggcctatgatttccaagactcaaacgagaagcatttcagcgtgttagctttatataactcaacttatcagaatgtgtcttatgttccaatgccatttggacttctgcatatctcgcgctccttgaacgcggtctcaaatgcatatctccagtttcttcgaggatcaggtgtaaaaatgttgcttgcattcacaaaagaaatgcctaagcaagagactcgtttgagatttgatttttcttctgttatcggccctctcttttttgaatgggttgttgccttgcttttcccggttatgttgacataccttgtatatgagaagcaacataagctccgaacaatgatgaaaatgcatggacttggggatggcccttactggattatctactatgcatatttccttattttgtccatggtgtatttggttctatttgtcgtttttggatccgttataggtctaaactttttcaagataaatgactacagtatccaatttgttttcttttttagtttcatgaacctgcagattgtactagccttcctaactgcaaccttcttttctaaagtcaacactgctcaagcaattgcatacctgtacatatttggatcggggttgattgcaggatctcttattcgcaattttattgaaggtggcaagttcccaaagcactggattacagttctcgagataatacctgcattttctttgtatcgaggactatatgagcttggccaatatgctattagggcttctgaagctggaagtcatggcatgagatggagtgatctaaatgaccatgcaaatggaatgagagatgcgctgattattattattctagaatggttggttttgcttcctgttgcgtactatttggaccattctgcttcagttggacacaaatctagtttcctttccctaataaaaaatctgctgaagaagaacccaacttggagaagggtatctattaacgaagtagttaacgacgctgttcatgtagaaatggtgaagcaagatattattaaagaaagggaaactgttgatcaagtactacaacaacagagtagcggctatgcagttgtctgtgatgatctcaagaaagtwtatcatgggaaaggatgtatgctctgggaaatgctgaccggcagagaacatctccagttttatgggcggctgaagagcctcaatggctctgatttggacactgctgttaacgaatctttaagaagtgtaaatttacttcatggtggtgctcctgataagcaagtcaggaagtacagtggtggcatgaagaggcgtctcagtgtagccatctcgctgattggagatgctaaactcatagcgcgatacggagggtactacgtgctgacaatgacaacatccccggagtttgagcaagaggtcgagaatctggcgcgaaagctctcaccgaacgcgaggaaagtataccatctgtctgggacacagaagtacgagctgccgaagcagcaggtgaggatcgcggatgtgttcatggccgtggagaatttcaagaggaggacggaggtccaggcgtgggggctcgcggacaccaccatggaagacgtgttcgtcaaggtcgccaaaggggcgcagtcgagcgaagaactctcatga

SEQ ID NO: 4140 - DNA, 1158 bp, Oryza sativa
atggaggagagaaatgatgtcaacatggacaagtcagatgagatcctcctgcctggattcaggtttcatcctacagatgaagagctggttagcttctatctcaagaggaagatccagcagaagcctatctccattgagctcatcaggcagcttgacatctacaagtttgatccttgggatctcccaaagcttgcgagcacgggtgaaaaggagtggtacttctactgcccgagggaccggaaatatcgcaacagcgtgaggccgaaccgggtgacaacagctgggttctggaaagccacaggaactgacaggccaatctactccactgagggtaccaagtgcataggcctcaagaagtcccttgtcttctacaagggcagagctgcaagagggatcaagactgactggatgatgcatgagttcaggcttcctacgctcaccgatccatcgctcccgaagaagccgattgacaagaacattccgctcaacgactcctggacaatctgcaggatcttcaagaagaccagttccatggcacaaagggcactctgtcagacctggggagctcaattgcctggaacaattgatccagacatcttctctacattgcaatctgtgcaagcttcacagtttgccctggagagttcctcctgctcattgcaagctgcagcaacggcagctcatcagatcactagcaagtatgcattgcaaggtaataataataatcagcagcagcagcaacagcacaagcctagcaatccactagatggatcttcatgcaaggtcataaacttcaactgcagtcaatctgcagaagtccagaactcccagatcatactgccatttgaggcacacacatcgcagaagaccgctacgccgctgctcttcgacacgcagtttgggcagcctgaccagatcagcagatttgtggtcgattcatctgtaaatgcaaatggaggaggcatcagcaacaagagccaagatccatcagcaagaaagcctggcagtggcttcagcatgaacagtgactgggatggtgtggcaagaatcaacttcccgttcgatttaggagcagattcttcagaagattggaggagcagcataccttgggaatccttccttagcccaactactgtccatgctgagatgccaaactag

SEQ ID NO: 4141 - DNA, 1938 bp, Oryza sativa
atggcggctctgatgaacggctttgggagcctccaatgcaaggcgacggtgcatgtcgagaaagggcacatgcaagcatcggggatggccttcttctctcccgtcaacagatgcgcccaggttcatatctccagtattcctcatttcatcggcgcgaagtctgttagtgcttcccaacttcgaatgaggcacaaggtcgggtccatcagagcctctgcagcctcgtgcttgcaagatgaaacaacaaaatatttcgattttgtggtcattggcagcggtgttgctggcctaaggtatgctctggaagtgtctaagtacggctctgtcgccatcattaccaaagcagagcctcatgagagcaacacgaactacgcacaaggcggtgtcagcgcggttctatgcccctcagattctgtagagagccacatgcaagacaccattgtcgcgggggcttatctgtgtgatgaagagactgtcagggtagtatgcacagaaggaccggagcgtgtgaaggagctcattgccatgggagcttcatttgaccatggcgaggacggaaggctgcaccttgcaagggaaggtggacattctcacaacagaatagttcattctgctgatatgactggaagagagatcgagagagcactgcttcaagcagttgataatgatgataacatatctttgtttggccaccactttgccattgatttactcacctgtcagagtaatggtgaaatatattgctatggtgtggattcattggacgctgaaactcagaaggcaattcgtttcatctcgaaagtaacattgcttgcatctggaggagttggtcatatatacccctcaacgaccaatccaccggtagctactggggatggaattgcaatgtctcatcgtgcgcaggctgtaatatctaatatggagtttgtgcagttccacccaactgcactatcagatgagggtctcccaataaaaccagctacaagaagagagaatgcattcctcataacagaagcagtcagaggagatggaggaattctttataatcagtccatggagaggtttatgacttcgtatgatgaccgtgcagagttagcaccgagagatgtggtcgcaagaagcatagatgaccaactgaagaagaggggagaaaagtatgtcctcctggatatcagtcacaagccaagggaaaaggttcttgcccattttccaaacattgcagctgaatgcctgcgccacggtctcgacatcacacaacagccgatacctgttgttcctgcagctcattacatgtgtgggggtgtccgggctgggttgcagggggagacaaatgtgaaaggcctgtatgttgctggtgaggttgcatgcactggattgcacggtgctaatcggcttgcaagcaactcactgcttgaagcactggtgtttgctcggagagcagtgcagccttcaatagatcatatggtcgatgcagatgtcgatccttctttcgcgaagaaatgggctcgtcctgtgctgtctgtctcccttagggacagtatactatctgatatcattgagaagacaaagcaggccaggatggagcttcagtcaataatgtgggagtatgtcgggatagtgcggtcgacgaaccgcctgaagcacgcggaatggaagatcagtgatctggagtcagaatgggaggagttcttgttcaggagggggtggaagcctacaatggtgggggttgagacctgtgaaatgaggaacctcttctgctgcgcaaagctggttgtgaaaagtgctcttgcaaggcacgagagccgaggcttgcacttcaccgaagacttcccttacctggaggagagcaagaggaagcctacagtgatcttccctactcatatccaggagctgacatggagctcaaagccattgcagaagcagctgcagtgcaagtag

SEQ ID NO: 4142 - DNA, 975 bp, Oryza sativa
atgtcttctggaggaggaggaggaggaggaggagatcgccatggcccctaccaccagcacgggcacctcggccgcggcgaaggcgctgattacgtgtacagcagcagcgacatggagagcttcttcttcagccaacccgggggcgtcggcatcggcgggggtggtggtggcgtcgtcggcgccggcggtgccgacgagatcatgccgtactccagcatcacggactacctgcaggggttattggacccctccgggctagctcggcacctcgacgtggcgtgcccgtcgtctcaggacacggtggtcaagcaggagctgtcggtggatktgacgagccacgacagccagggcaccggcggcgtcgccggagaaggcgtcgcgcaggccacgccgaactcgtcggcgtccttctcgtccagcgacggagaggcggagggcggcaaatcgtcacgccggtgcaagaagggtcaggcgaaggcggaggaggaggacgacaaggatgaggaggatggagagaactccaagaaaccgaacaagcccaagaagaaagctgagaagaggcagcggcagcctcgcgtggcgttcctcaccaagagcgaggttgatcacctcgaggacggctaccggtggcgcaagtacggccagaaggcagtcaagaacagcccatacccgaggagctactaccggtgcacgacgcccaagtgcggtgtgaagaagcgggtggagcggtcgtaccaggacccctccacggtgatcaccacgtacgaagggcagcacacgcaccacagcccggcgagcctccgcggcggcggcggcggcgtcggcatcgtcggagggcaccaccaccaccacctcttcatgcccggcgtgcatggcctgccgccgtcgcacctcatgccggcggggttccaccctgagctgatgggcctcatgcaccaccacccggccatggccgccgccgccgcaaaaccctag

SEQ ID NO: 4143 - DNA, 1683 bp, Oryza sativa
atggagaagcagcagcagccgggcgagaagaagatcaccggcggcgaggaggaggaggaggaggaggtgatcagcagcgtccggtaccgaggatggaagtcgatgccatacgtgatagggaacgagacgttcgagaagctgggcaccatcggcaccaccgccaacctgctggtgtacctcaccaccgtctaccacctccccagcgtccgcgccgccaccctcctcaacttcttctccggcaccaccaacctcgcccccctcctcggcgccttcctctccgacaccttcctcggccgctacaccaccatcgccgccgcctccctcgcctcctgcctcggcatgcttgtgcttaccctcaccgccgccatcccatctctccaccccccaccttgcactgcctcctcttcctcgtcgtcgtgccagggccccacacacggccagctcgccgctctcctcgccgccttcgccttcctcgtcgtcggcgccggcggcatccgcccctgcaacctcgccttcggcgccgaccagttcgacccgcgcaccgactccggccgccgcggcattgccagcttcttcaactggtactacttcaccttcaccgtcgccatgatgctctccgccaccctcatcatctacctccagagcaacgtcagctgggcgatcggactcgccgtccccgccgccctcatggccatctcctgcgcgctcttcttcatgggcacccgcctctacgtccgcgtccgccccgagggcagccccttcaccagcttcgcccgggtcatcgtcgccgccgtccgcaagcgccgcgtccccgcaccggcctccgccgacgacctgttcgacccgccgcaccagagcaagctggtggccaagatcgcgtacacggaccagttccggtgcctggacaaggccgccgtggtgacgccggagtcgagatcgagcccgtggcggctgtgcacggtgcagcaggtggaggaggtgaagtgcctggcgcggatcatcccggtgtggtcggcggggatcgtgtacttcatcgtggtggtgggcgttcgaggtgccggcggggtcgatggtggtgttcaacatgatggcgatgacggtgtggatcccggtgtacgaccgggtggtggtgccggcgctgcggcgggtgacggggaaggagggcggatcagccagctgcagcgcatcggggtggggctggtgctgtcggtggcgacgatggtggtggcggcggcggtggagcagcggcggcgccggctgggcgcggtgggagtgaagatgtcgttcctgtggctggtgccgcagcaggtggcggcggggatgtcggaggcgttcgcggcgatcgggcagacggagctgtactacaggcagttcccggagaacatgaggagcgtggcgggggcgctcttcttcctggcgttcgcgctggccaactacgcgagcggcttcatggtggcggcggtgcaccggaccacggggtggctggcgcaggatctgaaccacgcccgcctcgacctcttctacctaaccgtcgcggccatcgcggcggccaacgtctgctacttcctcctctgcgcccgctggtacaggttcaagaacaccaccatcgccgaccacgtcgagctgccggattatcatcatcatcagcccggaaccgccaacaccatagcctccaaggtttaa

SEQ ID NO: 4144 - DNA, 528 bp, Oryza sativa
atggagttgtcggtggtcggcggcgagccgttgctggcggtggcgatgcagcagctgctggacctggacctccccgatgagctggagcggcagctcaacccgccgacgcgcgcctacgtgcgcgaccgccgcgccatggccaacacccccatggacgtcaaggagctccgggcctccggcgcgctcgtgctcgccgtcgacatgcccggcgtcgcccccgccgacgtccgggtcgaggtcgaggacggcaacgtgctcgccatcagcggcgagcgcaggcgccccgccggcgacggcgacgacggcggcgagggggtgaagtacctgaggatggagcggcggatgggcaagttcatgaggaggttcccgctgccggagagcgccgacctcgacggcgtccgcgccgagtacaaggacggggtgctcaccgtcaccgtcgacaagaagccgccaccggagcccaagaagccgcgcgtcgtcgaggtcaaggtcgccggcgccggcgagcccaagggcaagggcaagtag

SEQ ID NO: 4145 - DNA, 1008 bp, Oryza sativa
atggcggctgcctcctcgcgctccttctcgctctgcgttctgctgctgttgctgctgctcgcgccccccatctccgcctcgttcttgttcgacggcgggaagtccaagtccgcggcggctgcggcggcggtcgacatggagtggcggccggcgaccgcgacgtggtacggcgacgccgaaggcgacggcagcacccgttcttgcacgctacaatctagtatagtgcaatttggcattgccattggcgataatttctttgttgggttcaaccaaagcaaaacgtttttcttgtcatatttttcaggcggggcgtgtgggtatggatcgctggtggacgtggtgccgatgaaggcgcgggtggggtcggtgagcccggtgctgttcaaggacggcgagggctgcggcgcctgctacaaggtgaagtgcctcgaccacggcatctgctcccgccgcgccgtcacggtcatcgtcaccgacgagtgccccggcgggctgtgcgccttcggccgcacgcacttcgacctcagcggcgccgcattcagcaggatggcggtcgccggcgccggcggccacctgcgagaccgaggccagctgtcggtcgtctacagaaggactgcgtgcaagtacggcgggaagaacatagccttccgtgtaaacgagggctcgacgaacttctggctgtcactgctggtcgagttcgaggacggccagggcgacattggatccatgcagataaagcaggatttagtcctttgttccaatacaagtttacacaaaagaagggagcacttgcgagacaggatagcgaactcagtggagtggctggacatgaagcatgtgtggggggccacgtggtgcctcgtgcggggcccgcttgtcgggcccttctcggtgaggttgacgacgctgtcggcccagaaggcgctcacggcccgggacgtcatccccaggaactggaagcccacggccacctacacctcgcgcctcaacttcgaggccgccctctga

SEQ ID NO: 4146 - DNA, 783 bp, Oryza sativa
atggccgaggcggcgtcggcggcggcggcggcgacgacggagcaggcgaatgggagcagcggcggcgagcagaagacgcggcactcggaggtcggccacaagagcctcctcaagagcgacgatctctaccagtacatcctggagacgagcgtgtacccgcgcgagcacgagtgcatgaaggagctccgcgaggtcaccgccaaccacccatggaacctgatgacgacgtcggcggacgaggggcaattcctgaacctgctgctgaagctcatcggcgccaagaagaccatggagatcggcgtctacaccggctactccctcctcgccaccgccctcgccatccccgacgacggcacgatcttggcgatggacatcaaccgggagaactacgagctggggctcccgtcgatcgagaaggcgggagtggcgcacaagatcgacttccgggagggacccgcgctgccggtgctggaccagctggtggaggaggagggcaaccatgggtcgttcgacttcgtgttcgtcgacgccgacaaggacaactacctcaactaccacgagcggctgatgaagctggtcaaggtcggcggcctcgtcggctacgacaacacgctctggaacggctccgtcgtgctccccgccgacgcccccatgcgcaagtacatccgctactaccgcgacttcgtgctcgagctcaacaaggccctcgccgccgaccaccgcgtcgagatctgccagctccccgtcggcgacggcatcaccctctgccgccgcgtcaagtga

SEQ ID NO: 4147 - DNA, 972 bp, Oryza sativa
atggctgcacacacaattaagctcgccgtcgcggtgacttgcacgctgctccttgcagccgcgtgcagtggcttggaggttggctactacaagaagtcgtgcccccgcgttgagaccatcgtgagggaggaggtgaagaagttcgtctacaagaacgccggcatcggcgccggcctcatccgcttgctcttccatgactgcttcgtcgagggatgtgatgkctcggtgctcctggacccaactccggcgaacccagccccggagaagctgagcccgcccaacttccccagcctccgcggcttcgaggtgatcgacgccgccaaggacgccgtcgagaaggcctgcccgggcgtcgtctcctgcgccgacatcgtcgccttcgccgcccgcgacgccgcctacttcctcagcaggatgagggtcaagatcaacatgccggcgggccgcttcgacggccgccactccaactcctccgacgccctcgacaacctccccccgcccttcttcaacgtcaccgagctcgtcgacatcttcgccaccaagggcctcgacgccgaggacatggtggtgctctccggcgcccacaccgtcggccgctcccactgctcctccttcgtccccgaccgsctygccgtcgcctccgacatcgacggcggcttcgccgggctcctcaggaggaggtgccccgccaacccgaccacggcgcacgaccccaccgtgaaccaggatgtcgtcacccccaacgcgttcgacaaccagtactacaagaacgtcattgcccacaaggtgctcttcacgtcggacgcggcgctgctgacctcgccggcgacggcgaagatggtgtcggacaacgccaacatccccgggtggtgggaggacaggttcaagaaggcgttcgtcaagatggccgccgtcgacgtcaaaaacggctaccagggcgagatcaggaagaactgcagggtggtcaactaa

SEQ ID NO: 4148 - DNA, 2037 bp, Oryza sativa
atggcggcggcgacacgcaccctcgcgccactctcatccgcctccgcatatgtcggcctcgtgcgcgccttcgcccgtcgcccgtgttgcctctcgatcgctgtttgggggaaccctcaccctccatggcacctcctcctacgccagcaccgctgccgtgatggggaaggccagcactgtggaagccgacactgggatggacaccgttcagcggcgacgccgttattgatggaggctccggcaaatagcgtggcagtggctgatgggaacccaaagacagcgacagagactccgcgggtggaggattacaaggacgctgccatgtactatggaacgtacccggcttatctctatggagcctatggtggctggggggagtactccacatacctgagccatgatggtgcagagacaccaactgctggtgcttatggggatatgtactatggctattctccatatggttattcaacttcaggacatgatagtcagatgtatggatctcagcattaccagtaccaaccgacatacaacaaacaacagaataccactggcaagccttccaacaatggaaaaactgaaaatccggctgcactgccccaaggggatgtctctgctaatggtgttgatagtctgaaaggtcagaaaaagacgaatctgctcccgaaggcaagccagaatacaccaggttccaacggttcctatggccgacctagtgggcgttttggtaactaccagaaccaaactaaccgaacaacttatccatgctacagtagtcaaatcttcaatggcaagcagcaaaaacttcccactggcaatcgttctctgacaacttccaattctaaaagcaagggacagtcaaggaatcagaacacatatcctcatctcatgggtctgcagacacctacttctccgttgggaccaccatcaatttactcggctagtggaatgtatggatacaatgggagttcatatgggtccggcctatggtatggatcacacctgtatggttctggattgtacgggggatggaatgcactgtcggatggcaaatacaatcccagaggaagaggtaatggatcctatggttatatccatggaaatcaggatgggtttaatgagctaagaagagggccaagaagtggtcttttcaataaccaacagggagttggagctactgttgcacctgtgaagggacaagagctttcagccagcgatagctcgctttctgtcatgaaggatcagtataaccgggctgattttgtggaaacatactcagatgctaaattcttcatcatcaaatcatacagtgaggatgatgttcacaagagcattaagtacaatgtttgggctagcacatccaatggtaataaaaagcttgatgctgcttatcaggaggctaaggaaaaatcaagtgattcttctgtgttccttcttttctctgtgaatgcaagtggtcagtttgttggtcttgctgagatggtgggccgtgttgattttaacaagacattggaacactggcaacaggacaagtggactggctgtttccctgtaaagtggcatattgtgaaggatgttccaaacagcttactgaaacacatcattcttgaaaacaatgagaacaaaccagtcacaaattgcagagatactcatgaggtgaaacttgagccagggcttcaagtgcttaagattttcaaggaccatgtctgcaagacgtcgttactggatgactttgatttctatgataatcgtgagaagatgatgcaagagaggaaggcaaagcatcaacaactgaagaaggtcgttgatgagaagctgcttaatgctgtggacactgagaacagcttgttaactgtgaaatccaaattgcaggaaacagctgaggtagagattgatgtcttaaacaaagagcctcatggtaaagcaggacaagttgatgggaaagagaacggtgtgttggccgtttctgtaaatggtgttaccccagaagatgttcagttgacaaacgagaagttggccagtttgagcgtctgttaa

SEQ ID NO: 4149 - DNA, 1275 bp, Oryza sativa
atggagggggcggcgccgcttctggcggcgcgtggggaggaggaggtggtggaggggaggcggcgcgggggagggggcggggcgacgtcggcgcagacgctggggaacgtggtggtgtccatcgtggggaccggggtgctcggcctcccctacgcgttccgcaccgccggctgggtcgccggctcgctcggcgtcgccgccgccggatgcgccacgctctactgcatgctcctcctcgttgactgcagagataaattggaagagaaagaatctgaagaaacctaccatggtcactatacatatggtgatttgggtgaaaagtgttttggcactataggtcgatgcttgacagaaatcctcatccttgtttcccaagcaggtggatctgtagcttatctaatattcattggccaaaatcttcattctgtcttcagccagttgatgtcaccagctgccttcatctttgccattctcctgcctatgcaaatcgctctatcattcatccgttcactatcttctctctccccattcagcatatttgcagacgtctgcaatgttcttgctatggcaattgttatcaaagaggatcttcagctttttgatcacccatttgcgaatagaagtgctttcaatggactttgggcgataccattcacttttggagttgcggtcttctgcttcgaaggattcagtatgactttggcactagaatcatcaatggcagaacggagaaaattccgctgggtactttctcaagcagttgtcggtatcataattgtctatgcatgttttggagtttgtggttacttagcctatggggaggccactaaagacatcataacacttaatcttcccaatagttggtcttctgctgccgttaaggttggtctttgcatagcactggtattcacatttccagtcatgatgcacccaatccacgagattgtcgaggaaagattccaatcaagtggatgtttcccgaagctctcgcacaaggttcgcggggctgaatgggtgggcctgcactcaagccgcatcgtcatggtaactatcctgtctgtggtggcatccttcatacctgcgttcgggtccttcatctcctttgtcgggagcacggtttgcgcgctgctctccttcgtgctgcctacgatcttccatctgagcattgtgggttcctcgatgagtccgtggcgacgctggggggactacggtttccttctcttcggccttggttttgcgggctacgggctcattagggctctcttctcacattga

SEQ ID NO: 4150 - DNA, 2055 bp, Oryza sativa
atggatcagcagaatttactgcccagcaaccccaccgcagatgaacagaatttacttccaaatactctagaggatgatgattacccacattatttacttggtagtcatgaggtggaaatgccaaatggaagcgtgattggtcagcaaaatacaagcttgaacttatgggattcagctggatctagctcgatgggctgtgtagctgatcatgatagtctttttgaggccaaaagggaacattttgctcctgctttgtctatccgagctcccttaattattggagggagaagacatgaaggcagtagttcattgccttcacagagcttaaacttagaccttaatcttaatcaggctgatcagtttgattctgaggatgttgatatgattcagagtaatggacaaccagggataaacgcttttcctctcaacaggggcctttccattcctgagcatgttctgcgccatacaaattcttccagtgctacaggaaatccttcacaggttgcaagcttttctgatggaatgacaggccaagaagttaacctgtttggtgggcatcgttcatcttgcaagagaaagaatattgatgggagtcttgcagagtcttctgccaatggtagttcacgtaataatcagcgaaataatattatactggaaccttctccatccagtcatgaaagcacttctggtttaactgcacctgcccctacaaaccatgttttttcatactctcctgtggaacagctaaaccagaataccaatatgtctgcaaatgctatgttgtctgatcattattcactatatggtgatcatgagcgtgagagatttctgaggaatacccggatgagaacaagccctaatgagtatgatcaatcatcgtccaatctcttgcctgaaggaagtctcaggtgttctgtttatcagcctactcagcaacagtctttgtttattccagtacaacctagagcatcgagctcttcaacaagttctcttagtcggccttatgtgcctgctgtcactcaattctcacaaaatttgcaccgtgctccatcaagtggcaattttggttcgagaatagggatttttcctagttctgctgatacaacaaaccagttatcttcacaagatcccaacaggagctcggtgagaggcaattttcctgagccccttctgttaggttcttctctgtttccttctgactcggcagaattgctatctatgccgggaggcagaagcaaccaacaaaattccagctccacaattcgaactgctgtaaatataggagctcaacagattgctgggttaaatgcatcccagcctacttcaagctcaaggggttcggttgatattgttaggagatccttgcaggctgctagcgttcctcagtccagaggttcaagcattacatcacagcagcaacgtgggcattcatccacatcacatgagattcgaagccatcaacctggatccagctctcgtgccaatcagcagcattatgtcagggctgttcctcactctgtagataggcaaaactcgaattacttggacctgcagtcttttatgcaaagcattgctgcttcaagagacggaattaggacagtctcagagtctgccaatcaacttgtgcatcttcgcaatgttgttgaacaaattcgtcagggaagaggtggaaggtttgaggatcctaattttgaacgtgcactttttgcaaggcgtgccagtttaattgacagacatcgtgacatgcggcttgatgtggataatatgtcatatgaggaattgttggcacttggtgaacgcattgggtatgtaaacactggacttagtgaggataaaattaggactggtttgaagcaatggaaatatgtgagcataccgattgaagaacctctaactggtgttgaaccatgctgtatttgccaggaagaatatgccgaaggtgaggacatgggcagactagactgtgggcatgacttccacaccgcatgcatcaaacaatggctggttataaaaaatctgtgccctatctgtaaaaagacaggactgggcacttaa

SEQ ID NO: 4151 - DNA, 2799 bp, Oryza sativa
  misc_feature (1)...(2799): n = A,T,C or G
atgccggatcgggtcaaggaggaagacggcktcgcggccaagcgaggcgcggcgacggcgaacgccgccggcataagcctggtgccgaggccgaagaagaggtctcgcgtgcacgacgaggcggacaccatcgacctcacggcgacccacccggtgccgtacctgaacccgaggccgatccgggcggtgccgccaccggaggccatggagatgctcgagtcgcggcgtgtgcgtgccaggccgcytccgccgtcgagtgatctgaggatggtggtggcgccgcctgatgccgagttcggcgagttccccgaggagcgcgactggttcctcgtcggcaggtcgtacgtcaccggcctgtccaccaaccgcgggaggcggaggctggacgccggcgagctcgtccatttctcgttcccctcattggagaggacctatggtgggatcaaggtgtcgaacaagaaggcggctgctttggcggagatcgtgcgcttctccaccaatcgagctggagagattgggaagctatctacagaatggaccaagtgcctcgtgccactggtaagctcatccaaggtgaagattcaggggaagattgtgtttcccacggtggaattgagattgatgcaggrgattttgttgtatgttagcttctacatccaccgttctgtattcaccgcaagcggcaacaactcatcatgggacctgcttgctcctgcaaatgttgattattccactaaccctctttacaggctgttcagattgctcaagctaagggcattcaccaaggctgatatcactcctgaggagcttgctgcaggaaagagaccgcggaatctaaggggtgatgacaatgatgaagatgaacccatggctatagttggattggaaaaccgacgcacagctggccaaacatttcctgagcaaggcactgatgagcaagctatttcagaggctgcattaaacaaaattgttggcactgctgaaacatatgacttggaggaagcagagcccccaagcactcttgtntccgttctaaaaccataccagaaggaagctctgttctggatgtctcaattggagaagggtattgatggtgatcaagccaaaaaaacccttcatccctgttggagtgcctacaaaatcgtcgacaagagagctcctgcagtgtatgtcaatgttttcactggcgagggaaaaacccagtttcaaagtgtaactcagtcagcaagaggagggatactagcggatgcaatgggtcttggtaaaactgtcatgactattgctctaatactatcaaacccaaggggggagttagaacaagataagaggggtactagagatcgtgacaccaaggcacaaacttcgagatcctctgtaagaggaggcacacttataatctgtccaatggcattgctaggccagtggaaggatgaattggaggcacattcaacaccaggagctctttctgtgtttgtctactatggtggcgacagaaccactgacctgagattcatggctcagcatagtgttgtcttgacaacctatggtgttcttcaatcagctcacaagaataataatttggaggaccttttcagtcttctttgcttcctacatgtagaaccatggggtgacgcaagttggtggaataagctgattcaaagaccttatgagaatggtgatgagaggggattgaaacttgtcagagctattctgaggccactcatgctgaggagaacgaaggaaacaaaagacaaaatgggaaatcccatactagtcctcccaccagctaatattgagattgtggagtgcgaacaatctgaagatgaacgcgatttctatgaagcgcttttcaggagatcaaaggttcaatttgataaatttgtagcacaaggcagtgttcttaacaactacgctaatattcttgagttactccttcggctaaggcagtgctgcgaccacccttttctagtgatcagtcgagctgatactcagaagtatactgacctcgatgagctagcacagaggttccttgatggggtgcaacgtgattccgcgagacgcagtgcgccaccttcacaggcgtatgtagaagaggttgttgaagaaatccgccagggcgcaactactgagtgtccaatctgccttgaatcagcttctgatgatccagtgctcacaccatgcgcgcaccggatgtgccgtgagtgcctgctctctagctggaggacgccttctggaggaccatgcccactttgccgaagccccattaccaaatctgagctgatcacattgcctagtcagtgtcgattccaggttgaccctgagaataactggaaggactcatgtaaggtgataaaactcatcaagatcctggagggccttcaggagaagagggagaagagcattgtgttcagtcagttcacttccttcttcgatcttcttgaggttcccttcaatcagaaagggatcaaattcttgaggtttgatgggaagctcagccagaaacacagagaaaaggttctgaaggagttcagtgaaagcaaggacaagctggtgctacttatgtcactcaaggctggaggtgttggacttaatttgactgctgcctccaatgtgttcctaatggacccatggtggaatcctgcagtggaagaacaagctatcatgcgaattcaccgtatcgggcaaaagagagcggtccaagtaaggcgcttcatcgtcaaggatacggtcgaagaaccggatgcagaaggtgcaagcgtgcaagcagaggatgatctctggggcgctgaccgacgatga

SEQ ID NO: 4152 - DNA, 3090 bp, Oryza sativa
atgcatctccgcctcctcctcctcctcgtcggcgtcgccgccgcggcggcggacgccgacgccgacgccgacgcgctgctggcggcgaaggccgccatgtcggacccgaccggcgcgctggcgtcgtggggcggcaacgggaccaggacgaacaccacggccgccgccgcggcacactgcgcgtgggcgggcgtgacgtgcagctcccgcggcgcggtggttggcctcgacgtgtccgggctcaacctttccggcgcgctgccggcggagctgaccgggctccgcgggctcatgcggctgtccgtcggcgccaatgccttctccggccccatcccggcgtcgttggggcggctccagttcctcacctacctcaacctctccaacaacgcgttcaatggctccttcccggcggcgctcgcgcgcctccgggggctccgggtgctcgacctctacaacaacaacctcaccagcccgctccccatggaggtggtgcagatgccgctgctccgccacctgcacctcggcggcaacttcttctccggtgagatcccgccggagtacgggcggtggggccggatgcagtatctcgccgtctccgggaacgagctctccggcaaaatcccgccggagttggggaatctgacgagcctcagggagctgtacattggttactacaacagctactccggtgggctcccaccggagttggggaacctgaccgagctcgtccgcctcgacgccgccaactgcgggctctccggcgagataccgccggagctcgggaagctgcagaacctcgacacgctgttcttgcaggtgaacagcctcgccggcggcataccgtcggagctgggttacctcaagagcctgagttctttggacctatcgaacaatgtcctcaccggcgagattccggcgagcttctccgagctcaagaacctgacgctgctcaacctgttccggaacaagctgcgtggtgacatccctgatttcgtcggcgacctgcccagcctcgaggtgctgcagctctgggagaacaacttcaccggcggcgtgccgcgccgcctcggccgcaatggccgcctccagctgctcgacctctcgtcgaacaggctcaccggcacgctgccgccggagctctgcgccggtggcaagatgcacacgctcatcgcgcttgggcaaattcttgttcggcgccatccggactcccttggtgaatgcaagtccttgagccgtgttcgtcttggggagaactacttgaacggctcaattccgaagggtctctttgagctgccgaagctgacgcaggttgagctgcaagataacctcctcacaggcaatttcccggccgtgtccggcgctgcggcgcctaatcttggggagatcagcctgtccaacaaccagctcactggtgcgctgccggcatcaattggaaacttttctggtgttcagaagctgcttcttgatcggaattcattctctggtgtcgttccacctgagattgggcgactgcagaaactctccaaggctgaccttagcagcaatgcgcttgagggaggtgtaccaccggagattgggaaatgccggttgctcacttacttggacttgagccggaacaacatctctgggaagatacctccggccatctctggaatgaggatactcaactatctcaacctgtcccggaaccatcttgatggagagatacctccatccattgcaacaatgcagagcttgaccgcggttgacttctcatataacaacttgtctgggcttgtgccaggaactggtcaattcagctacttcaatgccacatcttttgttggtaacccaggcttgtgtggaccgtacctcggaccatgccgccctggtgttgctggcaccgaccatggtggtcatggtcatggcgggctatccaatggtgtcaaactgctcattgtcctaggcttgttggcctgctccattgcatttgctgtcggggcgattctgaaggctcggtcgttgaagaaagccagtgaggcacgtgtgtggaaactcacagcattccagcgcctcgacttcacctgtgatgatgtgcttgactgcttgaaggaagaaaacgttatcggcaaaggtggtgctggaattgtgtacaagggggctatgcctaacggagatcatgttgctgtgaagcgtctcccagctatgggccgtggctcttcacatgatcatggtttttcagcagagatacagacacttgggagaattcggcaccgccatattgtgcgtttgctaggcttctgctcaaacaatgagactaatttgctggtttatgaatacatgcccaatggaagcctgggggagctgctccatggcaagaaaggcgggcaccttcactgggacacccggtacaagatcgccattgaagctgcaaaggggctctgctaccttcaccatgattgttcccctttgatacttcaccgtgatgtcaagtcaaacaatatccttcttgactcagactttgaagcacatgtggctgactttggccttgcaaagttcttgcaggacaccggtgcatctgagtgcatgtctgccattgctggctcttatggatacattgctccagaatatgcatacaccctcaaggtcgatgagaagagtgatgtctacagctttggtgttgtgcttcttgagctggttactggacggaagcctgttggggagtttggagatggcgttgacatcgtccaatgggtgaggatgatgaccgactcaaacaaggaacaagtgatgaaggtcctggacccaaggctctcaacagttccacttcatgaggtcatgcacgtcttctatgtcgctttgctctgcattgaggagcagagcgtgcagcgtccaacaatgcgggaggttgtacagatcctcagcgagcttccaaagctagctcccaggcaaggagaagtgctttcacacgctgtcgatggttttgcatccaatcctccagctccagttccttctgggtctgcagaagcactaactggtgatgcgaaagatcaacagcagcagcaaacaaattcagagtcaactacacctcctgatctcatcagcatatga

SEQ ID NO: 4153 - DNA, 576 bp, Oryza sativa
atggtggaggacccgagcaccgatgagaccatctcgtggaacgactccggcacggccttcgtggtgtggcgccccgccgagttcgcccgcgacctcctccccaagcacttcaagcacagcaacttctcctccttcgtgcgccagctcaacacctacggattcaagaaggtggtggcggataggtgggagttcgccaacgactgcttcaggagaggggagaagcacctgctcggtgggatacagaggcggaaggggtctgggaccggaggcccgggggccgcgccggcggggggcataccgacggcgataccgatctcgtccccgccgacgagctccggcggggaacccgcggtktcgtcgtcgccgccgcgcggggccccgggaatcccggcgggggttaaccgccccgttgccccaactggaggaggagaacgcccggctgcggcgagagaacgcgaggctggcgcggggagctggcacgcgcgcggcgggtctgcgacggcgtgcggcgcctcgtgtcgcggtacgaccacgaccacggcggcsgggaggaggaagcgggggarggcgacgtga

SEQ ID NO: 4154 - DNA, 1668 bp, Oryza sativa
atgtcgctcgccaccagctcctcgatggccggtggggcggcggtggttccacgcagcgcgacggcgacgacggcctcggcgttcgtcacgatgaagcggcgcgccacggccgtgcgcgccgtacacgcggcggagccgtcgaagaacccgcccgtcggcgtcccgtccgcggcgaagacgtcgtcgccgtcggtggcggcgccggagaaggcccccgtggcggccgcgcccgcgcctgtggctccggctccggcggccacgaagcaggtggcgccggcgaggtgggcggtggacagctggaggacgaagaaggcgctgcagctgccggagtaccccaacgcggcggagctggaggcggtgctcaagacgatcgaggcgttcccgccgatcgtgttcgccggggaggcgaggcacctggaggagcgcctcgccgacgccgccatgggccgcgccttcctcctccagggcggcgactgcgccgagagcttcaaggagttcaacggcaacaacatccgcgacaccttccgcgtcctcctccagatgtccgccgtcctcaccttcggcggccaaatgcccgtcatcaaggttgggagaatggcggggcaattcgcgaagccgaggtcggaggcgttcgaggagagggacggggtgaagctgccgagctacaggggcgacaacatcaatggcgacgcgttcaacgagaagagccgcatccctgacccgcagaggatggtccgggcctatgcgcagtccgccgccacgctcaacctcctccgcgctttcgccaccggaggatacgccgccatgcagcgcgtgacgcagtggaacctcgatttcacccagcacagcgagcagggcgacaggtaccgtgaattggcacacagggttgatgaagcccttggctttatgtctgctgctgggctaacagtggaccacccgttgatgacaagtactgatttctggacctcacatgagtgccttctcctaccctatgaacaatctctgacccgtcaggactccacaactggtcatttctacgactgctctgcccacatgctatgggtgggcgaacgcactcgccagctcgatggtgctcatgttgagttcctcaggggtgtggccaaccctcttggcatcaaggtgagtgacaaaatgaacccaaccgagttggtgaagctgattgagattttgaacccatcaaacaagcctgggagaattaccatcatcacaaggatgggggcagagaacatgagggtcaagttacctcatcttatccgtgcggtccgccacgctggacaaattgtcacatggattactgatccaatgcacgggaacaccatcaaggctccttgtggtctgaagacacgcccctttgactccattctggccgaggtacgagcattcttcgatgtgcatgatcaagaaggaagccacccaggaggtgtccacctcgagatgactgggcagaacgtaaccgagtgcatcggcggatcccgaaccgtcaccttcgatgacctgggtgaccgctaccacacccactgcgacccgaggctgaacgcgtcccagtcgctggagctctccttcatcatcgccgagaggctgaggaggaagaggatccggtcgtcgaagctgaacaacatgttgccgttgccacccttcggtgtctga

SEQ ID NO: 4155 - DNA, 1970 bp, Oryza sativa
atgttgaccgcgaacgtccagtcaaagtgtgctgcaaatgtgtgttcaagatgggctggttttgcaagaactttcagtgcaaaagcaactggaaatgaggttattggaattgatttaggaacaactaactcatgtgtttcagttatggaaggaaagaacccaaaagtaatagagaattcagaaggaaccaggacaacaccgtcagtagttgctttcaatcagaagggagagctacttgttggaacaccagccaagcgtcaagcagtgaccaacccacagaacactttctttggtacaaagcgtctgatagggcggcgctttgatgacccgcaaactcagaaagagatgaaaatggtaccatataaaattgtgaaggctctgaatggtgatgcttggctagagacaacagatggcaagcagtactcaccgagccagattggtgcctttgttttgaccaagatgaaggagacagctgaatcttaccttggaaaatctgtttccaaggctgtgattactgttccagcttatttcaatgatgctcagcgtcaggctaccaaggatgctggtcgcatcgctggacttgatgtccaaagaatcatcaatgaacccactgctgctgctctgtcttatggaacaaacaacaaggagggtttgatcgctgtgtttgaccttggaggaggaacatttgatgtgtccattctagaaatatccaatggagtttttgaggtcaaagcaacaaatggtgacacttttctgggtggagaagactttgataatactcttttggagtttttagtaagtgagttcaaaagaactgaaggtattgatctgtcaaaagacagactggctctgcagaggctacgcgaagcagctgagaaagcaaaaattgaactctcatcaacagcccagaccgagattaatcttccattcatcacagctgattcctctggagcaaagcatctaaatatcacattgacaagatcgaagtttgaaagtttggtgaatagtctgattgagaggactagagacccatgcaagagctgcttgaaggatgctggtataactactaaagatgttgatgaggtccttcttgttggtggcatgacaagggttccaaaagtgcaggaagttgtttctgaaatctttggtaaggcccctagcaaaggagtaaacccagatgaagctgtggccatgggtgctgctattcagggcggcattctccgtggagatgtaaaggatcttctcctccttgatgtaacccctctatcgcttggtatcgagactcttggtggtatcttcaccagactaatcaacaggaacactacagtccccacgaagaaaagtcaggtgttctcaactgctgctgacaaccagacgcaagtgggtattaaggtgttgcaaggtgagcgtgagatggcagcagacaacaaacttcttggtgagtttgaccttgttggcattccaccagcgccaagaggtatgccacagattgaggtcacattcgacatcgatgccaatggaatcgtgacggtctcagcaaaggataaggcaactggaaaggagcagcagatcacaattcgatcctctggtgggctttctgaggctgagatccagaagatggtccatgaggctgagctgcactcccagaaggatcaagaacggaaagccctcatcgacatcagaaacaccgcagacacaaccatctacagcatagagaaaagtctgggtgagtacagggacaagatacctgcagaggttgcctccgagatcgagacggcgattgccgatctccgcaatgagatggcctcggatgacattgagaagataaagagcaagatcgaagcggccaacaaggctgtctcaaagattgggcaacacatgtctggtggtgggtctggtggctcgcaagcaggatcacagggcggaggtgaccaggctcctgaggctgagtatgaggaggtcaagaagtg

SEQ ID NO: 4156 - DNA, 945 bp, Oryza sativa
atggctattaatctctcatattgcattctagtaagaaacgcctcggaatcttcatcggaaagttcaaccatttcccgctataactaccccactccaccttctgttctgcaacggacccaccaatggcgccgcggtgcagcaaacgccgtyttcgcggccatcaaagtcgtcaagctcctcctgggcgccgccgtcctcgccgcggggatctactacggggccccgcaacgcggcggcggcggcgtcaccgagtgcgagcggttcctccgcgcgccggcgctcgccctcggcggcgccatcgtggccgtgtccctggcggggctcgccggcgcgtgctgccgcgcgacgccgctgctgtgggcctacctcctcctgacgggcctcctcatcctcgccgccgcctgcttcggcgtgttcgcgctcgtcgtcaccaacgccggcgccgggcgggccgtgtccgggagagggttcagggagtaccacctcggcgactactcgacgtggctccgccggagcgtggaggacggcggccactgggcgaggatcaggagctgcctcgtcgacaccggcgtgtgccggagcttgaagagcaaccagacgctcgacgaattcgtcaactccaacctctcgccgctgcagtctggatgctgcaagccaccaacagcatgcaacttcacataccagaacgagacatactggatcaagcctcctacacccagcaactactcagaccctgactgcaactcttggtcgaatgaccagtctgagctctgctacggctgccagtcctgcaaggccggtgttcttggcaacctgaggagcagctggaagaagatcgccttcgtcaacgccgccttcgtcgccctcctcctcgtcgtctactccctcggctgctgcgcgctccggaacaaccggcggcacaagtactcgctggttgggaaatga

SEQ ID NO: 4157 - DNA, 1128 bp, Oryza sativa
atggcggcggcggtggtggcgaacggcgcgagcggcgactcctccaaggccgcgttcgcggagatatacagcaggctcaaggaggagatgctcgaggacccggccttcgagttcaccgacgagtcgctccagtggatcgaccgcatcatttctttgacatatgaatgcagatggataaaggagttgagggtggcccaaagtgccacaaagatgctggattacaatgtgctcggaggaaagtgcaaccgcgggatctctgtcattgatagtttcaagatgttgaagggcactgatgttctgaataaggaggagacatttcttgcctgcacccttggttggtgcattgaatggcttcaagcttattttcttgtgcttgatgatattatggacaactctcaaacacgacgtggccagccttgctggtttagggtgcctcaggttgggctcattgctgtaaatgatggtattatccttcgcaaccatatttcacgaattcttcaacgccattttaaaggaaagctgtattatgttgatctcattgatttgttcaatgaggttgagtttaagactgcttcaggtcaattgttggatcttattactactcatgagggagaaaaggatctcacaaagtacaacttgacagttcaccgccgcattgttcagtacaagacagcttactactcattctatcttccggttgcatgtgctttgctgctatctggtgagaatttggataacttcggtgatgttaagaacattcttgtggaaatggggacatacttccaagttcaggatgattatctagattgttatggtgatcctgagtttattggcaagattggaacggacattgaagactacaagtgctcatggttagttgtgcaagctctcgagcgtgctgacgagaaccaaaagcacattctatttgaaaattatgggaagccagatcctgaatgtgttgcaaaagtgaaggatctgtataaagaacttaatctggaggccgtatttcatgaatacgagagggagagttacaataagctgattgccgacatcgaagcacatccgaacaaagcagttcagaatgtattgaaatccttcctgcacaagatctacaagaggcagaagtag

SEQ ID NO: 4158 - DNA, 993 bp, Oryza sativa
atggcgggggatggtgtggactgggagagcgtggcggaggccacgtccggggcggtgggcgcgctcgtcagcaccaccgtgctctacccgctcgacacctgcaagaccaagttccaggccgagctccagacgcagccgggcgcgcacaagtacaggaatctttcagatgtcttttgggaagctgttcagaaaagacaaattctatccctatatcagggccttaagacaaagaacatccaatctttcatttcacaattcgtttacttttatggctatagctactttaaaagactctacttggagaagagtggagcaaagtctatcggcacaaaagcgaacttgttagttgcagctgctgctggtgcttgcacagttgttgttactcagccactagatacagcatcttctagaatgcaaacaagtgcctttggaaagtccaaagggctgcgggcaactcttgccgaaggcacttggcttgaggcatttgatggcttgggaatttctcttatactaacgtgtaatccttctattcagtatactgtatttgatcagctcaagcagaagctaattcagagacagagacgtaaaaatgcagaagcagggggtggttcttcaccagttgctctttctgctttctcagcatttctccttggtgccatctcaaaaagtgttgctacaatattaacctacccactaatcaggtgcaaggtcatgattcaggctgcagaccctgatgaggatgatgacgatgaatctgaaaggccaggaaaatcaaaatctcccaaaacaatgttgggcgctttgcatgccatgtggagcaaggaaggcatcccaggcttcttcaaaggattacatgctcagatactcaagactgtcctgagttctgcattgctgctgatgataaaggagaagatttcaagatttacttggatttcactgcttgccctgcggcgatatctctttgtttctcagaagagaatcaagagtgcataa

SEQ ID NO: 4159 - DNA, 1158 bp, Oryza sativa
atgtcgggcgagtaccagttccaggacgagctggcgccgctgttcgcgcggccggggggcggcgcgggggagatgcagatgctgccgtcgtcgtggttcgccgactacctgcaggcggggacgccgatgcagatggactacgacctgatgtgccgcgcgctggagctgccggtcggggaggacgtcaagagggaggtcggggtggtggacgtcgtcgcggccggcggcggcggggcgccgccgctgacgccgaacacgacgtcgtcgatgtcgacgtcgtcgagcgagggggttggtggaggaggtggaggcggcgccggcgccggcgccggggaggaggagtcgccggcaaggtgcaagaaggaggaggatgagaacaaagaggaaggcaagggagaagaagatgaaggacacaagaacaagaaagggtcggcggcgaagggagggaaggcggggaagggggagaagcgggcgaggcagccgcggttcgcgttcatgaccaagagcgaggtcgaccacctcgaggacggctaccggtggcgcaagtacggccagaaggccgtcaagaacagcccataccccaggagctactacaggtgcacgacgcagaagtgcccggtgaagaagcgggtggagcggtcgtaccaggacccggcggtggtgatcaccacgtacgagggcaagcacacgcaccccatcccggccamgctccgcggcagcacgcacctgctcgccgcgcacgcgcaggcggccgcggcggcggcggccgcgcaccagctgcaccaccaccacggccaccacggacaccacggcatggcgccgccgttgccgctgggctccggcgccgccgcgcagttcggccggtcgtccggcatcgacgtgctgagcagcttcctgccgcgcgccgccgccgcccaccacggcatgactacgatgggcggcgccgcggcgacgacgacgacgagccatggccttaacagtgcaatcagcggcggaggcggcgtctcgagcgagacgacgagcgcggtcaccgtcgccgcctcggctcagccgtcgtcaccggcggcgctccagatgcagcacttcatggcgcaagacttgggcctcctgcaggacatgctgctgccgtccttcatccacggcaccaaccagccttga

SEQ ID NO: 4160 - DNA, 1740 bp, Oryza sativa
atggcattcagtcacctcctccacgccctcctcgtggccgcggcgttgccgctgctccttctcccccgtgctgcaggtaacgtgcttctggctttcctgccaatgcagctgatcggcaacgccaaacgatggagtaattccttgctcgtcaatgcagatgctggcgagatcggggtgtgctacgggagggacgcgaacaacctgatcgacccaccggcggcggtgagccttctgaaggcgaacggcatctccgcggtgaggatcttcgacgcggaccagacggtgctggacgcgatggcgaacaccggcatcaaggtgatggtggcgatacccaacgccgatctggccgccgccggccaggatctgcgcagcgcgaccgactgggtgacgaacaacgtggtgccgtatcgcagccggggcacgctgatcaacggcgtcgccgtcgggaacgaggtgttcaggcagagacccgaactgaccgggatgctcgtctcggccatgcgaaacttgcacaaggcgctggagaacctgaacctggcgaacgacgtaaaggtgtccacgccgatcgccttcgatgcgctcaagcagtcgtcccctccatctgcgggggagtttaaagatgagatcgcgcaatcggtgatgaagcccatgattgacttcttgaaacagaccggctcgtacttcatggtcaatctctacccgtacttcgcatacgtggctcagcctgacaaaatctctctggagttcgcgacgttccgccctaacgctggtgtgcttgatggcaataccggcatcaggtacttcagcctctttgatgctcagctcgacgctgtttatgctgcgataaacagggtttctggtggtagcttaacggtctcaatggctcgacgagatggaatccttagtgtgcaagcttcagaatcagggcacccctctggaggtacatttcccctattttccatgctagctgcagccgatacggactcgatagccacgatagccgatgcccaagcgtacaacaatgggcttatcagacgtgtagtatccggagcctccggtatgcgtgacgtctccgcctacatcttctctcttttcaatgaaaacgagaagcctgggccagccatagagagaaactttggcttgttctacccaaatggtcagaaggtgtatgaggttgactttaggggcggtggcggtggcggagcttgccccacaaagacaagttgcgctatccggcagggcagtgtgtgtttcgaaccaaacaccttggttgcacacgcgtcgtacgcattcaacgactactaccaacgcaagggccaggccagcggcacttgcaacttctctggcgccgcttccatcgtattcaagccatcgccaaatataggcatatgtgatccgaacccaagttggtgcgttgcgaaatcggaggtcggggacgcacaactacaaaatgcactagactatgcatgtggtagctgcgcggactgcagcgccattcaaccaggtgcacggtgctttgatcctgacactaaggtagcacacgcgacctatgcattcaacgatttttaccagaccaccggccgggctagtggatcgtgtgactttgccggtgctgcttctattgtcaaccagcaaccaaaaataggaaactgcgtgctcccaccaaacaatgctgggacagaacaaactgcaattgaagatcaatcgactgcaaacttaccagcaacagcttggcagtga

SEQ ID NO: 4161 - DNA, 1077 bp, Oryza sativa
atgtcggcctactgcggcaagtacaaggacgagctcatcaagaatgctgcctacattggcactcctggcaagggtatccttgctgcagatgagtccactggcaccattggcaagcgctttgccagcatcaatgtcgagaacgttgaggagaaccgccgctctctccgcgagctgctcttcaccacccctggtgccctccagcacctaagtggtgtgatcctcttcgaggagaccctgtaccagaagaccaaggacggcaagcccttcgtcgatgtcctcaaggagggtggtgtcctccctggcatcaaggttgacaagggtaccgttgaggttgccggcaccaacaaagagaccaccacccagggccacgatgatcttggcaagcgttgcgccaagtactacgaggccggtgcccgcttcgccaagtggcgtgctgtcctcaagattggccccaacgagccatcgcagctttccattgacctgaatgctcagggtcttgctcgctatgccatcatctgccaggagaacgggctggtgccgattgtcgagcctgagatccttgtcgatggctctcatgacattgagcgctgtgcctatgtcaccgagaaggtcctcgctgcctgctacaaggccctcaacgaacaccatgtcctcctggagggttccctcctgaagcccaacatggtcaccccaggatctgaatccaagaaggtttcccctcagctcatcgccgagtacaccgtccgcgccctccagaggactgtccctgctgccgtgcctgccattgtcttcctctctggtggacagagcgaggaggaggcgaccgtgaacctcaacgccatgaacaagctcagcaccaagaagccgtgggctctgtccttctccttcggccgtgctctccagcagagcacgctcaaggcctggggcggcaagacggagaacgtggtgaaggcgcagaaggccttcatcaccaggtgcaaggccaactctgaggctacccttggtacataccagggtgatgctgtgctcggcgagggtgcctctgagagccttcacgtcaaggactacaagtactga

SEQ ID NO: 4162 - DNA, 1070 bp, Oryza sativa
atggccgcggcgtcgtctccggcggcggccatcacctgccgagcggcgttggcktgggcgcccgktcaggcgctggtgatggaggaggtggaggtggcgccgccggaggccatggagatccgcgtcaaggtcgtctccacctccatctgccgcagtgacgtcacccagtggcaatccacggctcaaaccgatctgttccccagaattttcgggcacgaagcatccggtgtggttgagagtgttggtgaaggtgtgaccgagttcgaagtgggagaccatgtgctcaccgtcttcatcggagagtgcatgagctgcaagcactgcgtttcagggaagagcaacatgtgccagaagctcggcctggagaggaggggtgtcatgcacagcgatcagaagacccgcttctcgctcagggggaaacctgtgtaccattactgtgcagtgtcaagcttcagcgagtacacggttgtgcactccggttgcgcggtgaaggtcggcccaaccgtgccgatggacaggatatgcctgctgagctgtggtgtatctgcagggcttggtgcagcctggaaggttgctgatatctcgaaggggtcgagtgtggttatatttggccttggaactgtagggctttctgggaaagcttttggtgtcacagattttattaatccagaagaattgaatgaacctgttcagcaggtggtgaagcggctgaccaatggaggtgcagattactcttttgagtgcgtgggtgatacaggagtagtgtcgactgcactgcaatcatgttctgatggttgggggctgactgtaactcttggtgtgccaaaagcaaagccagaggtttctgctcattatgcactacttctgtctggaagaacattgaaggggtctttgtttggaggatggagacctaaatctgatctacctttgttagtggacaagtatgcaaacaaggaaatccaagtcgatgaccttgttacacatgatttgtcattcgattacatcaacaaggcacttgaactgatgctagaaaacaagtgtttgcgatgtgtgattcacatgcctcagtg

SEQ ID NO: 4163 - DNA, 858 bp, Oryza sativa
atgaggaagctggtcccctcgccgtccctgccgacggcgacggcgctcgcgggtacgccggagatggctgccgtggcgctggcgctggcgctgcggggttggtgggaggaggtgaacgggtcgccggcgtggcaggacggcgccttcttctccctctccgccgcctacgcgctcgtctccgccgtcgcgctggttcaattgatcagaattcagttgcgagtgcctgaatttggttggactacccagaaggttttccatctgatgaactttgttgtaaacggagttcgtgctgtcgtgtttggatttcatgctcaagtgttcctttttcaaacaaaagctaagaatcttcccactgacaagctaaggattatatacatggcagttaatggtgttatatatgtaatccaggtttgtatttggatataccttgggacaaatgatagtcctctgctagagcctgtgagcaaaatttttatatcagttgtctcattcttagctcttttgggattcttaatttatggtggaaggctatttttcatgctgaggcgttttccgattgaatcaaagggccgcagaaagaagctctatgaggttgggactgtgacagcaatttgcttcacatgtttcttgataagatgcattgtggtggcgatgtcatcatttgatcctgatctatctcttgaggttttggatcatccaatactggatttcttttactatatgttaacggagatactgccctctgctcttgtcctattcatcctccgaaactcaaccgagaataggaaaaatccggaagtcttaatactcagtgcgctcaaatcctatgatgacgacggaacacatgggaacctgtag

SEQ ID NO: 4164 - DNA, 1503 bp, Oryza sativa
atggcgctcaaggtcgtctctttccccggggacttggccgcggtctcattcctcgactccaacagaggaggagctttcaaccagctcaaagtggacctcccgtttcaaacgagggacagaagagcagtttccctgagaaggacttgctgttcaatgcaacaggctccaccaccagcatggcctggtcgagccgttgttgaacctgggaggaggtcatgggatggccccaagcctatctcaattgttggctcaaccggttctattggcacacagtgttttatcttttcttttctttgcataactaaaaagacattggacatagttgcggagaatccagataaattccgggttgttgctcttgctgctggctccaatgtgactcttctagctgatcaggtgaaaacattcaaaccaaagcttgttgctgtaagaaatgagtcattagttgatgagctaaaggaagccttagctgattgtgattggaagccagaaattattcctggtgagcaaggtgtcatagaggttgctcgccacccagatgcagttacagttgttactgggatagtagggtgtgcaggactgaagcctacagttgctgcaattgaagctgggaaagatatagcattggcgaacaaagagacacttattgcaggtggtccttttgtgcttccccttgcacaaaagcacaaagtgaaaatacttcctgctgattctgagcactctgctatatttcagtgtatacaaggcttgcccgaaggagcacttcgccgcattattttgactgcatcaggtggtgctttcagggactggccagttgacaagttgaaagaagtaaaagttgctgatgctttaaagcacccgaactggaatatggggaagaagattactgtagattctgctacattattcaacaagggtttagaagttattgaagcacattatttatttggtgctgaatacgatgacattgaaattgtgatccacccacaatctatcatacactctatgattgaaacccaggattcatctgtgttggctcaactgggatggccagatatgcggataccaatcttatacaccatgtcttggccagacagaatctattgctcagaggtcacctggccccgactagatctttgcaagctgggttcactgacattcaaagctcctgacaatgtgaaatacccgtcgatggatctcgcctatgcagctggaagagctgggggcaccatgacaggagttctgagtgctgctaatgagaaggctgtggagttgttcatcgatgaaaaccatcagaaggtaaggtacctgttcttgcactgtcagaaggtaaggatcgggtacctggacatcttcaaggtggtggagctgacatgcgacgctcatcggaatgagctagtaacaaggccatcactggaggagatcatacattatgatctgtgggcgagggagtatgctgccagcctacagccatccactggcctcagccctgtacctgtctag

SEQ ID NO: 4165 - DNA, 1059 bp, Oryza sativa
atgtcgccagtcgggtggttggtcttgttgttgccggcgctgctgcggcggggcagcagcggggtggctgcggcggggaaggtgccggcggtgatcgtgttcggcgactcgtcggtggacacgggcaacaacaacttcatcccgacgatcgcgcggagcaacttctggccgtacgggcgcgactacgctgacggcctccccaccggccgcttctccaacggccgcctcgccaccgacttcatctccgaggccttcggactccctccctgcatccctgcctacctcgacaccaacctcaccatcgaccagctcgcctccggcgtctccttcgcctccgccgccaccggcctcgacaacgccaccgccggagtcctatccgtgatcacgattggcgagcagcttcagtacttcagggagtacaaggagaggctgaggatcgccaagggggaggctgaagccggcgagatcatcggcgaggcgctctacatctggagcatcggcaccaacgacttcatcgagaactactacaacctgccggagcggcggatgcagtacacggtggcggagtacgaggcgtacctgctggggctcgccgagtccgccatccgcgacgtgcactccctcggcggccggaagatggacttcaccgggctgacgccgatggggtgcctccccgccgagcgcatcggcaaccgcgacaaccccggcgagtgcaacgaggactacaacgccgtcgcccggagcttcaacggcaagcttcaggggctcgccgccaggctcaacaaggacctccccggcctccaactcgtctacgccgacacctacaagatcctcgcctccgtcgtcgacaagccggccgactacggttttgaaaatgcagtgcaaggttgctgtgggacaggactcttcgaggccggttacttctgcagcttgagcacctcgttgttatgtcaaaatgccaacaaatacgtcttctttgatgcaatccatcccacggagaaaatgtacaagatcattgccgatacagtcatgaacaccacacttaatgtgttcctataa

SEQ ID NO: 4166 - DNA, 1086 bp, Oryza sativa
atgccgctgctgacaccgtacaagcaggctggcggcaagatcgatctctcccaccgggtggtgctctcgccgatgacgcggtgccgatcctacggcaacgtgccgcagccgcacgcggcgctgtactacacgcagcgcgccaccagcggcggcctcctcatcacggaggccaccggcgtctccgacaccgcgcagggctacccggagacacccggcgtctggacgcgggagcacgtcgaggcgtggaagcccatcgtcgacgccgtccaccgcaagggcgccctcttcatctgccagctctggcacgtcgggagagtctccaccaacggcacgatctcaagctccgacatacagatcacaccggacggttcagggatcgtgtactccaagcctcgccggctgcgggtcgacgagatccctcagatcgtcgacgacttcaggctcgccgcgcggaacgccatcgaggccgggttcgacggcgtggagatccacggcgccaacggctacctcctcgagcagttcatgaaggacagctccaacgaccgcaccgacgagtacggcggcagcctcgagaaccggtgccgcttcgccgtcgaggtgatcgacgccgtcgtcggcgagatcggcgcccaccgcgtcggcatcaggctgtcgccgttcctggacttcatggactgcgtcgactccgacccggaggctctcggctcgtacatggtggagcagctcaacaagcacgagggtttcctctactgccacatggtggagcctcgcatggccatcgtcgacggccgccggcagattcagcacggcctgctgccattcaggaaagctttcaagggcacgttcatcgccgccggtgggtatgaccgggaggaaggcaacaaggtgatcgaaaatggctacactgatcttgtctcctttggaaggcttttcttggcgaaccctgacttgcctaagaggttcgagcttgatgcgccattgaacaagtatgatcgcaacaccttctacactcaagacccaattgttggatacacggactaccctttcctcgatgaggatcagaacaactcggttgctgatgcttag

SEQ ID NO: 4167 - DNA, 1143 bp, Oryza sativa
atggcgcgcgaggcsgagaaggacgcggcggcggcggcggagatcccgctgctgacgccgtacaagatggggcggttcgagctytcccaccgtgtggtgctcgcgccgctcacgcggaaccgctcctacggcaacgtgccgcggccgcacgcggtgctgtactacacgcagcgcgccaccagcggcggcctcctcgtcacggaggccaccggcgtctccgacaccgcgcagggctacccggacacccccggcatctggacgcagcagcaggtcgaggcgtggaagcccatcgtcgacgccgtccaccgcaagggcgccctcttcatctgccagctctggcacgtcggcagggtctccaccaacgaataccaacctgacgggcaggcgcccatctcaagcacagacaggcagatcacaccggacgattcaggcatcgtctactcgaaaccccgacggctgaggacggaggagatccctcagatcatcgacgacttcaggcgagccgcgcggaacgccatcgaggccgggttcgacggcgtggagatccacggcgcgcacggctacctcctggagcagttcatgaaggacagcgccaacgaccgcagcgacgagtacggtggcagcctcgagaaccggtgccgcttcgttgtcgaggtgatcgacgccatcgtcgccgaggttggagcgcaccgtgtggggatcaggctgtcaccgttcatcgactatatggactgcgtcgactccgacccggtggctctcggctcgtacatggtgcagcagctcaacaagcacccggggtttctctactgccacatggtggagccaagaatggccatcgtggaaggacgcaggaagatcacccatggcctcctgccattccggaagctgttcaatggcactttcatcgctgccggaggatacgatcgggaggaaggaaacaaggtgatagccgatggatatgctgacctcgtcgcctacgggaggcacttcttggccaatccggacttgcccaagaggttcgcgatcaacgcaccattgaacaagtataataggtccaccttttacatacaggatcctgttgttggctacacggactatcctttccttgatgagaaagacgagggcgctgctacttatgcttaa

SEQ ID NO: 4168 - DNA, 930 bp, Oryza sativa
atggccgtcgtccaccgcctcctccgccgcggcctctccgccgcctctcccctcccctctcttcaggagctcgggaggcgtccggcgagctcgtcggcggcggcggcgggggacgcggcggctgagctgcggggcgcgcgggaggacgtcaagcagctgctcaagtccacctcctgccatcccatcctggttcggttagggtggcatgatgctggtacttatgacaagaacattactgaatggccaaagtgtggtggtgccaatggtagcttgagattcgaaattgagttaaaacatgcggctaatgcaggtcttgtgaatgctttgaagctgatccagcccatcaaagacaagcatgcaggtgtcacttatgcagatctgtttcagctcgccagtgctacagccattgaggaagccggtggccccaagatccccatgatctatggaagggttgatgttgctgcccctgaacaatgcccgccagaggggagacttcctgctgctggccctccttcacctgcggaacatctacgagaagtattctatagaatgggcctgagtracaaggaaattgttgcattgtcaggagctcatacacttggacgatctagaccagagcgcagtggatggggcaaaccagaaactaaatacactaaaaacggacctggtgcacctggagggcaatcttggacatcacagtggctgaagtttgataatagctacttcaaggacatcaaagaacgccgagatgaggaccttctagttctgcctactgatgctgtgctctttgaggactcatcattcaagatctatgctgaaaagtacgccgcagatcaggatgcattttttgaagactatgctgaagctcatgccaaactgagcaatctcggagcaaagtttgatcctccaaagggtatttcactggaataa

SEQ ID NO: 4169 - DNA, 1803 bp, Oryza sativa
atggcggtgatgactgatgtgtcgaccaccgggacggcactccggaccccggcggcgggggcggtgaaggagggcgacgtcgagaagctccggttcatcgacgagatgaccaccaacgtcgacgccgtgcaggagcgcgtcctgggggagatcctcggccgcaacgccggcacggagtacctgaccaagtgcggcctcgacggcgccaccgaccgcgccgccttccgggccaaggttccggtggtgtcgtacgacgacctgcagccgtacatccagcgcattgcgaacggggaccgctcgccgatcctgtccacccaccccgtctccgagttcctcaccagctccggcacgtcggccggcgagcgcaagctgatgcccaccatcatggacgagctcgaccgccgtcagctgctctacagcctcctcatgccggtcatgaacttgtatgtgcctgggcttgacaaggggaaggggctctacttcctgttcgtcaagtcggagacgaagacgccgggaggcctgacggcgaggcccgtgctgacgagctactacaagagcgaccacttcaagaaccggcccccgacggcggccatcctctgcgccgacgcgttccagagcatgtacgcgcagatggtgtgcggcctgtgccagcgcaacgacgtgctgcgcctcggcgccgtgttcgcctccggcctcctccgggccatccgcttcctccagctcaactgggagcagctcgccgacgacatcgagtccggcgagctcacccctcgcgtcaccgacccgtcggtgcgcgaggctgtcgccgccatcctcctcccggaccccgagctcgccaagctcatccgcgccgagtgctccaagggcgactgggccggcatcatcacccgcgtgtggccgaacaccaagtacctcgacgtcatcgtcaccggcgcgatggcgcagtacatcccgaccctggagttctacagcggcgggcttcccatggcgtgcaccatgtacgcgtcatccgagtgctacttcggcctcaacctccgccccatgtgcgacccctccgaggtgtcctacaccatcatgcctaacatgggctacttcgagttcctccccgtggacgagaccggcgcggcttcgggcgacgccacccagctcgtggacctcgcccgcgtggaggtggggcgcgagtacgagctggtgatcaccacctacgccgggctgaaccggtaccgcgtcggcgacgtcctccgcgtgacggggttccacaacgcggcgccgcagtttcagtccgacaagaccgacgaggccgagctgcagcgcgccgtggagcgcgcgtcggcgctgctccgcccgcacggcgcgtccgtggtggagtacaccagccaagcgtgcaccaagcgcatcccgggccactacgtcatctactgggagctcctgaccaagggcgccggcgccacggtggtggacgcggacacgctgggcaggtgctgcctcgagatggaggaggcgctgaacacggtgtacaggcagagccgcgtcgcggacggctcgattgggccgctcgagatccgggtcgtccgcccgggcacattcgaggagctcatggactacgccatctcccgcggcgcgtccatcaaccagtacaaggtgccacgctgcgtcacgttcccgcccatcgtcgagctgctcgactcgcgcgtcgtgtccagccactttcagcccggcggctcccacactggactccggcgcgacggtccgaatagtcggtcaaatccccacctcgtcgttggaccgtgtccaagaatctga

SEQ ID NO: 4170 - DNA, 1317 bp, Oryza sativa
  misc_feature (1)...(1317): n = A,T,C or G
atgaggatttccagggctbtngcggcggccgcgctgctgctgctgctgtcgctggcagcggcggacatgtcgatcgtgtcgtacggggagaggagcgaggaggaggcgcggcggctgtacgcggagtggaaggccgagcacggcaagagctacaacgccgtcggcgaggaggagcggcggtacgcggcgttcagggacaacctccggtacatcgacgagcacaacgccgccgccgacgccggggtccactccttccgcctcggcctcaaccgcttcgccgacctcaccaacgaggagtaccgggacacctacctcggcctcaggaacaagccgcggagggagaggaaggtcagcgacaggtacctcgccgccaacaacgaggcgctgccggartccgttgactggaggaccaagggggccstggctgagatcaaggaccagggaggttgcggaagttgctgggctttctcagcaatagcagctgtagaaggcatcaaccagattgttactggcgacctgatatctttgtctgagcaggagctagttgactgtgacacttcatataacgagggatgcaatggaggtctgatggactatgcatttgatttcatcatcaacaatggtggaatcgacaccgaggatgactacccttacaaaggcaaggacgaacggtgtgacgtaaacagggtatctttcgtcttctttgctcccttggtttttcagaaaaacgcaaaggttgtcacaattgacagctacgaagatgtaacaccaaacagtgagacgagtctgcagaaggcggtagcaaaccagcccgtcagtgttgcaattgaagccggtggcagagcattccagctctactcatcgggtatcttcacgggtaaatgtggaacagcactagaccacggcgtcgctgctgttgggtacggcacagagaatggcaaggactactggatcgtgaggaactcgtggggcaagagctggggtgagtccggctacgtccgtatggagcgcaacatcaaggcgagcagtggcaagtgcggcattgccgttgagccatcctaccctctgaagaagggcgagaacccccgaacccgggccctactccgccgtcccmaaccccgcctcccaccgtctgcgacaactactacacttgccccgatagcaccacctgctgctgcatctacgagtatggcaaatactgctacgcctggggctgctgcccactcgagggcgccacctgctgcgatgatcactacagctgctgccctcacgagtaccccatctgcaatgttcagcagggaacctgcctcatggtaa

SEQ ID NO: 4171 - DNA, 1212 bp, Oryza sativa
atggcgaaccaccgagctgtgatcgcggccgtcctcgttttctgcttgtgcttcgttcaggtggcccggtgcgatgtggtcgccgccgccgtttctccgtcgtcgccggagcaggcgcaagagcttcagatgctgagagccaaagtcgcgtcgttagaggatgagatcagtgggaggaaggaggagaccttgcagctggagaatgttgtcagggagaagtcagcacagattgcggcattggtgagcgagctagaagttctgcaggtgcctaatgttgctgacgatgaatcagtgctgaaggcaaacgcccataatgagatgcttgagaaacaggttctgaggctgggtagtgatttagaggaccaagttaagaaaggggaatcactagaagcccgcgctagtgaagcagagaaaagtttgcttgagcttactcagaagttggaccatgataaactttttgaagtggagagggaagcaaagttgaaggcggaagagttgatgaagatccgtcctcctttactgtactctgtacatctggcaaaggttcatggcatgtggcttccacattgggtcatggctcgttttgtgtattgtcaggacttggcttctgacaaatggcagctccatgggaagcctgtgcttgatgctctggcgcagaagaaatcggttcctgctgccaaagcacatctcaactctctgaaaaaaagcaccgatgtatacgcatcggcaatagctaccaggagtacccaagcctatagagtttgcagagacaccatccaaccatcaatggccaaggcacaagaatttgcagatcactattggcaggaatccaagaagttcaccacaccatacatcaccaaggttgtcgcagcatctgaacctcgtctgtcaagagtatgtgccgtcctcgaaccttacacgaggcctgtcatatctgcttggagaaagcttgttatgtcagcaagtgtaccccatcgccaggttcagaaaggaatcaaacacttcgtaaacgataacgggctgctgaaatctgattcggccgacaggttcgcatggttcacggcatcagctttggtcgctctaccgatgttctacacctacaagatgctctcagctgctatatggaggaaagctgtggcagcacagggcagtggcggcacaagatcaaaaaaagcctcgaaccgcaggcgcacacagagagtggacagctag

SEQ ID NO: 4172 - DNA, 792 bp, Oryza sativa
atggaagaactgatagttaccaaaaggtgtcccccctcaatttcaagccctgaattgcagcattatacgtctcctatgagagattggttacctgcagagcctgtcagggaattgacggatcaagagagagcctcacaagttgttttcaaacagatcctatcaacacctcctgttaagtcgaagagatcaaaagttgctttcatgttcttaactcctggtacattgccatttgaaagattatgggagaaattttttgagggtcatgagggaagatataccatatatgttcatgcctcaagggagaaaccagaacatgccagtcccttatttattgatcgagacatacgcagtgaaaaggtggtatggggtaagatttccatggttgatgcagagagaaggttgttggcaaatgcactggaagacgttgacaatcagcattttgtgttactctctgacagctgtgtacctttgcacaattttgattatgtgtataactacctgataggaacaaatatcagttttattgattccttttatgatcctggaccacatggaaattttagatattctaaacatatgttacctgaagttagagagagtgacttcaggaagggttcacagtggttctcagtcaagcgtcagcatgcattgatgataattgcggacagtctttactatactaagttcaagcttcattgtaagcctgggatggaagatggtcgcaactgctatgctgacgagcattatttgccaacactattccatgtcagtacacaaattgacttcatatga

SEQ ID NO: 4173 - DNA, 1014 bp, Oryza sativa
atgacgcctcctccgccgccgccgcggcgcctcgtgtgcgtcaccggcgccggcgggttcatcggctcgtggctcgtcaagctcctcctctcccgcggctacgccgtccacgccaccgtccgcgacccacatgatcccaagaacgcgtttctgaagcagctggagaacgccccggagaacctgcgcctgttcaaggccgacgtgctcgacggcggctcgctgacggcggcgttcgccggctgcgagggcgtcttccatccggccactccgaaggagatgctggatcctgctgtgaaaggcaccagaaatgtgctcgaggcttgctctgctgcgggtgttcagaaactcgtcgtggtctcatccatcggtgctgtttgctttaacccgagcttgcctcgagacaggatcatagatgagacttgctggtcagacaagaagtcatgcaaggaaaatgagaactggtactgtcttgccaagacagaagctgaagagatggccctggaatattcagagaaaaatgggctgcatgtcatcacagtttgccctgcccttgttcttgggcccactgttgcagactgtgctactcagcaccagcagcaaagttctcctctatgtcatgaaagttttggttgcaatccaggaggccctgatgcaataggcaacacattctttcccatagtcgatgtccgcgatgtcgccgatgctttacttctggtgtacgacaaggcagggccatctgagcgatacatctgttctcaagaacaaatggacacgaaagattttttggatttgatgaagagcatgtaccctaactacagctacacattcaaagtggttgatgtggatacgagggttggattgacatcagagaagctgaagaagctgggctggaagcctaggaaactcgaggagacgcttgtcgacagcgttgaatcccacgagaaggcaggcttagtagatgacgaaccttgccggcttccctatctttaccgtgtaccagatgctcaggagtga

SEQ ID NO: 4174 - DNA, 2097 bp, Oryza sativa
atggccatcggatctctcatcgcgtcgaggctggccaggtccaccggccacgccctcgcctccgccgcctctcaggttccacccctctctgctcttctttcttttcttggtgaagtggctccgatggcccgtcacgcggcggcgtctcctctgttgtccaggcttggatcagtggctcgtgcgttcagctcaaagcctgccgccgcggatgttattgggatcgatttgggaacgaccaactcgtgtgtctccgttatggaagggaagacaccacgagtgattgagaatgcggaaggcgcaaggacgacaccctccattgttgccaagaaccagaatggtgatcttttggttggcataaccgcgagtcggcaggcagtgaccaatgcccagaacacggtccgtgggtctaagcgcttgattggtagaacttttgatgacccacagactcagaaggaaatgaagatggtgccttacaagattgtcaggggacctaatggtgatgcttgggtggagatgggtgggcagcagtactccccaagccagattggtgcatttgttctcaccaagatgaaggaaactgcagaggctttccttggcaaaactgtctccaaggctgttatcactgtcccagcttatttcaatgatgctcagcgccaggctaccaaggatgctggtaggattgccgggctagaggtgatgaggattatcaatgaacccactgccgcagctctgtcatatgggatgaacaacaaggagggtctgattgctgtatttgacttgggtggtggcacatttgatgtatcaatccttgagatctccaatggagtttttgaggtcaaggcaaccaatggagatactttccttggtggtgaggactttgatggtgcattgcttgactacctggttagtgagtttaagaagtctgacaacattgatctgagcaaggataagttggccttgcaaaggctcagggaagctgcagagaaggccaaggtcgagctttcctcaaccatgcagactgaaatcaacctcccctttattactgctgatgccactggtgcaaaacacttcaatattaccttgaccagatcaaagttcgagtctcttgtgcagtctctcattgagagaactcgcatcccctgtgtgaactgcctgaaggatgcaggcgtatctgcaaaagacattgatgaggttctactggttggtggtatgacgagggtgccaaaggttcaggatattgtttctcagatattcaacaagacaccaagcaagggtgtcaatcctgatgaggctgttgccatgggagctgccattcagggtggcatcttgaggggtgatgtgaaggagctccttttgctggatgtcactcccctctcccttggtattgagactcttggaggcatcttcacaaggctaattaatcggaacacaaccattccaaccaagaagagtcaggtcttctccactgctgcagacaaccagacccaggttggaatcaaggtgctccagggtgagagggagatggccacagacaacaagcttcttggtgagttccagcttgaaggtattccaccagccccaagaggtatgcctcagattgaggtcacattcgacatcgatgccaatggtattgtcaaggtgtcagccaaggacaagtccactggcaaagagcaagaaatcactataaagtcttcaggcggtttgtctgaaagtgatatcgagaagatggtgagggaggctgagctacattctcagaaggatcaggaaaggaaatcattgattgatctgaagaactctgcagacaccacgatctacagcattgagaagagtgtcagtgagtacaaggacaaggttcctgctgaagtcaccaatgagattcagtctgctgtatctgatctaagagcagcaatggctgaggatgatttggagaagatcaagcagaagcttgaggctgcaaacaaggcagtttcaaagattggagagcacatgcaacaaggtggcggtggcggcagtggcggcggcagcagcagcagcagtggtggtgaccagactcctgaggctgaataccaggatgctgctaaggaagctaagatgtag

SEQ ID NO: 4175 - DNA, 1056 bp, Oryza sativa
atgggcctcctggagctctttattacagcatgtgtgccggttctgaacatgcttctggttactggtgttggatcattcctggcaactgattttgttggcatactgaacaaagatgcacggaaatatctaaacaatatagtattttatgtatttaatccatctcttgttgcgacctatttagcacaaacaatcacattggaaggcttggctaaattgtggttcatgcctgtgaatattcttcttgcttgtacctttgggttaatccttggatggatcgtggcaattggggcaatatttttctcatcatcattcctgctctttgcaaagagaaaggaagccccgtttggagcacctgatgtttgtcacacttatggattagcgtattcttcactctcaatggctaacaccggtgtcacaatcgtcagtgatttgctgcagcttggtgctgtctttctgtggactgtcgcgtataacattatgcgagccacttcaaaagtggctgatgaagagagagcgaagcgatttgtatcatcaatgttcggagcaattgacttcaagaagatctttgctccttcaaccattgctgtgattattgggtttataattggaggaacgcctctaattagaaatgctattatcggagaaaacgctcctcttcgtgtcattcatgagtcagctgatctaataggtggaggagcaattccatctgtcacactgataatgggagggaacctcctcaatggattacgaggagaagcaagcgtccagccttcagtgatagcgagcgtaatcgtcgtcagatacattcttctcccttcgctaggcaccttgctcgtcaaatcggcggttcacctgggcctcatccaccctgatcccctctaccagttcatcctattgcttcagtacgccgtgccgccggcgatgaacattgggaccatcacgcagctgttcggcgtgggggagagcgagtgctccgtcatcttcgtgtgggtgtacgccctcgcctccgtcgcggtgacggtgtggtcggcgttcttcatgtggacgctgtcgtga

SEQ ID NO: 4176 - DNA, 1389 bp, Oryza sativa
atggggaggatctcgaggctgctcctgctgctggcggcggcggtggtgctggtgatcgcgacgggagtggcggcgcaggaggaggcggcggaggcggtggtggaggtggaggaggggatcgtggagagggccaaggaggaggcggaggcggtggcgctcagggcggagctgcagcagctgagggataagatctccggcctaggaatctcagaacgatccaaggaactgaaggctaaggatgatagcatagcaaagttggagaagctcatcgaggagaagtcacagaagattgcttctctgcagagcgagattacttccctccaggcaaaggggtctgtggctgctgaggagcaggctggcaaggccaacgctcgggctgttgagcttgagaagcagattgacaagctcaagaaggatgttgaagcacaaagtgtcaagaaagctactttggagaacagagctaatgatgcagagaagagggtgcaagagttgaatgcaaagattgacgcactccaaaagacaaatgatgagcaaaagcgcaagcttcaaagcacagaacgtgctctgaaagttgccgaggaggaactgatgaggctgcatttggaagcaacaactaagtcaaaacagctgacagaggttcatggagcatggttgccaccttggttagctgcgcactctgctcattatatggaggtgatctctggtcactggaatgaacatggaaaacctgctatcaacagttttctgcagaaggcatcagaaaaatcagcacaggcaaaaaaatgggctgagccacatgtggagactgctaaaatgaaatgggttccagtgaaggaaaaattggttgtcctcaagaaaaacacagaaccttatgtacaaaaggtctcatcaaaatccgtggaggtctatgaggcatcaagggatgctgttaaacctcatgttgcaaaggttaaagagtttgctgatccctacttccaggaagccaagaagttctccaaaccctacattgatcaagttgctgaggttacaaagccacatgttgagaaagttagaactactcttaagccgtatactaaaagagcagttcgtgtgtatgggtcatttcttgaatcagcaaccacataccatcggcaggcgcaatcaaccatcttagattacctacaccaacatgaggtatccaaatcacttgcgacgaaggagttggtttggttcctggcttctgctttgctggctatccctgtctatattatatacaggcttctaatggaagcattctgcagtaagaagccgaagagaccacctcatggcgatcttggagcagaatcagcaatggtggaaggatatatttgggtcatgggcaaccctgaaaagtgctgtataccaccatag

SEQ ID NO: 4177 - DNA, 1850 bp, Oryza sativa
atggagaggggctgggaaaagagagttgcaaacacagccacagaaggacagaagggtgtcccggtcctcctggcttcgagaagcggccttacytcgcgggacgccgtccttgggttgggattggggtgcgggctcttgagacggaggagcggcgctagtggtggtggtggtggtggggtctcttgcggcgcgcagcctgccgcggcggcggcggcgggggcggtgccggcggcgcagccggaggggaagaagttcctcggcgtggaggtgaagacgctgaagaagatcgtgccgctcgggttgatgttcttctgcatcttgttcaactacacgatcctgcgggacaccaaggacgtgctggtggtgaccgccaaggggagcagcgcggagatcatcccgttcctcaagacgtgggtcaacctgcccatggccatcggcttcatgctcctctacaccaagctctccaatgtgctctccagggaggcgctcttctacaccgtcatcttccccttcatcgccttcttcggcgcctttgccttcgtgctctaccctctcaggaatgtgatccaccccaccgcgctcgccgacaagctccttgcggcgctcggcccgagctttcttggccccgtcgccattctgaggatttggagcttttgcttgttctatgtcatggccgaactgtggggcagcgtcgtcatctcggtcctcttctggggcttcgctaaccagattactacagttgaggaagcaaaagaattctaccctctatttggtcttggggctaatattgcgctcatcttttctgggcgtactgtgaagtatttctcaaatctgcgcaagacattgggtccaggtattgacggatgggaggtgtctttgaaaggaatgatgagcttagtggtgcttcttggacttgtcatcacttccatctattggggggtgaacaagtttgttttgaatgatccttctcttccgaagtctgaccgtaagaagaaaaaggataaacctaagcttggaatgaaagagagtcttaaagttctcctctcctcaagatatgtaagggaccttgctactttagtggttgcatatggcatcagtatcaaccttgtggaggtcacatggaaatcgaagctcaaggcacagttccctagtccaaatgagtattcatctttcatgggtgatttctcaaccgctactggcattgctactttcacaatgatgctgttaggccggatcatactccgaaaattcggctggggagtggctgcaatgatcacccccacagttttgttgctgactggcgtcggtttcttctccctgattctatttgggcagcctctcactcctatgcttgccacaatgggcatgacccctcttcttgcagcagtttatgtgggtgcacttcagaacatattcagcaagagtgcaaagtatagtttatttgatccatgcaaagaaatggcctacattcctttggatgaagatatgaaggtgaagggaaaggcagccattgatgttgtctgcaacccattggggaagtctggtggagctcttattcaacagttcatgatccttacatttggctctttagctaactccaccccctaccttggtggcatactgttggtgattgttctagcatggctaggcgcggcaagttcactagacaagcaattctctagcttggctaaggaagatctcaaaagggatatgtctgcaaaagagaaggtagatccttccctgctcaaggctcctgaggctgatgtattggtggagcacacaaacggcactatagagagcgaagctactgcaactgagagttcaccatcaaactcatctccaagtaatta

SEQ ID NO: 4178 - DNA, 1263 bp, Oryza sativa
  misc_feature (1)...(1263): n = A,T,C or G
atgggggctctcctgcattcgtcgcatatgtaccatgaggccaaggcttcttttgcacaccatggtatcaaattctcaaatcttgaaatagatttgcctgccatgatgtcacagaaagacaaagcagttgctgggctgactaaagggattgaaggcctgttcaagaagaacaaggttgagtatgtcaaaggatttggaaagtttgtgtccccttcagaggtatctgttgacttgctcgatggtggtagcactactgttaaagggaagaacataatcattgccactggctcagatgtgaaatcactccctggagttacaatagatgagaagaagatcgtgtcatctactggtgctcttgctctttcagaaataccaaagaagttggtggttattggagctggatacattggtttagagatgggttctgtctggaacaggctagggtctgaggtcactgtcgttgaattcgcttctgacattgtcccgtcaatggatggagagattaggaagcagttccagcgtatgctggagaagcagaaaatcgaagttcatcgcttaatgacaaaagttgttggggttgatacctctgggagtcggtcgtcaagttnaactgtggagcctgcagctgtcggagagcagagtgttcttgagtgtgatattgttcttgtatctgctggcagagtaccatacacctctggtcttggattgaacgcccttggtgttgagactgacaagggtggaagaatccttgtcgacaagcgctttatgacaaatgttaagggtgtttatgcgattggagatgcgatccctggacccatgcttgcacataaagctgaagaagatggtgttgcctgtgttgaattcatcgcaggtaaagaaggtcacgtagattatgacactgtacctggagtggtgtacacacacccagaggtggcttctgttgggaagacggaagaacaggtcaaggcatcaggagtggcctaccaggttgggaagttccccctgttggccaacagccgtgcaaaggcaattgatgatgctgaagggttggtcaaggtagtggctgagaaggagaccgatagaatcctcggtgtacatataatggcccctaatgcaggtgagataatccatgaggcggtgcttgcacttcagtatggagcatctagtgaggatattgcacggacatgccatgcgcatccaacagtgagcgaagccctgaaggaggcttgcctacagacctacctgaaggcgattcacatttaa

SEQ ID NO: 4179 - DNA, 1550 bp, Oryza sativa
atggctgctggcatggtggcgacaatggtgctactgacgtgccttgctgcaggagggctggtcgtcggagctgaggaagacggtggcggcggcggtcttggccggctggggtcgccggactacggcgacgcgctggcgaaggccatcctgttcttcgagggacagcggtcggggcggctgccggcgaaccagcgagcgacgtggcgcggggactcggcgctcaccgatggccgtgaagaaaacgtgaacctgaccggcggctactacgacgccggcgacaacgtcaagttcgggtacccgatggcgttcacggtgaccctgctgggctggagcgccgtcgagtacggcgccgccgtcgcggcggcgggggagctcggcaacctccgggcggcgatccggtggggcgccgamttcctcctccgsgcccaagcctcgccgacgacgctytacacccaggtcggcgacggcaacgccgaccaccagtgctgggaccggccggaggacatggacacgcccaggacgctctacaagatcaccgccgaytcgccggggtccgaggccgccgccgaggcctcggcggcgcttgccgccgcgtacgtcgcgctcaaggacgacggtgacaccgccttctcgtcgcggctcctggccgcgtcaagatcgctgttcgatttcgccaacaactacaggggatcattccagtcctcctgccccttctactgctcctactctggatttcaggatgagctcctctgggcctcagcgtggctcttcaaggcgacgcgagacgccaagtacctcgacttcctgacaaacaaccaaggatccagcaaccctgtcaatgagttcagctgggacaacaagtatgccggagcacagatgcttgcagcacaggagtacttgggagggagaacacagctagcaaggtacaaggataacttggattcctttgtatgtgccctcatgcctaacagtggcaatgtgcagataaggaccactcctggcggacttctgtttacgcgcgattcggtcaatttacagtacacaacaactgcgaccctcgttctgtccatctactccaaggtgctcaagtcttctggctccaggggagttcgctgtagcgctgcaacattctctccaaatcagatcagctcatttgccacgtctcaggtggattacatcctggggaagaaccctctgggcatgtcatacatggtagggttcagcacaaagtttccgaggcgcattcatcaccgtggctcgtccatcccgtcgatcaaagttctcagcaggaaggtcacctgcaaggaagggttctcatcatggttaccgacaagcgacccaaaccctaacatccatgtcggagcgattgtcggtggaccagatggaaatgatcagttcagtgacaacaggggggattcatcacactctgagccagccacatacatcaatgcagcctttgtgggtgcctgtgctgctgcaatggggcagaagcaggtggtgaagctggaggagcctgcggacaacttagaatcaatggtatcaacttacta

SEQ ID NO: 4180 - DNA, 1248 bp, Oryza sativa
atggggaggaaatggcaccatgtcgccgcggcgctggccgtggcctgcgccgcracggcggccgccaccgtcgccgccgcggccgacagggggctttggtccgccgccgccgccgccgtggcgaagaagggggaggaaccragccacctgcccaaggtggccaatttttttgtggcgaacggcggcaaaaactcctaccaccasttttgcccgccaatggaatttggatggcaaattgtgctggggtcatttgtcggattcattggagcggcgtttgggagtataggcggtgtaggcggcggtgggttcttcatgccgatgctgaccttgatcattgggttcgacgcaaagtcatccgtggcgatatcaaaatgtatgataatgggagccgctgtgtcgactgtgtactgcaaccttaagcggaaacacccaactttggacatgccagtgattgactatgatctagcccttcttatccagccgatgctcatgctaggaattagtatcggtgtcattttcaatgtgatattccctgattggctggtcacagttctcttgatcatccttttcctaggcacttcaactaaagcttttctgaagggtatcgagacatggaagaaagagacaataataaaaagggaggcagaaaagcgatcagagcagacaagtgaagaactagagtatagaccagttcctgcatctgagtcaaaacccccttcagatgaagcggtatctattttgcataatgtttactggaaggaatttggacttcttgcctttgtttggatagcattcctcgcacttcaggttactaagaattacatgccaacttgctccacgtggtactgggttttgaacttattgcagatcccagtgtcagttggggtgaccatgtatgaaggactaggattgatgcaggggaggagggtcatatcatcaaatggaaatgagcagaccaacctaaaatttcaccagctacttatgtactgcttttttggaataactgctggaattgttgccgctcttwacttgaccgttgtggcattcttttctgcgattgtcggccagcgaatggtaaggaaggtgatcaattggttagggcgtgcatcgatcattatcttcacattgtccatcatgatcttcctcagtacaatccctctaggtggaatcggtatcgtgaactggattggcaagattgagcgacatgagtacatgggattcgaagacatatgcaagtttgatgcatag

SEQ ID NO: 4181 - DNA, 936 bp, Oryza sativa
atgacggcgcgaagcatgttgcggaaccacccggaggcgtcggtgctcgacaccatccggcagcacctgctggaggagccgcgcggcggcggcggtggcgaggcggcggaggcgagcttcgggagcctggtggccgacatgtggagcgactcgctgccgttccgcgacgacgacgccgacgacatggtggtgttcggcgcgatgcgggacgcgttctcgtgcgggtggctgcccgacggcgtgttcgcggaggtgaagccggagcccctgctctcgccggactcgtcgtcgtacgacgggtcctcttgctgcttcggcttcgcggacgtgtcggagccggtgacgccgagcgacgcggcgtcgggggcggcagaagcggcggccgcggcggcggcggcgacggcggagcacgggaaggaggaggaggccgcggctgcggtgscaagggggaagcactacaggggggtgaggcagcggccgtggggcaagttcgcggcggagatccgggaccccgccaagaacggcgcgcgcgtgtggctcggcacgttcgacaccgccgaggacgccgccctggccgagcacgagccagccattgctttgcacggcgcgagacggcaaagggatcaggcgatggaaccccgtgagcgcgacggcgcaagcgagcagcatccccgcgaaagctccaccggatgcaaaattgcaaacgcgataagctcgcgggtgcaactggtgaaattgggtggtgcaatcgtgtgtgggcgagctctagcagatagtagcgtggtggtggtggtggtattgttgtcccggcgcaactcgcccaagtgggggggtgaggaggatactctgtgtctactagcgtgttcttgtcagggaatgcacggtgtcgtcaagtgtgcaaatcctaagggtcataattcgcgtcattgtcactag

SEQ ID NO: 4182 - DNA, 897 bp, Oryza sativa
atgatgaaggacaagatgaaggatctcacgaggaagggggagccsggcccgctcagccgcgtacctggccggctggccggcgatgcccccgcgtccgctgttggaggtgtgaagaggctgctcgggaacctgctctccgatccccggaacgacaagtacaggaaggtcaggctcgggaacccgaggatcaaggaggccgtggcggacagggagtgcggggtggatctcctcgaggccgtggggttcagggtcgccgacaagggcggggagctcttcgccgtcatggacgaggtgcccggagacgcgaggctcggctggatcaggcaagccgtgctcctgctccagagggcccggccttcaacgccgccgccgaagcaggcagatgccaaggggactcgcccggatggagttggcgaacagcagggggttaagaggccggttgatcaccagattcgggtgttcttctctgttgctgcaagttctgttgcagaaaatgatctaccagattatttctatagccttagtaatgaggagataaggaatgaggcaaagatgaggagggggaggctagaacaatcttggttgctgattccaaagtcatataaggagaagcaggcactggctgcccgacagaagtataaacaagctctgattcgtattccgtttcctgatggagtaattctacagggtgtgttccttcccacagagcccattagttccctatatgagtttgccgcatctgctttgaagcagccaagtttggaattcgatcttatctgtccagctggtcctaggacacgtgtcacacctccttttccacaaccaggggagcgggcacacacactgctggatgaagacctagtcccttctgctcggcttaccttcaagcctaaatag

SEQ ID NO: 4183 - DNA, 1209 bp, Oryza sativa
atggcacggctcgtcctctccgagtgctgcggcctcacgccgctccgcctgcgcgggcgcsgsgccattgcgctgccggsgcytcccagcytcgccgcggggccgcgccgccccgtgtccgccgccgccgcggggggagccatccaccgcgagtgggcgctccgcgtctcsgccccaaccsgcctcacctccgtcgtcgaggaggataatagaggggaggaggtggtggaggaggaggccaggggttcgttggcggcggccgaggcggcggcgggggargtaggaggggacggagacgggttcgaccccggggcgccgccgccgttcgggctcgcggagatccgcgcggccatccccaagcactgctgggtgaaggacccctggaggtccatgagctacgtgctgcgcgacgtcgtcgtggtgctcggcctcgccgccgccgccgcgcgcgtcgacagctggctcgtctggccgctctactgggccgcgcagggcaccatgttctgggcgctcttcgtgctgggtcacgactgtggccatgggagcttctcaagcaacgccaagttgaacagcgtggttggacacatactccactcctccatccttgtcccataccacggctggaggattagccacaggrcgcaccaccagaaccacggtcatgtcgagaaagacgagtcctggcaaccgctgtctgagaggctgtacaatagcctggactatatgacgaagaaattgaggttcaccatgccgtttcccatgctggcattcccattatacttgtttgcaaggagtccagggaaaaaaggttcacacttcaacccaagcagtgatctgttccaaccaaatgagaagaaggatgtgataacatcaactgcatcctggctggcaatggttgggattcttgctggtctgacctttgtgatggggcccctcaaaatgttaaagctctatgctgttccatacgtgatatttgttatgtggcttgattttgtcacatatttgcaccatcatggccatgaggacaagcttccttggtaccgtggaaaggagtggagctatctgcgcggaggattgacaacacttgatcgggactacgggtggatcaacaacgtacaccatgacattggaacccatgtcattcatcatcttttcccacaaatcccacattaccatcttgttgaggcggagcctgggcttaacatctga

SEQ ID NO: 4184 - DNA, 1190 bp, Oryza sativa
atgccgctcttctgcaagcacggcgccggctttcttgccgtcgccgtgtctacatccatcgtcttcctcctcctccttcacgccttctcgctgccggcctcggcgctctccttcgggctagcgcgccgccaccggaaagacgccgccgtgagctgcgacgtcttcagcggcagctgggtccgcgacgacggcggcggcggcgcggcggcgtacaccgggtacaactgcccggtcatcgacgcggagttcaactgccagctgtacggccggccggactccgactacctccggtaccggtggaagccggccggctgcgagctacccaggtttgatggcgcggacttcttgacgcggatgaaggggaagacggtgatgttcgtcggcgactcgctgggccggaaccagtgggagtcgctcatctgcctgctgcacgccgcggcgccgcagtcgccggcgcagctcgtctccgtcgaccctctctacacgtacaagttcctggagtacggtttggtggtatcgttctaccgcgcgccgtacctggtggacatcggcgtggctcaggggaagaaggtgctatggctggacgacatctccgggaacggcgaggcgtggcgcggcgccgacgtgctctccttcaactccggccactggtggacgcacaccggcacgctccaggggtatgtattgtgggattacatgggcgcggacgggcggtactacgaggacatggaccggatggtggcgttccagcgcgggatggcaacctgggccaactgggtggacgccaacgtcgatccagccaagacccgtgtcttctaccagtccatgtcccccacacactacagctcgaaggagtgggccaacccggtgtcgaagaactgctacggcgagacggccccggcggcggcggcggcggcggggctgaacgcgacgacggcgcaggcgacgtcggggcaggaccaggtgatacaggccacgctgcggtcgatgaagagccccgttcgcctcctcgacatctcggcgctgtcggcgctgcgcaaggacgcgcacccgtcggtgtacagcggcgacctctcgccggcgcagcgcgcaaaccccggcggcggctcggcggactgcagccactggtgcctccccggcctgccggacacgtggaaccagctcttctatgcgcttctcttctaccaata

SEQ ID NO: 4185 - DNA, 1767 bp, Oryza sativa
atggcggccagatctggatatggcgctcaccccccttcgagttccgggaagtcgtcggtgctcgagagcatagtggggagggacttcctgcctcgtggatccggaatcgtgacgaggaggcctcttgtgctgcagctgcacaagacggagggtgggcaggagtacgccgagttcctccacgccccgcggaagcgtttcactgactttgctgctgttaggaaagagattgctgatgaaaccgatcgcattactggaaaaacgaaagctatatcaaatattcccatccatttgagtatatattctccacatgttgtaaacctgacacttattgatcttcctggattgacgaaggttgctgtagaggggcmacaagaatctattgtccaagatattgaaaacatggttcggtcttatgttgataagccaaattctatcatactggccatatctccagctaatcaagatatagcaacatcagatgctatcaagcttgctagggatgttgatccttcaggtgacagaacctttggagtgttgacaaagcttgatttgatggataagggtaccaatgctgttgatcactcattttcaacgccatgtaatcctaggtacttgaagggaggcagtatcgtttgcaacaccccctgggttggaaatacggtaaacctttwcactgatatcaacaggaatgtcgacatgctagcagcaagacgcaaagaaaaggagtactttgaaagtagcccagattatggtcacttggcacataaaatgggtgcagagtaccttgctaagcttctgtctcagcacttagaggctgtgatcagagcaaaaattccaagtattatagccatgattaacaaaacaattgatgaaattgaagctgagttggatcgccttggtaggccaattggaggtgatgctggggcacaactgtacacaatattggacatgtgtcgtgcgtttgaccgagtttttaaagagcacctagatggcggtcggccaggtggagatcgtatttatggtgtctttgaccaccaattaccagcagcactgaaaaagcttccatttgataagcatctttcattgcaaaatgttcggaaagtcatttcagaggctgatggttatcaaccccacttgattgcccctgagcaagggtacagaaggcttatagatagttcgctccactacttcaggggtccagcggaagcttcagttgatgcggttcatttggtcttgaaggaacttgttcgtagatcgattgcagcaacagaggagttgaagcgtttcccaacacttcagacagatatagctgctgcagcaaatgaaagcctggaaagatttcgtgaggatggtcgaaagacagttattcgtcttgttgagatggaggccagctacctaactgtagaatttttcagaaaactccctacagaaccagataagggggctaataataacactccagccaatgacagatatcaggacaaccatttaagaagaatcgggtcaaatgtatcatcttacattaacatggtttgtgagacattgaggaacaccattccaaaagctgtggtgcactgtcaagtgaaggaggcaaaaagaaacttgcttaaccgtttctatgctcatgtgggaagcaaggagaagaaacagctcagcgcgatgttggatgaggatcccgctttgatggagaagagggattccttagtcaagaggctagagctgtacaaatctgcccggaacgagatcgactcagtcgcgtggaaatga

SEQ ID NO: 4186 - DNA, 2013 bp, Oryza sativa
  misc_feature (1)...(2013): n = A,T,C or G
atggcgccgccgccgccgtcgccgccgtgccggccgcgagtcaagcccgagcgcgcccttctgtgcttctccctcctcctcctcctgaccgccaccacggcgaacgccagcatcaccgactgcccaactacaagcagcaccaactccagccatgtcgacgacggtgccttcggggccaacctccgcgctctcctctcctccctttccgcagccgcggcggcatcgtcgtcggggttcgccgagaacgcgaccggcgcggcgccggacacggcgtacggcctcgcgcagtgccgcggcggcatcgtcggcggcggcaatggcaccagctgccgctcctgcctcgacgactcggtgcgggacgcggccaaggcgtgccccggcgagaaatccgccgtgatcatctccgactactgcctcgtccggtactccaacgcgagcttcgccggcgccgccgacgagcggacggtgaagctctggtggaacacggacaacgcgacgcagccggagaggttcaagtcgctgctggggacgctgatgggcaacctcaccgacgccggcggcgcgcgcttcgtcgccgctgattgcacccgcgacctcgccgccggcgactgctaccgctgcctcgtcggcgccgtcaacaacatcccgaaatgctgcgacgggaagcagggcgggcaggtcatcacgaggagctgctccatccggttcgaggtgtacccgttcttcgacgcccaggccgccaaggcggccatgtcgcctgcgccggcgccggcgccggtgacgacgcccaccggggtcaatggaagtaatcacacagtcagtaagtctgtgattgtcccagttactgtgggagttgccgtgttactagtggtaatactgctgctaattgccctttgtctgtgcaagaggaacagaaaaccacataagcatatgatgattggaagcgtcgatcttggagatgaagacgaaatgagaggctcagaatctctcttgtatgatttgagtactctaagagcagcaactgccaacttctcagaagaaaataagctcggagaaggtggatttggcccagtctacaaaggtacactgcaaaatggtcaagagattgcagtgaagagattgtcagcaacttcccatcaagggcaattggagatgaagaatgaggtagtcttggttgcaaagcttcagcacaagaatctggtcaggctgctaggatgctgcatcgaagaacgggagaaaatcctagtttatgagttcctctgtaacaaaagcctcgacactatccttttcgacacttcaagacagcaagaccttaactgggagcaaagattcaagatcattgaagggatcggaagagggcttctttatcttcatgaagattcaaggctcaagatcatccaccgtgatctcaaagctagcaacatcttgttagatgtagacatgaaccccaagatatcagacttcggccttgccaagttatttaacatggaagcgagcgtagcaaacactagcaggattgctggaacctacggatacatggcgccggagtacgcgctgcacggcatcttctcggccaaatccgacgtcttcagctacggcgtgctcctcctcgagatcgtcaccggccgccgcaacacctgcctccatgactccgaggatctcctggcatttgtaatccccgcgcaaatcctatctaaagtctggaggcactggagccgcggcggcgccggggagctgctcgacggctgccccgccgccggccgccggccgcaggagcttctgcggtgcatccacgtggggctcctctgcgtgcaggaggacccgcagctccgccccggcatggcggcagtcgtcgtcatgctcaacagccgctcggtcacgctnccggcgccctcggcgccggckttcgtctccgcgagccgtgggatcggcggaagcccgccgccggcggcgccgccggaarattccccggcaaggaccacggatcacgaggttcctacggctgctcgatag

SEQ ID NO: 4187 - DNA, 2373 bp, Oryza sativa
atggcgccacgtctttctgcctgccttgtgttcttactcatattggttctttcactccaagagtctcccttgcatgctgctgatactctcactgcggaacagccgctctctgstgatcagaaattgatctctcaggatggcaagttcgctctggggttcttccagcctgcagctggaggatcttctagcaggtggtacataggcatatggtacaacmaaatcccagtgcaaactgtagtctgggtagctaacagagataaaccgatcactgatccaacctcatcaaatcttaccatcttaaatgatggaaatattgttctcctagtgaatcattctgaatctcctgtatggtctaccaatattgtaaacaatacaatcgccagttccccagttgctgtgctccttgacagcgggaacctagtagtcrgacatgagtccaacacatctgaggtgttatggcagagtttcgacgattttacagacacatggctgccaggtaataagctcagtcggaacaagaaaaccggagttatcaaacggatgatctcttggaaagaccgtgctgatccagcaccaggaatgttttccattcagttggatcctagtggtgccactcaatatattctcctgtggaatagctcgtcagtttactgggcttcaggcaactggactggcaacacatacactggtgtgccagagttgtcacctaccaatagcgatcccaattcagcatacacgttccagtttgttgacaatgaccaggagacgtacttcaactacactgttaagaatgatgcacaattaacaaggggcgtcattgatgtgtcaggtcattttcaagcttgggtatgggcagatgcagcgcaagcatggcaacttttttttgcacaaccaaaagctaagtgcagtgtttatgggatgtgcggcacatatagtaaatgtagcgaaaatgctgaattatcatgcagttgtctcaagggcttcagtgaaagttatccaaacagttggagactaggtgatcagacagcaggctgcaggagaaacctcccattgcagtgtggtaacaatggctcagtgaaggcaaagcaagatagattctttatgattagcagcgtcaagttgccagatatggcacacaccagagatgtaaccaatgttcacaactgtgaattaacctgcctgaagaattgttcttgctctgcttactcttataacggtacttgcttggtttggtacaacggtttgataaatttgcaagataacatgggtgaattgagtaatagcatctttattagattgtctgcctcagaattaccccagtcaggaaaaatgaaatggtggattgttgggattatcattggtggacttgttctcagttctggggtgagtatattatatttcctaggtaggcgaagaacaattggaataaaccgagatgatgggaaattgatcactttcaaatacaatgaactacagtttctaacaagaaacttttctgagagattgggtgtaggttcttttggctctgtgtacaaagggattctaccagatgcaacaacattggcagttaagaaactagaggggcttcgtcagggggagaagcaattcagggcggaagtgagcaccattgggaatattcagcacataaacttgattcgacttctaggattttgttccgaaggggcgaagagattacttgtctacgagtatatgcccaacggttcgcttgatcatcacttgtttcagaacaattctgcgatttcgagttggaaaagaagatatcaaatagctataggaattgccaagggattggcttatctgcatgatgggtgccgagattgcatcatacattgtgatattaaaccacagaatatactactggacatgtcatttaccccaaaagtggcagattttgggatggcaaagctcttaggccgggatttcagtagggttttgacttcaattaggggcacaataggatatcttgcaccggagtggataagtggtgagtccataacaacaaaggcagatgttttcagctatgggatgatgctatttgagatcatttccagaaagagaaatctaacacaaacagagacaagaacagaaatattctttcctgtgctagttgcaaggaagcttgtacaaggagaagtgcttacactgttggattctgaattggtggatgatgtgaacttagaggagcttgaaagggcgtgcaaggttgcttgctggtgcattcaagacgacgagagctccaggccaacaatggcagaagttcttcaaatgctagaaggattggtagatatcgaagtgccacctgccccaagatacctccaggttcttgctgaaggtgcagcgagtaaaacttaa

SEQ ID NO: 4188 - DNA, 672 bp, Oryza sativa
atggcagcagacaagggagtgaaggtgttcggcatgtgggcgagccccatggcgatccgtgtggagtgggcgctccggctcaagggcgtcgactacgagtacgtcgacgaggacctcgccaacaagagcgaggcgctgctccggcacaacccggtgaccaagaaggtgcccgtgctggtccacgacggcaagcctctcgccgagtccaccgtcatcgtcgagtacatcgacgaggcctggaagcacggctaccccatcatgccctccgaccccttcgaccgtgctcaggcgaggttctgggccaggttcgctgaagagaagtgcaacgctgctctgtacccgatcttcatgacgaccggagaggagcagagaaagctggtgcacgaggcccagcagtgcctgaagacgctggagacggccctggaggggaagaagttcttcggcggcgacgccttcggctaccttgacatcgtcaccgggtggttcgcctactggctgccggtcatcgaggaggcctgcggcgtcgaagtcgtcaccgacgaggcgctgcccctgatgaaggcctggttcgaccgggtcctcgccgtcgacgccgtgaaggcggtcctgccgccgagggacaagctcgtcgcgctcaacaaggctcgccgtgagcagatcctctcggcgtag

SEQ ID NO: 4189 - DNA, 1500 bp, Oryza sativa
atggtggtgagaccgaccggggcggacggcccggtggtgtcgctgcccaaggtggtcgatgctgcgcgcgcggccggtgccaagctgccgctgctggtgcgcttcccggacatcctcggacagcgcctgggcaagctgcaggcggccttcggccaggcccagcaggactgggagtacagcggcggctacaccgccgtgtacccgatcaaggtcaaccagacccgtggcgtggccggcaccctggccagccaccacggcgaggggttcggcctggaagcgggcagcaagcccgagctgatggccgtgctggcgctgtcgcgtccgggtggcctgatcgtctgcaacggttacaaggaccgcgagtacatccgcctggccctgatcggccgcaagctgggcctgcagaccttcatcgtcatcgagaagccgtccgagctgaagctggtgctggaagagtccaaggcgctggacgtgaagccgggcctgggcgtgcgcatgcgcctggcctcgctgggcgccggcaagtggcagaacagcggtggcgacaaggccaaatctccaacgtgcgccgacatcgccaacggcatgcgcgaagccacccgctacttcgtggagctgtcgcgcctgggcgcgaagatcacccacgtcgacgtgggtggtggcctgggcgtggactatgaaggcacccgttcgcgcagcttctgctcgatcaactacggtctgcattcctacgccagcaacatcgtgcagccgctggccaatgcctgcgaagagttcggcctgaccccgccgcgcatcgtgaccgagtgcggccgcgcgatgaccgcgcaccacgcggtgctgatcgccaacgtgtcggaagtggaagaggcgcaggaaggccgcgtgccggaccagcacgacgacgagccggcggcgatccgcactgcgcgagatccacgacgaactggacgtgcgccggcgcgtgcgcgcatcgacgatctgttctacgccattgcccacggcgtgcgcgcgcgcctgagctacgacgagaagagccatcgcccggtgctggacgaactgaacgagcgcctggtcgacaagtacttcgtcaacttcagcgtgttcgaatcgatcccggacgtgtgggcgatcgaccaggtgttcccgatcgtgccgatcgagcgcctggacgagaccccggaccgccgcggcatcatcgccgacatgacctgcgactcggacggcatggtggaaacctatgtcgagaacgagagcctggacagctcgctgccgctgcacaagatgaagccgggtgagagctaccgcatcggcttcttcatggtcggcgcctaccaggaaatcctgggcgacatccacaacctgttcggcgataccgacgcggtggaagtgctggccgacgccgatggctacgccatcacccagcagcgccgcggcgacaccaccgacgtgatgctggactacgtgggctaccgcctggatgagctgcgcgcgacctam

SEQ ID NO: 4190 - DNA, 2754 bp, Oryza sativa
atgaggctttcgtcgtcgtccggcagcgtcctcccggctcaggcggcgtcgccggaagctgtagaagaacaaaaatgcctgaattcggagctctggcatgcgtgtgccggtccccttgtttcgttgcctgcagtgggtagccgagtggtttatttcccacagggtcacagcgaacaggtagctgcatcaacaaataaagaaatggagtctcagatccccaattatcctaacttgcctccacaacttatttgccaacttcacaatgtgacgatgcatgcagatgcagaaacagatgaggtttacgctcagatgacgctacaaccacttagcccgcaagagctcaaggacccatatctaccagctgaattaggttctgccaacaaacagccaacgaattatttttgcaaaacattaacggcaagtgacacaagtacgcatggcggattctctgttccccgtcgagcagctgagaaagtgttccctccgctggattttactcagcagcctccagcacaggagttaattgcaaaagatcttcatggcaatgagtggaagtttcgtcatatctttcgtggtcagccaaagcgacaccttctaactacaggctggagcgtctttgtaagtgcaaagagacttgtcgccggggattctgtcctatttatctggaatgacaacaaccagcttcttctgggaattcgtcgagctaaccgcccacaaactgttatgccatcttcagtcctatctagtgatagcatgcatattggtcttcttgctgcggctgctcatgctgcttcaacaaatagccggtttacaattttttataacccaagagcaagcccttcagagtttgttatcccactttctaaatatgttaaggctgtatatcatacccgtatatctgtgggcatgcgtttcaggatgctttttgagacagaagagtcaagtgtacggagatacatgggcacgataacaggaattagtgatcttgatgctgctcgttggccaaactcacattggcgttctgtaaaggttggctgggatgaatcaactgccggagagaggcagccaagggtgtcgctttgggagattgagcccttgacaactttcccaatgtacccatctccttttccactcagactgaagcgtccatggccaacaggcttgccttcattacatggtggtaaggatgacgacttgacttcttctctcatgtggctccgagacagcgcaaatcctggtttccaatcattgaatttcgggggtctcggtatgaatccttggatgcagccaaggtttgatgcttccttacttggtctgcaacctgacatgtatcaaacgatagctgcgactgctttccaggacccaacaaagcaggtctctcccacgatattgcagttccagcagccgcagaacataggtggcagagctaatacacttctgccaagtcagattttgcagcaagtgcagcctcagtttcagcagcagcaatacctccaaaacatcaacgagaccacaatccaagggcatgctcagtctgagttccttcagcagcagctccaacgctgccagtcgtttactgagcagaagccacagctgcaaacccagcaacaacagcaagaatcacagcaacaacagcagcagcaatcgcagtgtatgcaagtcccacaacatcagcaaatgcaacagcagaagaacatgaccaactatcagtctgtacctaatgcattgtcaccgttttctcaactctcctctccttctcagtcttcacctatgacactgcaaacagtattaccattctcccagccacagagctatccagacacgagtatgagctcattgtcaccatccaacacatccaccatgcataatgcattgaggccattttcatcggaagcaccttcgcacctaagcatgccaagaccgactgcagtacctgtccctgacccatggtcatcgaagcgagttgcagtggagtctttgcttccctctcgtcctcaggttacatcgcagatggagcagttggactcaacagcacctagtataccacaaagctctgcgttggcgccgcttcctggaagaggatgcttggtggatcaagatgggaactctgatcctcaaaaccatctgttatttggcgttaacatagattcacagtcacttctaatgcaaggtggcatcccaagcctccagggtgagaatgattcgacggcaattccttattccacctccaatttcctgagcccgtcgcagaatgatttccccttggatcaaacactaagtagtgcagactgcttagatgaatcaggatatgtgccgtgttcacagaattctgatcaagtgattaatcgaccacctgcgacctttgtgaaggtttacaaatcgggaacctatggaaggtcacttgatatcactagatttagtagctatcatgaacttcgtagagaactagggcgcctatttggccttgagggccagttggaaaaccctttgagatcaggctggcagcttgtattcgtcgaccgagaggatgatgtcctcctcgttggcgacgacccttggcaggaattcgtgaatagcgtctcctgcataaagatactttcaccacaggaggtgcagcagatgggcaagccctttgagcttttgagctcggctcccggaaagaggctaggtagcagctgtgatgactatgtgagcaggcaggaatcaagaagcctgagcacaggaattgcatctgtcggctcagttgaattctga

SEQ ID NO: 4191 - DNA, 2514 bp, Oryza sativa
atggaggacagggtgaaggccatgctcaacctcatcggagcggacggcgactcgttcggcaagaaggcggagctctacttcaagagccggcccgagctcatcaaccacgtcgaggagatgttcaggtcctaccaggcgctggctgaccgctatgaccggatatccagcgagctgcacaaggccaaccacaccattgccacagcgttcccggaccagatccaattctccatgcaagatgccgatggggaaggattccagaaggcgatatccgggatcgatctcagcaacttcaaatttcctgcgctggaaggtttgccaatggggtcacgcggcgctagccggggaaccagcccggtcccgaagaggacccagatgcaccggaggatcacctcccacatgaacaaggaaaatgcacaggaggagatcgacaagctgcaaaagcaaatcctggtgctgcagactgagaaggagttcttgaagacctcttatgacagcgcgctgggcaggtatctggacattgagaagcaggtggtggagttgcaggatgaagtttgcagcttgcaggatgcttttagcactggcgcggccattgaagacaatgaagcccgggcattgatggctgcacgagccattgtgtcttgcgaggatacattggttaatttacaggaccagcaacgtagatcatctgaagaggcaagaactgagtttaaacgattcattgaagcaaagaagaagcttgataccttcaaagctgagtgtgggcagcctcatacgcaaaatgatgaacctgataacagtgacaaagaatacatccatgcaatgccatctggggatgttgatgattctgttcagaatgagatcaggtttgacctgcaggaagtatgccaaaaggtcaaagaactaattgaattgcacccaggggtatcggtcactgatttagcagataaggttgaccgacttgtggagaaggtaatcgacctagagcttgctaccacttcacagaatgctcagatcaatagaatgaagactgagatagacgaccttcacaagtgcctgcaagccttggaggaagagaagtcggctttggttgctgattccagtaagctggtagacagattgaagcaagttgaagaggttttgcaagcagtccaacatcttggaaactccatacaaaatgggacacagaatattcataaagaaatgaatgcagcctgcagtgaacttgctgaatttgtagaaaaattacatgaacctgagccccaaaacagtggtttcatgaattcatcccaagagtcaagttgtcaagaagaagattcagaggtaacaagtcagtatgccaagaaacaaacatccgactcaatagatggttcaaagaatgaagtggagaaacaagataaaggctccgagggtcctttggtgcagcaacatcctgacacaaatggatctgatggtgaggacaagattttattagaggggtatgcatctgtccttcagagctacaagggtacagagcaaaagctgtcagaaattgagaagacaaatcaagagtaccattcaaggtcaatgtcagagctgaaggatctgaagagtgccaatgcaatgaaagatgaggagattcactctcttcggcgcatgctaagttctttgcagagaaagatgaatgcccctgctcctgagaatgtggacaagtctgaagaaacttccaaaataagcaccactcctgtcaccgaagacaaagagattgcagaaatagaggagtacatgaagcaatgccaagttgaagagcaacttgcttcgtcaatttccgaggaaaaatttagagcagagattgacagggtgttggagaataacttggggttttggttgaggtttagcacatcatatcatcaaatacggaatttccaaacatcatttgacaagctaaaaactgagatggataaattgattgatgcacaggcacagtgtggtgcagatggagttcctatcagttatcaggtagcaaagctggagtcagctgttctagaaaaaaaattccgggatttgaacacagatcttcaagtttggatagaaaaaaatgtgctattaaaaggagaactagagaacaggttctcatcactctgtggcatacaagaggagatatcaaagatcgcaactctggataaaagcgatgaagttcacttcacccctttccaagctgcaaaactccaaggagaggtgcttaatatgaaacaagagaataacaaagtcgctaaagagctagaagctgggctggaccatgtaagaggtctccaagtggaggttggcagggtgctcttgaagctccgagaaaatcttgaattatctatagcaagaagcaaccgagctcagcaaaacttccgtaacctgtcaacgaaagctggagttccccttagaactttcctgttcggcacgaagccaaagaaaccatcactcttttcatgcatgggtcctggggtgcataagcatcacagtggctcaagggctggtcgtagatga

SEQ ID NO: 4192 - DNA, 549 bp, Oryza sativa
atgtgcgatttggtggcgagaacggggcggcaccagcagcgctacgagcatgggcgtcgactcgtggccgggtgcataccttttagatataaagataacaatgatgaaacttctgatgatggacacaagaaacttgtggaagttctcatgatcaactcccagagtggatctggtctcctatttcctaagggaggatgggagaatgatgaaactgttgaagaggcagctgctcgtgaagctattgaagaagctggagttcgaggagatttagtgcaattattgggcttctacgacttcaagagcaagacgcatcaagacaagttctgccccgaggggatgtgcagagctgcggtgttcgcgcttcgagttaaggaagagcttgcctcctggcccgagcagagcacccgcaagaggacctggctcactctcagtgaggcggtggagcggagccgttacccatgggtgcgagaggcccttacaacgggtttcaccacctggcatgagaactggagcaacggggacgaccatgtcgacccaagttcaagatga

SEQ ID NO: 4193 - DNA, 1044 bp, Oryza sativa
atgacgatgtatccagctttgttgctgctgcgacgaggtgctcgccggcggcggcgcaccgcgccccgtccgaattccaagagtgcgcgtccgctgctgcgaggacacgctcggcgtcccgcgcagccgccggcccacccacgacaccgagctcgcgcagtcgcagcgcttcccggagctcgtcacgccctacggcgccgccagctaccttccccaccagcagcgctaccctctcccccaaggccgcgccgcatcgtcctcgtccgccacggcgagagcgagggcaacgtcgacgaggccgcctacacgcgcgtcccggacccgcgcatcggcctcacgccgcagggctggcgcgacgccgaggactgcggccgccgcytccgccacctcctcagcaccggcggcggcgacgactggaaggtctacttctacgtgtccccctaccggcgaacgctggagacgctgcgcggactggggcgcgcgttcgaggcccggcgcatcgccggcgtccgggaggagccgcggctgcgggagcaggacttcggcaacttccaggacagggacaagatgcggtcggcggcggacgtgtacgaccgcatcaccggcttccgcgagacgctgcgcgccgacatcgacatcgggagttccagccgcccgggagcgcaaccggacatgaacgtcgtgctcgtctcccatggcctcaccctccgcgtcttcctcatgcgctggtacaagtggacggtgtcgcagttcgagggcctcgccaacctctccaatggcggcgcgctcgtcatgcagaccggcgccggcgggaggtacagcctgctggtgcaccactccgtggacgagctccgggagttcggcctcaccgacgacatgatcgaggaccagaagtggcagatgacggcgaggcccggcgagctcaactacaacttcatcaccaacggcccttccttcttcacccacttcacccatcatcaccacgacaaacacaaagccgccattgacgacggcactggaggatcagcaaccgcaccttcttga

SEQ ID NO: 4194 - DNA, 1230 bp, Oryza sativa
atgccccgccctggaactgaggctaccaccaccaccacttctggctgtgaagcggattgtggtgtccctgctatgaaggcgacgttgatgatgatgagttgtcggagtcggagtcggagcgggcgtgctcactggatgctgctgctcttctgcctcctcctcgccttcccttcacatggtcctagagccgtggaagcgtttcccgggggctatgggataaactacgggagaatagcaaacaacatcccttctccggataaagtagtacaactcctgagagcttcaaagataaggaatgtcaagatatacgattccgatcacagcgttcttgatgcattcaagggatctgggctcaatctggttatcgccatccccaatgagctcgtgaaggattttgcggcgaatgagagcaggtcgatcgactggctgaatgagaatgtgcagccctatcttcctcagacacgcatagttgggatcactgtgggaaatgaggtgctgggaggtcaagatacaagcttggccgagcccctcgttcaagctgtgaagaatgtctataatggactcaagaaatttcacttgcaagacaaaattgagctattcacaccacactcagaagctgtttttgctacttcatatccaccttctgcatgtgttttcaaggaagatgtcatggtgtatatgaaaccactgctggacttctttcaacaaattggctcacctttctatgtcaacgcatatccctttttggcctacataagtgatccagaacatattgacattaattacgctctcttcaagcccaatcctggaattgttgacccgaatactagtctgcattatgataacatgttcgatgctcagatagatgcagcttatgctgctctgcaggccgctgggtatagagacatggaggtccgagtagcggagactggctgggcttctagtggagatcaaactgaggcaggagcttcagttgagaatgcaaggacttacaatttcaacctccgaaagaggctctttctgaggaaaggaactcctctcaagccaaagagaccagtcaaagcatacatctttgcgttgtttaatgagaattcgaagcctggacctagctcggagaggcactatgggctgtttaatgctgatggaaggattgcatatgatattggttatgagggtctattaccttcatctgcaccctcgtacttcttgtctcttagggaaaacgtatga

SEQ ID NO: 4195 - DNA, 1785 bp, Oryza sativa
atggagaacttgaagattaatggtagcacaaagacaagtaatgtcaacttgcctgctacaaaaggcgcaagttcttctgatgcaatatcatgcatttcctcgggcgatgcagctagtactgtcaaggaaagtgaaatgaaccaagaagcttctgtgggggaccaagggatgtattactacggatattattatcctgcctcatttggaggatatgatgagaatggctacttcgttggatacaatggactggaggtgcaccctacagtggttcaaggtgataatgggtcttatttgtgttatcttccggggtatgaaaatggatatacttatagcccgattgttcctggagttattgctggtgtggatggtcaatatatcagcaaagagccatattattctacaatttctatgcaggaccctagcacacctggcatttttgctcaaccagttgcttatggacctgagctagtccctgcatacacatgggatccttcttttgcccttcttgatggggttcagggacgtcctgttggtgtgcatcaaacaaattaccctgcaagaccaaaatactcttctaataagcttccttcatcaaaagcttcccggaacactaagtctgcatcagataccatcaaaggatcatcatcagctctagacacgatgtcaacttctgctaatggctatccatcctcgaagactgcaaacaaggcatctggtgcttccatttcaaaagggtatcctctgtctagcaagtttgcggtgcatactaaccaaggaaaagacaatctttaccaaagtaaagacattggtatgaaggaaagtggtagaagctggaacagtactgagaagctcaaggccagaagtaagctaaatggatatggtgactgtgatatatcagataacctcactgataactccaaaaatagtttgagccctcaaggtggtcattatggactatcaagtgcaggggggggcaatgatgttacaccttcacctgttgcaatgagccgagatgcatataatcttccagattttgttacgaagtatgatcaagctttattctttgtgattaaatcttatagcgaggatgatattcacaagagcattaagtacaatgtctgggcaagtactcctaatggaaataaaaggcttgacaatgcctttaaacttgcacaagaaagagttgctgagaaaggaaccaaatgtcctatgttccttttcttctctgtgaacgcaagtggccagttctgcggcgtggctgagatggtcggtccggtagatttcaacaggaatatgaacttctggcagcaggacaagtggaatggatttttcccagtaaaatggcacattatcaaggatgtgcctaatccacaatttcgccacataatactggagaacaacgaaaacaaacctgtgacaaacagcagggatacacaagaggtcaagtttccacaaggttcagagatgctgaacattttcaagaacttttcatgtaaaacgtcaatattggatgactttgacttctatgaaaataggcagaaagtaatgcaggacagaagaggcaagccacttgctacaacattggatcaccccatgttaaaagttgaaaaacctgaagaaactaagaggccaagtcaatttgtaagtacagtggatcttgatacagccaaaccagatgaagtggtgtttgacaagattgcaacagaactcgatacagccaagctaagtgaggagcagatcaacaaagttgaagtggaaattggcacaactaacagtagtgagtag

SEQ ID NO: 4196 - DNA, 3282 bp, Oryza sativa
atgcaggtgggcaatttcatgcactacatcagccggttcctggccggcttcgccatcggcttctcgcaggtgtggcagatcagcctcgtcaccctcgccatcgtcccgctcatcgccatcgccggcggcatctacgcctacgtcaccatcggcctcatggcgcgcgtccgcaagtcctacgtcaaggccggcgagatcgccgaggaggtgatcggcaacgtgcggacggtgcaggcgttcgtcggcgaggagaaggcagtgaggacgtaccgggaggcgctgctgaggacgtacaagtacggcaagaggggcggcctcgccaagggtctcggcctcggctccatgcactcggtgctcttcctctcctgggcgctgctcatctggttcaccagcgtcgtcgtccacaagaacatctccaacggcggcgagtccttcaccaccatgctcaacgtcgtcatcgccggcctgtcgctcgggcaggcggcgcccaacatatcgacgttcctccgggcgaggacagcggcgtacccgatcttccagatgatcgagaggaacaccgtcaacaaggcgagctccaaggccggccgcacgctgccgtcggtcgacggccacatccagttccgcgacgtgcggttcgcgtacccgtcacggccggacgtcgtcatcctcgacaggttcagcctggacttcccggcgggcaagatcgtcgcgctcgtcggcgggagtggctccggcaagagcaccgtggtctcgctcatcgagcggttctacgagcctctcacgggcgcggtactgctcgacggccacgacatcaaggacctcgacgtgaagtggctgcgccagcagattggcctcgtcaaccaggaacccgcgctgttcgccacgagcatccgggagaacatactctacggcaagggggacgccagcatggatgagatcaaccacgcggcgaagctgtcggaggcgatcaccttcatcaaccacctccccgaccggtacgagacgcaggtcggcgagcgcgggatacagctctccggcggacagaagcagcggatcgcgatctcgagggcgatactgaagaacccgtcgatactgctcctcgacgaggcgacgagcgcgctcgacgccgagtccgagaagagcgtgcaggaggcgctggaccgcgtcatggtcggccgcaccaccgtggtgatcgcgcaccggctgtccaccatccggaacgccgacacgatcgccgtcgtggacagcggcaggatcgtcgagaccggcacgcacgagcagctgatggcgaaccctcgcagcgcctacgcctcgctgatccagctgcaggaagcagctcagctccagaacaagcaatctttctccgacagcgccagcctcagccgaccactaagctccaagtattcgagggagctatcgaggacgagcatgggtgggagcttccgctcagagaaggactcggttagccggtacggcaccgtggaggcgcacgacgaaggagggcacaagagcaagccggtgtcgatgaagaagctctactccatgatacggccggactggttcttcggcgtgtcgggcaccgtcagcgccttcgtcgccggctcgcagatgccgctgttcgcgctcggcgtcacacaggcgctcgtgtcctactacatggggtkggagaccacgaagcgggaagtgcgcaagatcgcggtgctcttctgctgcggggccgtgctcaccgtggtgttccacgcgatcgagcacctcagcttcggcatcatgggggagcggctcacgctgcgcgtccgggagaggatgttcgcggccatcctccggaacgagatcgggtggttcgacgacaccagccacacgagctcgatgctgtcgtcgcggctcgagacggacgccacgctcgtgcgcaccatcgtcgtcgaccgctccaccatcctgctgcagaacatcggcatgatcgtgacgtcgctcatcatcgccttcatcatcaactggcggatcactctcgtcgttctcgccacataccccctcatggtcagcggccacatcagcgagaaaatgttcatgaaaggctacgggggcaaccttggcaagtcgtatctgaaagccaacatgctggccgcggaggcagtgagcaacatccgaacggtggcggccttctgcgctgaggagaaggtgataaagctctacgccgacgagctgaaggagccagcgaagcagtcattccggcgaggccagggcgccgggctcttctacggagtttcccagttcttcctcttctcttcctacgcgttggctttatggtatggttcggagctgatgagcaaggagatggccagcttcaagtcggtgatgaagtcattcatggtgctgatcgtgacggcgctggccatgggggagacgctggcgatggcgccggacatcatcaaggggaaccagatggtgtcgtcggtgttcgagatcctggacaggaagaccgacgtcctgatcgacgccggcaacgacgtcaagagagtcgagggcgtgatcgagctgaggggcgtcgagttccggtacccggcgcggcccgaggtggtggtgttcaagggcctcgacctcctcatgaaggccggcaagagcatggcgctcgtcggcatgagcggctccggcaagagcaccgtgctctcgctcatcctccgcttctacgaccccatcgccgggaaagtcttgatcgacgggaaggacatcaggaaggtgaagctcaagtcgctgaggaagcacatcggcctggtgcagcaagagccggcgctgttcgcgacgaccatctacgacaacatcctctacgggaaagacggcgcgacggaggcggaggtggtcgacgcggcgaagctggcgaacgcgcactccttcatcagcgcgctgccggagggctaccggacgagagtcggggagcgcggcgtgcagctctccggcgggcagcggcagcggatcgccatcgcgcgcgccatcgtgaaggacccggccatcctgctcctggacgaggcgacgagcgcgctggacgtggagtcggagcgcgtcgtgcagcaggcgctggaccgggtgatgaggaaccggaccaccgtgatggtggcgcaccggctgtcgacgatcaagaacgccgacgtcatctcggtgctgcaggacggcaagatcatcgagcagggtgctcaccaccagctcatcgagaacaggaacggcgcctaccacaagctcgtcagcttgcagcagcagcaacagcagcaggaccagatgcagaggcattga

SEQ ID NO: 4197 - DNA, 672 bp, Oryza sativa
atggcggggraggggaggaagctgcgggtgtacgggatggcgctgtcggcgaacgtggtgcgggtggcgacggtgctgaacgagaagggcctcgacttcgaccttggtccccgtcgacctccgcaccgccgcccacaagcaaccccaacttcctcgccctcaacgtaccctttcggccagatccccgtgctgcaggatggagacgaagtcctgtacgagtcccgcgcgataaaccggtacatcgcgaccaagtacaaggcggarggcgccgaccttctgccggcggargcgtcgccggcgaagctggaggtktggctggaggtggagtcgcaccacttctacccggccatytccggcctcgtcttccagctcctcatcaagcccctcctcggcggcgccacggacacggccgccgtcgacgagcacgccgccgcgctggcacaggtgctcgacgtctacgacgcccacctcgccggcagccgctacctcgccggcaaccgattctcgctcgccgacgccaaccacatgtcctacctgctgttcctctccaagacgcccatggcggagctcgtcgcgtccaggccgcacgtcaaggcgtggtgggacgacatctcctcgcgcccggcgtggaagaagaccgccgccgccatccccttcccgccggccgcytga

SEQ ID NO: 4198 - DNA, 1743 bp, Oryza sativa
atgtcggcgtcggggggattgagcttggtgcgccgcgccgtcgaggccgcgcgccgcacgccgcggtggcagaagaggctcctcgtcctcaccgccggtgttggttctttgacttatgcttgccaggataatcaagtacttcaaataaatgatggaactggcaagaagagggtggttatcgttggaactggttgggcaggcgcaagtttcttgagaaatattgacacttccttgtacgatgttcatgtcgtatcacctcgcaactattttaccttcacacctttgttgcctagtgtgacatgtggcacagttgaagcacgtagtattgtagagcctatccgtaatattgtgagaaagagaggcggcgcatttagattttgggaagcagagtgctacaagattgatccaactaacaaaaagatccactgcagatcagactcagatggaaatagtgaatttgttgtagattatgattacctggtcgtcagtgttggagctagacctaatacattcaatacccctggtgttgttgaaaactgccattttctaaaggtcagtactaataaggcagtaggaagtagaagatgctcaaaaaattwgggaaagagtgtccctgaaatktttcgaaaagagcgtccctttccaaacctaactgaggaagagaggaagaagaatcttcattttgttgttattggtggtggcccaacaggtgtagaatttgctgcagagcttcatgactttgtcaatgaggacttggcaaagttgtatcctgatgtgaagaagtatgcgaatatttcagtaattgaagctggagatcatatccttacaatgtttgacaagagaattacccaatttgctgaagataaattcaagaggacaggcatagatttgaagacgaattttaaggttgtgaaggtgtctgataaggctatcactatgactaattctgcaactggagagattgctgtgccttatggcatggctgtttggtccactggtattggaacccggtcccctcataatggatttcatgaagcaagttggtcagtgctagctactgatgaatggctcagggttcatggatgtgatgatgtatatgctctcggtgattgcgcgacaataactcaaagaaaagttatggaagatattgcttcaattttccgggtagcagacaaggacaattctggctctttgactgtcaagaaaattaaaaatgttcttggcgacatctatgaaaggtacccacaggttgagttgtaccttaaaactaaccaaatgaaggacttccatgacctactcaaagattcagacgggaatgctattaaggagtcaaaagagctgaacatagaggaattcaagaaagcccttgctcgagtggactcgcaagttaagatgctcccagcaacagctcaggttgcttcacaagagggagcctatctggcaaactgcttcaacaagatgaaatactgtgaagagaaccctgaaggtccgttgaggatcagaggcacagggcgtcatcggttcaaacctttcaggtacaggcaccttggccagtttgctccactgggtggagagcaaacagccgctcaattgccgggtgattggatacatgttggtcacagcacccaatggctatggtattctgtctatgccagtaagcaattcagctggcgcaccaggatgctggtagtatctgattggggcaggcggttcatctatggaagggactcaagcagcctataa

SEQ ID NO: 4199 - DNA, 1670 bp, Oryza sativa
atggcggccaccgccgcctacctcccgctccgtgcccaggcgcaggtgggcctggctccgctccggccgtcgggctcggccgctgctggggcgcggttgcccggccggacggcgcggcgccggcttgcggcgagaggcgggccggaggctgccggtatccgcgcggaggctgtccctggtggtggaggggtcgcgcggagggcggccatggtgcccccgtataatgttctaatcaccggttccacgaaaggtataggatatgctctggcaaaggaatttttgaaggctggcgataatgttgtaatctgctcaagatcagctgaaagggtagaatctgcggtgactgacttgaaaaaggaatttggagagcaacatgtgtggggaattgtctgtgatgttagggaaggaaaggatgtaaaggcactagttgattttgcacgtgacaagatgaagtatattgatatttggaaccataagaaggcaggattttctccttatctttgtgttcctttggcacagatcaacaatgctggatcaaatgcatatagttacaaaccgttggtcgagacctccgacgaggctctcatggaagtgatcacaactaacactcttggattaatgatatgttgtcgtgaggcaataaatatgatgagaaaccaacctcgaggtggccacatatttaacatcgatggtgctggttctgatggaaggccaaccccaaggtttgctgcatatggtgcaacgaagagaagtgtggtgcaccttacaaaatctctgcaggccgagttgcagatgaatgaagtgaacaatgttatggtgcacaatttgtcgcctggcatggttacaacagatcttcttatgtctggtgccacaacaaagcaggccaaatttttcatcaatatattagctgaacctgctaatgtggttgcggattatctcgttccaaacatcagagcaatacctactaaccagtccatgaaaccaacctacatccgttttctcacaggcttgaaagcctactccagaatattttcaaggattgcttttggtgctcgtaggaacaaaataatgtccaacagccagccagcacaagaggatgattgcatgtcgagcattctggtttctcgccttatccgggctatgcagccaacaaggagttaccttcgatggtctgatgatctccataagatgtttgtggaggctgtggcctaccatggaggtccctatgaagctaaaccaactgcagtgaaggagacaatgcaagctatgggtgtcacaagccttacgacccacaacatcaagagtcacctccagaagtacagggagagtttcagttcaggtgttgggtctcttcatgatcatgatctgctgagaaccacttctccaagcaaggaagcacttgatctggcatctgagatggttagggacaacgatgccgctatggctgaaatcgagatgttgaacgatttgctgttggatcacgatatagagatggtagagaccagtttctctgtggacgatttgcagatgatggagagggagctgatgagtgaaatcaagctgatcgagcacaacttcgagatatctgagagtgctcttgatgagtacatggatgacttggccaactacgcatttgaccttacgggtcctgcaaactcttctagtccatg

SEQ ID NO: 4200 - DNA, 555 bp, Oryza sativa
atggcggccgccgctctccgcgaccagctcaccgctctcctctcctccatgttctcccagggtttggtggacgagcagttccagcagctgcagatgctgcaggacgaggggggcaccccgggcttcgtctccgaggtcgtcacccttttctgcgacgacgccgacaggatcatcaacgagatcgccaccctgctggagcaacccgtcgtcaacttcgataaggtcgacgcctacgttcatcagctcaaaggcagcagcgccagtgttggtgctcagaaagtgaagttcacttgcatgcagttccgtcagttctgtcaggacaaaagcagagatgggtgccttatggcattggctgttgtgagaaacgacttctatgatctgcgcaacaagtttcagactatgcttcagactgataatctccttggttatggcatatatgatttgacagttgacaccaagttatgttggaagtttctgaaagctttacttgaggctgctcattcagctttcatgttgagcatcataaagctgctgttgatggttcctggatcttaa

SEQ ID NO: 4201 - DNA, 924 bp, Oryza sativa
atggagcagaaagatgaagccgagatggaggaggtggacgaggaggaggaggaggaggtcgacgaagacatggccggcgggcacgcggcgcagtcgccgtcgccgtcgtgcgggctgggcgagaagaagcggcggctggcgctggagcaggtgcgcgctctggagcggagcttcgacacggacaacaagctggacccggaccgcaaggcccgcatcgcgcgcgacctcggcctgcagccgcgccaggtcgccgtctggttccagaaccgccgcgcccggtggaagacgaagcagctcgagcgcgactttgccgccctccgcgcccgccacgaagccctccgcgccgactgcgaagccctgcgccgcgacaaggacgcccttgccgccgaggtacgcgcccaacgctgtgttttgcccgaagcgcgcsaragcttgtcactcaccttcaattcgtgctcgatcgatcagattcgggagctgagggagaagctgcccaccaagccggcggacacggcggcatcggtgaaggtagaagccggcaatgacgcggcggccggcgccgcggccgccacggtgtgcaaggacggctcgtcggacgacagcgactccagcgtggtgttcaacgacgaggcgtcgccgtactccggcgcggccttcattggattcggcccgtcgttcttggtcgacgacgcgtcggcggcaaccgtgggctgctcgtcgtcgctccccgcgctcgagtccaaatggcacggtccgtactccgacgactcgtgcaaaggcggcgtctatggcttcacggaggaatggctcgctgcctgctccggcgagatggccggcaacgacgccgccggcttcttctccgacgagcacgcctccaacctcaacttcggttggtgcgcgagtggtaacgagggttgggaatga

SEQ ID NO: 4202 - DNA, 2420 bp, Oryza sativa
atggacggccacccctcgccgcgttcacaccaccagccccctccgccagagcgggacggcagcttcaactacgacatagagagcatggacggcggcggcggcgcttggcgagggcggtacgagtcgtcggaggtgctgctgcggtacgacgacgaggccggcggcggcccgcgccagccgctgctgcggaagcgcaccatgaacaccacctctcagatcgccatcgtcggcgccaacgtctgccccatcgagagcctcgactacgaaattgtggaaaatgaccttttcaagcaagactggcgatcgagaaagaagaagcagatatttcagtatattgttcttaaatgggccttagttctgcttattggcatgttgactggaattgttggcttctttaacaatcttgcagtcgaaaatattgcaggattaaaactattgctcacaagtgatctcatgctcaagcagaggtacttcacagcatttttggcatatggtggttgtaatctagtcctggcaactactgctgcagcaatctgtgcttacatagcaccagctgctgctggatctggtattcctgaagttaaagcatatcttaatggggttgatgcttattctatattagctcccagtacactatttgtgaagatatttggttcaatacttggagtttcagctggatttgtacttggaaaggarggacccatggtacatacaggagcatgcatagccaacttgcttggtcaggggggttcacgcaaataccatcttacatggaattggctgagatattttaagaacgacagggataggcgagatttgattacttgtggatcagcagctggagttgcagcagcatttcgtgcaccagttggtggtgtgctctttgctcttgaggaagcagcatcatggtggcgaagtgctcttctatggagaacattctttacaactgctgttgttgctgttgtgttgaggggccttatcgagttctgtcgtagtggaaaatgcggtctctttgggcaaggagggttgattatgtttgatctaagttcaaccatcccgacatacactgcccaagatgttgtggcaataatagtccttggaataattggcggtgtttttggaggccttttcaattttctcttggataggattctccgtgcctacagtattattaatgagagaggccctccattcaagatccttctcaccatgataatatcaatcatcacctcagcatgctcctatgggctcccatggcttgctccttgcacgccgtgccctgctgatgctgcggaggaatgccccaccattggccggtccggaaactttaagaactttcagtgcccaccgggccattacaacggcctcgcgtcgctcttcttcaacacaaacgatgatgccatccgcaacctgttcagcagtggcaccgagaaggagttccatatgtccaccctgttcgtcttcttcaccgccatctactgccttggcctcgtcacctacggtatcgccgttccatctggtctcttcatccctgtgatacttgctggggctacgtacgggcgcatagttgggacacttctgggtcccatatctgatcttgacccaggcctcttcgcactgctcggtgcggcttctttccttggtgggacaatgaggatgacggtatcagtctgcgtgatccttctggagctcacaaatgacctccacatgctccctttggtcatgctcgtccttctgatatccaagaccatagccgatagcttcaacaagggggtctatgatcagattgtggtgatgaaaggcttgccattcatggaggcacatgccgagccgttcatgaggaacctggttgccggtgacgtcgtgtctgggccactcatcaccttctccggggtcgagaaggtggggaacatcgttcacgcgctgaggatcacgggccacaatgggttcccagtggtcgacgagccacctgtatcagaagccccagagctggttgggttggtgcttcggtcccatctgctggttctgctgaaaggcaggtccttcatgaaggagaaggtgaaaaccagcggtagcttcgtgctgcgaaggtttggtgccttcgacttcgccaagccaggctctgggaaaggcctcaagatcgaagacctggatctcaccgatgaggagctggacatgtatgttgatctccatccgattacaaacacctcaccctacacggtggtcgaaacaatgtcacttgcaaaggctgcagtgctcttcagggcactaggattaaggcacctactggtcgtgccaaagaccccaggagttacaccccatgtgagtcgaatggaactagacatcatgctgggaaaggacacaaaactcaacctcaacatgtgtacacctacagtgtacttcgaggagaaaaagggata

SEQ ID NO: 4203 - DNA, 723 bp, Oryza sativa
atgggccatgaactcatactcgtccgtgtcgtgggttatccttgcgtatccgttctgttttctgggtggaaaaagtggtcagggaaaacagagcagacaggtcaaaaagctggcagctttgggggcaagagaacgggaaaaaaatgtcagattcctgtgggggttgtgggcactcggatacgcctatcagcatctgctgcctccttatcgataagagcagtagtgtacatggtgttctcgtgcgccgactctcgcgtgtgcccgtcggtgaccatgggcctggagcccggcgaggccttcaccgtccgcaacatcgccaacatggtcccagcttactgcaagatcaagcacgctggcgtcgggtcggccatcgagtacgccgtctgcgccctcaaggtcgaactcatcgtggtgattggccacagccgctgcggtggaatcaaggccctcctctcactcaaggatggagcaccagactccttccacttcgtcgaggactgggtcaggaccggtttccccgccaagaagaaggttcagaccgagcacgcctcgctgcctttcgatgaccaatgcgccatcttggagaaggaggccgtgaaccaatccctggagaacctcaagacctacccgttcgtcaaggaggggatcgccaacggcaccctcaagctcgtcggcggccactacgacttcgtctccggcaacttggacttatgggagccctaa

SEQ ID NO: 4204 - DNA, 1404 bp, Oryza sativa
atgacttccgtcttccacttcaaggttgcagatgtcacaaatgaacttccaattcacacagcgaaggcggtcattgaagtttttgagtacgagggagctgtgaaggaggacgggagagggcagaccatctgggacacgttcgcgcacacctttggaaagatcaccgacttcagcaatgctgatgttgcagttgatcagtaccaccgtttcgaggaggatatacagctcatggcagacatggggatggatgcgtatcggttctcgatagcatggtcaagaatctacccaaatggtgttggtcaagtcaatcaagctggtatcgaccactacaacaagctgatcgatgcacttctagcaaaaggaattcagccatatgtgacactctaccactgggacctcccccaggcccttgaagacaagtacaagggctggcttgacaggcagatagtggacgatttcgcggcgtacgcggagacgtgcttcagggagttcggggacagggtgaagcactggatcacgctcaacgagccgcacacggtggccatccagggctacgacgcagggctccaggcccccggccgctgctccgtgctgctccacctctactgcaaggccggcaactccggcaccgagccctacgtcgtcgcccaccacttcatcctcgcccacgccgccgccgccagcatctacaggacaaaatacaaggcgacgcagaacgggcagcttgggatagcgttcgacgtgatgtggttcgagccgatgtccaacaccacgatcgacatcgaggcggccaagagagcgcaggagtttcagctaggatggtttgctgatccgttcttcttcggcgactacccggcgacgatgagggcgaggktgggggagaggctgccgaggttcacggcggatgaggccgccgtcgtcaagggggcgctggatttcgtcggcataaaccactacaccacctactacacgaggcacaacaacaccaacatcatcgggacattgctcaacaacaccttggcagacaccggcaccgtcagcctcccattcaagaatgggaagccaattggagatagggcaaattcgatatggctgtacattgtgccccgagggatgaggagcctgatgaactatgtcaaggaaaggtacaacagcccaccagtgtacatcactgaaaacgggatggatgacagcaacaacccgttcatttccatcaaggacgccctcaaggacagcaagaggatcaaataccacaatgactacctcaccaatctggctgcttccatcaaggaggacgggtgcgacgtacgtgggtacttcgcgtggtctctgctggacaactgggaattgggcggccggatactcctcgagattcgggctctacttcgtggactacaaggataa

SEQ ID NO: 4205 - DNA, 1068 bp, Oryza sativa
atggagcagcccaagccgccgtcggtagccgcctcggcggcggaggcgcagaacccgaacgccttcacctgcgagctgccgcactccatctacgcgctggccttctccccctccgcgcccgtcctcgccgccggcagcttcctcgaggacctccacaaccgcgtctccctcctctccttcgaccccgtccaccccaccgccgcctccttccgcgccctccccgcgctctccttcgaccacccctacccgcccaccaagctccagttccacccgggcgccgcctccgcgccccacctcctcgcctcctcctccgacgcgctgcggctctggcttgccccgctcgacgatctcgccgccaccgcmaccgccgccgcgcccgagctccgctccgtcctcgacaaccgcaagacatccgcctccgagttctgcgccccccttacctccttcgactggaacgaggccgagccccgccgcatcgggaccgcctccatcgacaccacctgcaccatctgggacatcgagcgcggcgtcgtcgagacgcagctcatcgcgcacgacaaggccgtgcacgacatcgcctggggggagaacggcatcttcgcctccgtctcagccgacggctccgtccgcgtcttcgacctccgggacaaggagcattccaccatcttctacgagagcccccgcccggacacgccgctcctcaggctggcatggaaccgctatgacttccactacatggccaccctgctcatggacagcagcgccgtcgtcgtgctcgacatgcgcgcgcccggggtgccggtggccgaactacacagacaccgggcgtgcgccaacgcggtcgcttgggcgccacaggccacgaggcacctttgctcggctggggacgacggccaagcgctgatttgggagctgccagcgacgcccggcgcagtgccggccgaggggattgatcctgtgatggtgtatgatgccggtgcagagataaaccaactgcaatgggcggcagcttacccggagtggatatcgattgcctttgagaacaaggtccagcttctcagggtctga

SEQ ID NO: 4206 - DNA, 1068 bp, Oryza sativa
atggcggcgtcggcgacccaggaggcggactgcaaggcttccgaggacgcccgtctcttcttcgacgccgccaagcccccgcccttccgcatcggcgacgtccgcgccgccatccccgcccactgctggcgcaagacccccctccgctccctctcctacgtcgcccgcgacctcctcatcgtcgccgccctcttcgccgcagccgccactcggattgacgtctccgtcgcctgggcggcctggccgctctactgggcggcgcagggcaccatgttctgggcgctcttcgtcctcggccacgactggagaatcagccacagaacacaccatcagaaccacggtcatatcgagaaggacgagtcctggcacccgatcaccgagaaattgtaccggaagctggagacgcgcaccaagaaactgcgctttacattaccatttccattgcttgccttccctgtctacctctggtacagaagtccgggcaagaccggatctcactttctgccgagcagcgatctgttcagccccaaggagaagagtgacgtgattgtctccaccacctgctggtgcatcatgatttcgttgctcgtcgccttggcgtgcgtgtttgggtctgttccggtgctcatgctatacggtgtcccatatcttgtattcgtgatgtggcttgatttggtgacttatctgcaccaccacggtcacaatgaccttccctggtatcgtggagaggaatggagctacctccgcggtggcctgacaacggtggatcgggactacgggtggatcaacaacatccaccatgacattggcacccatgtcatccaccaccttttcccccaaattcctcattatcacctcgtagaagcaacaaaggcagcaaggccagtgctgggcagatactacagggagccagagaagtcaggtccgctgccacttcacctgtttggcgttctgctgaggagcttgagagttgatcactttgtcagcgacgtcggggatgttgtttactaccaaacagatcacagcttgaacggcactgactgggccgaagatgctaagcacaagtga

SEQ ID NO: 4207 - DNA, 1626 bp, Oryza sativa
atggatgcggctgcggtgatgcagaagcagctcaggcggctccgcacgctcggccgcggcgcgtcgggcgccgtggtgtggctcgcgtcggacgacgcgtcgggggagctgctggcggtcaagtcggcggccggcgagggcggggcggagcagctgcggcgcgaggggcgcgtcatgtcggggctctgctccccgcacatcgtcccctgcctcgggtcacgcgccgcggcgggcggggagtaccagctgttcctcgagttcgcgcctggcgggtcgctcgccgacgaggccgcgaggagcgggggccgcctcgcggagcgcgccatcagcgcgtacgcggcggacgtggcgagggcgctggcctacctccacgggaactcgctggtgcacggggacgtcaaggccaggaacatcatggtcggcgccgacgggcgggccaagctcgcggacttcgggtgcgcgaggaggactgactccgagcggccgattggtggcacgccggcgttcatggcgccggaggtggcgcgaggcgaggagcagggaccggccgccgacgtgtgggctctcggttgcacgatcatcgagatggccacaggccgcgtcccgtggagcgacatggacgacgtcttctccgccgtccaccggatcgggtacacggacgctgtgccagagattcccgaatggctctccccggaggcgaagaatttcctatccagatgcttcacaaggaacccaagcgaccgccccactgccgcgcagctactggagcacccatttctcgcatccgcctccagcgacatcgacgaaacggcgccgaagcacggctgggtgtcccccaagagcacgctgaacgccgaatgctgggaatctgatgaagacgacgaagtagaagaaggcatgtcacagagcgcaaccaagaggatcagcgcattggcgatcacctgctcggcgttgccggactgggactccgaggatggctggatcgacttgcaaagcgacccatctgaagtttcggaaacaccggcgcccatggtggtgactactgcagatttcggtctttggtgggaggaagcattggacgcggagattgatctccatttcgttgacgtggacggcgatggctatgttacgcgaactgtacgcgcgcgtggtttcattgagtacgacagacaactgagtgtgagagttcgcggtgatatgccgttgtgcccggttgattgccaccggagcgacactgtaaaattcggttgtcattgtaacgggaacagagtaataaatttcgagtctgcacaaatttgcctgttgttaccattcatcttgcaatcaagggctcatagattgcatagcgttgagctcccgcgcatagtttcttgtagtcccaccctagaggactgcattgtaaaatgtccaattggctttgccgctaccgcaggcctcccattgggctcacctcagcccgactattcacacacctgcgatacctacgtaagctatccaagttgtgttgtacatgcgtcaatggggaccattggggacggacaaagagaagagtctgagagacatagggaagatatggaagatcaagaattgagaatatgcagtggtatcactacgtggaagttttga

SEQ ID NO: 4208 - DNA, 1182 bp, Oryza sativa
atggctcggtgcagcgtctcccgtgttgtcttgttgctcttgtgttgcatgcatctgtcggctgcagctgcaggagcagcagtgtacaacgtcgagagttacgacgcgagacctgacggccggacggacgcgtccagggcattggcgtccgcctggtccgccgcatgccggtcgccggagccggccaccgtgtacgtgccagacggcgagttctttgtcagccactcggccttcgctggcccgtgttccggcggcaggatgacggtccagatcgacggcacgctggtcgcaccgtccggttacaccggcagtgccagctctggcggggagtggattgtgttcgaccacgtcgacggcctcaccgtgtccggcggcaccctcgacggccgcggtgagtcgctgtgggcgtgcaaggcggccggccacggcggctgcccggacggcgcaacatcgatgaaggtgctgaactcgagggacgtggtgataagcggggtcaagtcggtgaacagcgagctgtaccacgtcgtgatcgacgggacgcccggatcgtggcgcccgggagcagccccaacacggacggcatccacgtgcagtcgtcgtccgcggtcaccatcaccggcgccagcatccagaccggcgacgaactgcatctccgtcggccccggcacctccaacctccgcgtcgagcacgtcagctgcggccccggccacggcataagcatcgggagcctggggaaggagagcgaggagggcggggtggagaacgtgacggtgagcggcgcggcgttcgtgggcacggagaacgggctgcggatcaagacgtgggggcgggcggcgcgctcgggggcgtacgtgcgcggcgtcgtcttcgagcacgcgctcatgcgcgacgtgagcaaccccatcatcatcgaccagagctactgccccaacgacggcggccaaggctgcccccatcagagctccgacgtgcagatcagcggggtgacgtacaccgacatccagggttcgtcggcgtcgcaggtggcggtcaagttcgactgcagcgcgagcaaaccctgcagcgggctcggcctgcaggacatcaagctcacgttcgacggcggcaagccggcggaggcgacctgccaacacgccgacggcacggcctccggtgtcctcatgcctcccagttgcctgtaa

SEQ ID NO: 4209 - DNA, 2370 bp, Oryza sativa
atggatctggaggccgcgcatggcgcggctgcggcgccagggaagaggaggaggagggcgagggagtcatggggagcgtcgctgctgctcgcgtaccagagcctcggggtggtgtacggcgacgtggccacgtcgccgctgtacgtgtacaagagcgccttcgccggcgacgacatccagcactcggcggggaacgaggagatctacggcgtgctgtccttcgtgttctggacgctgaccctcatctcgctcgtcaagtacgtgctcatcgtgctccgcgccgacgacggcggcgagggcggcacgttcgcgctctactccctcatctgccgccacgtccgcgcgggcctgcttcccggcggcgccggcgacgagctcgccgtgggagggcgtcgtgacgcccgggccatgtcgaggctgagggcgatgctggagaggtacagggtgctgcagaggctgctgctcctgttcgcgctgctcgggacgtgtatggtcatcggggacggcgtgctcacccctgcggtctctgtgtactctgcggtctctgggcttgagttgtcaatggagcatgagcatcacaaatgcttgtttgcgctgcaacactatggtacacacagagttggatttatctttgccccaattgtctgcgtctggcttctctgcataagtgctataggggtttacaacattgttcactggaaccaccatgtgtaccgagccctctcaccatactacatgtatcagtttctcaagaagacccaaacaggtggttggatgtcactgggtggaattcttctatgtgtaacaggttcggaagctatgtatgcagatcttggacatttctcacaatcgtcaattaagattgcgttcatgtctgtggtttatccagctctagttcttgcttacatggggcaggctgcttatatctcacaacaccacagctttgagaatgcttatcatattggattctatgtgtcagtaccagaaaaacttagatggcctgttctggtgattgctatactagcagctgtggttgggagccaagcagtcattactggcaccttttcaattatcaagcagtgctcttcattaagttgcttccctggcgtgaaaattgtgcacacatcatctacagtacacggtcagatatacatacctgaaatcaattggatcctgatgatactctgcctggctgttactcttggcttcagaaacacgaaacatttggcaaatgcacaaggtctggcagttataactgttatgcttgttaccacttgtttaatgtcactggtcattgtgctttgctggaacaaaagtatcttccttgcgctcggtttcctgattttctttggcacaatcgaagtactctacttctcagcttcccttgtcaagtttcatgaaggcgcatgggtcccaattaccctctcctttatatttatgatagtcatgtgcgtgtggcattatggcactataaagaagtatgagttcgatttccaaaacaaggtttcagtaaactggctcttgaaccttggtccttcattggggattgtccgtgttcgaggcattggactgatacatacagaactggtactggtttttctgtgtgttaaatcagttccagtgccacatgttcaacctgaagaacggtttctagtgggtcgcattggtccaaaagagtacaggctatacagggtcatcgtgaggtatgggtaccgtgatgtgcagaaggatgacatagagtttgaaaaggacctagtcagcagcattgcagagttcatccgcagtggggattctcaccacaacggtgttttggaggacacagacaagtcgtgtgagaaactgtcttccatcagtaatggtattccattgtggatggaggatggagaggtcgatgcttcagcatcccctcataaggagacagatacacagatcatatcaccaaaccgaaagaaagcaaggttcgtgctgccaaagaatgcccaggtggacagcgaagtgcgccgtgagctgcaggagctcatggatgcaagggaggctggaatgtccttcatcttaggacactcctacatgaaggcgaagagcgggtctagtttcataaagcgaatcgtgataaacttcttctacgagttcttgaggagaaacagccgcggaccatcttatgctgctaccatacctcatgcctccacactggagaaacctttcgctgttgtggataccactgcgaaactggggaagttgcatcgccaaagggaagccttgcgtgtcctcagatttagcagtagcttcgtttttcctgtgtcttgggccaagcccaacagggccgacgggaaatcgaaatatgcagttatagccgtctgtcctcttttgtga

SEQ ID NO: 4210 - DNA, 980 bp, Oryza sativa
atggagtactcttacagctacaggttcatgcttgtatgctctgttcttgtactgtgccttaatactcggggtgcgagatgccagttatccgacgatttctacgactacatatgtcctgatgtgtacaccgttgtccagcagcatgtttatgctgccatgaggactgagatgaggatgggtgcctccctcctaaggctccatttccatgactgctttgtcaatgggtgtgacggttccatccttctggacggtgacgacggcgagaaatttgcacttcccaacaagaactctgtcagagggttcgaagtcattgacgcgataaaggaagatctcgagaacatctgccctgaagttgtttcctgcgccgacattgtagcccttgcagctggctatggagtactatttagtggaggcccttactatgacgttcttctcggtagaagggatggtcttgtcgcaaatcaatcaggagctgacaacggcctcccttcaccgttcgaacccatcaaatcgatcatacagaagttcaatgatgtcggcctcgacacaaccgatgttgtcgtcctatcaggagggcacacgatcggacgagcccggtgcacgctgttcagcaaccggttgtcgaccacctcaagctcagccgacccgacgctggacgccaccatggccgccaacctccagagcctctgtgccggtggagacggcaacgagaccaccgtgctggacatcacctccgcctacgttttcgacaaccgctactaccagaacctcctcaatcagaaaggcctcctgtcctccgaccagggcctcttctccagcgacgacggcatcgccaacaccaaggagctggtggagacttacagcgcagatgcccacaagttcttctgggattttggcagatccatggtgaagatgggcaacatcagcccactcaccggtgacgacggccagattcgcaagaactgcagggttgttaatta

SEQ ID NO: 4211 - DNA, 2478 bp, Oryza sativa
atggggatgtcctcgccggtgacggaggcggagatggcgacggtgaagacgtcgtccaacggcgtktggcagggggacgacccgctccacttcgccttcccgctcctcatcctccaagctctcctcatcctcctcctcagccgcctcctcgccctcctgctccgcccgctccgccagcccaaggtcatcgccgagatcgtcgccggcatcctcctcggcccctccgcgctcggccgcaacaaggcctacctccgcgcgctcttcccgccctggagcgcgcccgtgctcgagtcagtcgccagcctcggcctcctcttcttcctcttcctcgtcggcctcgagctcgacctccgctccgtgcgccgtagcggccgccgcgccttcgccatcgccgccgcggggatctcgctcccgttcgcgtgcggcgtcggcgtcgccttcgtcctccgcggcgagctcccgggcgccgcgcgggcgggctacgcgccgttcctcgtcttcatgggcgtcgcgctctccatcacsgcgttccccgtcctcgcgcgcatcctcgccgagctgaagctgctcaccacccccatcggcgagacggcgytggcggcggcggccggcgaccaccggagccccatcgtctccctctgggtgctcctgtcgggcgcggcgttcgtcacaatatggatggtgttcgtcaagccggccatggcgtgggtggcgcggcggtcggacgggcagggcggcggcgaggtgtgggtggcggcgacgctggcgggcgttctggcgtcggggctcgccacggacatgatcgggatccacgccatcttcggggcgttcgtgttcgggctgacggtgcccaaggagggggagttcgcggggagggtgacggagagggtggaggacctggtgtcggagctgctgctgccgctctacttcgcgtcgagcggcctcaagacggacgtcgccaccatccggggcggcggggcgtgggggatgctggcgctcgtcatcgggacggcgtgcgccgggaagatcgtcgggacgttcgcggtggccatggcgtgcgggatgtcggcgcgcgaggcgctggtgctcggcgtcgtcatgaacaccaagggcctcgtcgagctcatcgtcctcaacattggcagagaacgcaaggtgctggacgaggagacgtttgcgatcctggtgctaatggcgctggtcaccaccttcatcaccacccccacagtcatggccatctacaagccggcgcgcaacgccggccgccgccgcctgcaccaccgcaagctgcatggcccctccgcgccgtcctcaccgtccgcggctgccaccgccggcgccaaggagctgcgcgtgctggcctgcatacacggcggccacgacgtgccggcgctgatcaacctcatcgagaccatccgcggccacacccagccgcgccgcctcgtcaagctctacatcctccgcatggtcgagctcaccgagcgcacctcctccatcctcatggcccgcgccgcgcgccgcaacggcgtccccttcctccgcccttgccgcggcggcggcgaccaggtcgacgtcgccttcgacacctacgcgcagctcggccamgtccacgtccgccccatgaccgccgtctccgcgctccacaccatccacgacgacgtcgccgccgtcgccgaggacaagcgcgtctccctcgtcgtgctcccgttccacaagcgccacccgggccacggccatggcgacgacctcggccccgagtggcgcgccgtcaaccggaggatcctgcgcgaggcgccctgctcggtcgccgtcctcgtcgaccgcggcttcggcggcggcgagcaggtcagctcggagcaggtcgcgcacggcgtctgcgtcgtcttcttcggcgggccggacgaccgcgaggcgctcgagctcgccgggaggatggccgagcaccccggcgtgcaggtcaccgtcgtgcggttcgtcgacggcaaggaaggtagcgaggagcacgccgaggtgacgctgcgcccgtcgaacaccaagaacgccgacaagagctacaccttctcaacggccatcgtcgacacccacaaggagaaggagctggacgaggcggcgktggcggaattccggcagaggatgggggccatggtgaggtacgaggagagggtggtggtggggaacgtgatcgaggaggtggtgtcgatcgggaagagccgggagtacggcctggtggtggtcggcaaggggcggctgccgtcggcgatggtggcggagctggccgtccgggcggcggagcacccggagctggggcccatcggcgacgcgctggcgtcggcggggcacggggtgacgtcgtcggtgctggtggtgcagcagcatgacatgagcaacgccgacgagctgccggtgtccatcgtcgtcgacggccacgcccacgacgacggcgagctcggcggcaacaaggacatggccgagccataa

SEQ ID NO: 4212 - DNA, 675 bp, Oryza sativa
atggacgtttctgctgcgctcagcagcgactactcgtcggggacgccgtcgccggtggcggccgacgccgacgacggctcctccgcctacatgacggtgtcgtcggcgccgcccaagcggcgagcggggcggaccaagttcaaggagacgcggcaccccgtgttcaagggcgtgcgccggaggaaccccgggaggtgggtgtgcgaggtgcgcgagccgcacggcaagcagcggatatggctcgggacgttcgagacagcagagattgcggcgcgcgcgcacgacgtcgccgcgctcgcgctccgcggccgcgccgcttgcctcaacttcgccgactcgccgaggcgcctccgcgtcccgcccatcggcgcaagccacgacgacatacggagggcggcggctgaggcggccgaggcattccggccgccaccagatgagagcaatgcggccaccgaggtggcagccgccgcatcgggcgccactaattcgaacgccgaacagttcgcctcccacccgtactacgaggtcatggacgatgggctggacttggggatgcagggctatctcgacatggcgcaagggatgctcattgacccgcctccaatggccggtgatcctgccgtaggtagcggcgaagacgacaacgatggcgaggtccagctatggagctactga

SEQ ID NO: 4213 - DNA, 1923 bp, Oryza sativa
atgtcctcctccctcccctctcccctcctcttcctcctcctcctcctccccttccccgccgcggttcgttcccagccggcggcggcccccgcgccgcagcagcaatgcccgctcaacttcaccgcgctccggcccttcctggcccagccgctcccgcccgacgactccgcgcgctgcctcctcgccgtgcagtccgttcgcctcctcctcgcgctccacctcgccgccacaggatccttcgtcctcccggctaactcctcctgcctcccgccgctccgcgccgagctccccttcgcgctcccgtcgccctccgcctgcggcctccaggggctcgacgcgctcctcgcgtccccggggtgcgccaacgtttccactctcggggacttcgacgccgccgtgccgccgtcctcgcgggcggacatgaacgccagctgcaaccgggacctcaccccggtccccgactgtacctcctgcaccacctcgctcagcaaggccgcggcggcctacctcctcccgggctcccccaacgacggtgggaacaacgtcaccggctgcgtccagtaccccttcatctacgccggcgccgccgccagcccgcgcggcgccgacgacccagccacggccaactgcctctacctcctcaaggtgaactctgcttccaaggccagctccagcgtccctggttgggtctacggcgtcgtgtttggctgcgtcgccatggttctgctcgttgccgcggcggctgcctcttggttcctggtgcggcggcggcggaggcgggccgccgccgcggcgctggccaaggccgcggccgacagcaggagcaagcgctcgcaggcgatggagtcaatcagcgcgagcaccacgctagtccagttcacctacgacgagatcaaggcggccactgggggattcgcaagggagagcatcattggccgcggtgggttcggcaatgtgtacaagggcgtgctcccggacggcgcggaggtggccgtgaagcggttcaagaactgctccgcggctggggatgccgcgttcgcgcacgaggtggaggtcgtggccagcgtccgccatgtcaacctggtcgccatccgtgggtactgcatcgctaccactgagagagaaggccaccagcgaatgattgtgtgtgacctgatgcacaatggcagcctgcacgatcacctgttcggtgccggggaatgccagatgacgtggccggtgaggcagaggattgccatagggatggcgcgcggcctggcctatctgcaccgcggggcgcagcccgccatcattcacagggatatcaaagcgagcaatatcttgcttgatgacgactttgaggccatggtggctgatttcggattggccaagtttgcaccggaagggatgacgcatgtgagcacaagggttgctggcacgctgggttatgtcgctccagagtatgcactgtatggccaattgactgagaagagtgatgtctatagcttcggagttgtacttcttgagcttctaagtggaaagagggcatttatctctcttggtgaaggccagaactttgtgctcagtgaatgggcttggttattggtccggagggggaagacagtggatgtgatccaagaaggaatggttgagcctggtcctactgaggtaatggagaagtatgtacttgtcgcagcactctgcacgcatcctcagctgcacgctaggccaacaatggatcaagtggtgaagatactagaggcagattcagcgtcaggtcctttaattattccggagcggcctcttccggtagtcgcaaacctggctgagattgagagatcagccagtagcagtggctcaggtcagctgtttagtccctctggtttccggtcttttactcatataaatgaagatgctgctttggagtctcctaaagaagaatga

SEQ ID NO: 4214 - DNA, 5199 bp, Oryza sativa
atggcttccccggcggcggcgccgccgcctaccccgccggagtccgacccgcggctcgtggaggccttcgtgcccttcctcgagaagctcatcaaaaacgcctcgtggcgcaacaaggcgcactccaagctctcccacactgccaagtccatcctcgaccgcctccagaacccgccgccgccggcggctgcggcgcaggcaccgtccacgcccacctcccccacgacgcccacctcgtcgtcctcgcagccgggcccgctccgcagcctctcgctcgcggactcggagctgctgctcggcccgatcaactccgcgctcggctccggcagcgccaagctcgccgaggccgggctcgagctgctccacaggctgatcgcgcactcctacatccatggcgaggccgacccgtccgccgacccctcggcccagctcgtcgcgtccctcctcgatgccgcctgcaacgcgctttacctcgacgacgagcacatcgagctcctcctactcaagacgctcctctcggcggtcacctccacgtcggtgcgcctccatggagattgcctgcttcgcgccgtgcgcgcttgctatgatatgtacctgggaagccgcagcgtggtgaaccaggccactgccaaggcgtcactcgtgcaaatgttggtgatcgttttccgccgcatggaggcagactcctccacagtgcccgtgcaacccatcgttgtggctgatgtgatcgagctgcctgaagctgcttctggtgcttcgcctgccgctgatgccaactttgtacagggattcatctcgaagatcattggagacattgatggtgcaatcacacctctggcacggacaacttcttcagcagctgcaggcgcaggtggagcagcggctcatgatggtgcatttgagacaagagcagcagaggaaggggcacatccagcagatttgcttgattcaacagacaaggacatgctagacgccaagtactgggagatcaacatgtacaaatctgctcttgagggtcgtaaggatgagattggtgtggagggggcagtggtgggcgctttggatgatgatgctgatgtgaggattgggaataaactgcgaagagacgctttcttggttttccgggcattgtgcaagctctccatgaagacaccacccaaggatgctccagctgatcccattgtgatgcgtgggaagatccttgctcttgaacttctcaagatattgcttgaaaatgctggggctgttttccggaccagcgagagatttctaggggctatcaagcagtatctatgcctctcgcttttgaagaactgtgcctcggcacatatgatagtctttcagctatcttgttcaatttttattagcttggtttcaagattcagaccaggattgaaggcagaaattggagtattctttcccatgattattctgagagttttggaaaatattgctcaaccaaattatcaagcaaagttgattgttcttcgtttcctggaaaaactctgtgctgattctcaaatcttggtagacatttttctcaattatgattgtgatgtacactcatcaaacatatttgagaggatggttaatggtctactaaaaacagcacaagggcctccagcaggcgtgtctaccacattggttccgcctcaggacaccacaatgaaaagtgaagccatgaaatgcttggttgctattctgagatccatgggagattggatgaataagcagctacgcattccagatcctgactctcctaaagtagagtcggagcaaaatgataatgatggaggacacgagatttcccacacagaggataatggagacgaatgtagtgaagcatctgattctcattcagaaatgtcaaatggggtttcagaggctgcatctttggagcagcgccgagcttacaagatggaacttcaggagggtatctctctatttaatcgaaagcccaggaagggaattgagttcctaataaatgccaacaaggtgggggaatcacctgaggaaattgctgctttcttaaaaagttcttctggtttgaacaagactatgattggagattatttaggggagagggaagatttatccctcaaagtcatgcattcatatgtggattcatttgattttcaaggcatggagtttgatgaagccattagagcctttcttcaaggtttcagattgcctggagaagctcaaaagattgatcggattatggaaaaatttgctgagcgttactgcaaatgcaacccaaaggccttttccagtgcagatacagcttatgtccttgcttattcagtcataatgctcaacaccgatgcacataatccaatggtaaaaaataagatgtcaccagaagatttcattagaaacaatcgaggtattgacgatgggaaagacctgcctgaagaatttatgaggtccttatatgaaaggatttggaaaaaagagattaagatgaaagaagaagaatttgttccccagcagcaaaaatcaacaagctcgaacaaaattcttggattggataacattcttaatattgtcgtacgcaaacgagattcacgtatggaaacaagcgatgatctcattaagcatatgcaggagcaattcaaagaaaaggctcgtatgtccgagtcagtattctatccagcaacagatgtagtagttttgaaattcatggtcgaggtttgctgggctcctatgcttgctgccttcagtgttccacttgaccagagtgatgatgagattgtcatatcccagtgccttgaaggatttcgcagtgcaatccatgttactgcagctatgtcgatgaagactcaaagggatgcatttgtcacttcacttgctaagtttacatcacttcactcggctgcggatattaagcagaaaaatattgaagccattaaggcaattctattaattgcagatgaagatggaaattacttgcaagaagcatgggagcatatattgacctgtgtttctcgttttgaaaatctacatctcgtaggagaaggtgctcctccagatgctactttctttgcactgcaacagccggacctcgataaatcaaaacaggctaagtcatccattcttcctgttttgaaaaagaagtctccaaatactgttccagcttctaaacgaggttcctatgatagtgctggtgtgggtggcaaagcttctggggttgatcaaatgaacaatgtggtgacaagcctcttagaacaagttgacatggctgaaatgaatcgtgtatttgtaagaagtcaaaaactcaacagtgagggcataattgattttgtaaaggctctctgtaaagtttccatggaggaattgcgatctgcttctgatccacgggtttttagtctgacaaagattgttgagattgcgcactacaatatgaatcgcatcaggcttgtctggtcaagcatatggcatgtcttgtctgatttttttgttacaattggctgctcagagaatctctcaattgcaatatttgctatggattcattgaggcagctggcaatgaagttcctggaacgagaagagctggctaactacaatttccagaatgaatttatgaagccttttgttgttgtaatgaggaagagccgagctgttgagataagagaactaatcatcagatgtgtctctcaaatggtcttggcacgtgttagtcatgtgaaatcagggtggaagagtatgtttatggtctttgcaacagcttcatatgatgaccataaaaatattgtactcctggcgtttgaaattatcgagaagattttgcgggagtactttccctacattactgagaccgagtcgacaactttcactgattgtgtgaactgtcttattgcatttactaacagtaggtttaacaaggatataagcctcaatgcaattggttttcttcgattctgtgcggcaaagctagcggaaggtgacattggatcctcttcaaggttgaaggagaatcctccttctcctcgcttgaccaaggatggaaagcaggaaagtgcagttcttgttgataaggatgatactatacacttttggtttcctttattagcagataatacaaataatgtgtccccaacttttcaaaaccttgcaggattatctgaacttaccttcgacctacgacctgaaatcaggaaaagtgccttgcagctagttgtggacctctttgttaagttctatgacacagtaaaccctcttcttagaaaaattctgttgctcttgacaagtttcataaagcgtccccaccagagccttgccggtataggtattgccgcatttgttcgtttgatgagcagtgccggatctgtcttcgttgatgaaaaatggttagaggtggttttatcgttgaaagaagctgccactgagacccttcctgatttttcttatattgcatccggagcttaccttgagaatgtaccaatagaaaatgggggctcttcagaaaagacagaagacgagtctcgaccattggaggatggcactggagaagcttctagatcaaggaacttgtattttgcaattggtgatgccaagtgccgggctgctgtccaactcctattgattcaggctgtgatggagatatataacatgtacagagctcggttatcatcacagaacactgtgatcctctttgaggcattgcacactgttgctactcatgctcataaaataaacagtgataatgacctgcgatccaagttgcaggagttgggctcgatgacccaaatgcaggacccacctttgttacgcctggagaacgagtcgtatcagttgtgcttgactatcctgcagaacatttgcttggacagatctcccaatgagaggagtgtagaggtggaaagccaccttgttggcttatgtaaggaggtccttgaggtgtacctgagcactgcaaacccatctcagctttctggtgctccgcagccacttggtcattggcttattccggtcggttcttcaaagcggagagagcttgcagcccgggcacctcttgttgtctcaaccttgcaagctatcagtggccttggtgactcatctttcgagaagaaccttggccagttcttcccccttcttgctggtctgataagttgcgaacatggttcaagcgaagtgcaggtggcattgagtgatatgtttagcacttgggttggcccggttgttcttcaaacctgctga

SEQ ID NO: 4215 - DNA, 2595 bp, Oryza sativa
atgtgtcctgcaaatctcttgtccttcgacatcgttgctgcggcggtggtggtggtgctgatgcttgcaactgcagcaccggccatctccgtgcagcagctctacgactatccgacggcaaacctctcgacgcggtgggtcaacaacgccgcggtgctccaacacagcgtcgacttcaccgacgggtcagccgtgcgctccatcatcctccgctcaccagaaaccatatttggcccctccttcgccgcggggttcttctgcgctccaccctgcaaagcgttcctcttcgccatcttcattgtctacactgacggtggtgccagtatcacctcggtacgaaacggtattccgcaggttgtctggtcggccaaccgggcacaccctgttggagagaatgctaccctggagctgactggagatgggatcctggtcctccgtgaagccgatggcagactcgtctggtcgagcggcacttcaggccgatctgttgtaggcatgcagatcacagagcaaggaaacctggtgctgtttgatcagaggaatgtgacagtgtggcagtcatttgatcatccaactgatgcattggtccctgggcagtctttgctgcagggcatgaggctgagagcaaatacctccaacacaaattggactgagagtaagttgtatatgactgttctttcagatggtttatatggttacgttgaatccacaccgcctcaactctactatgagcagacaacaaacaagagaggaaaatatccgacaagggttaccttcatgaatggcagcctcagcatctttatacgtaccacccaggcaggaaagcctgaagccattattgcactgccagaagcaaagtccacccaatacataaggttagagtctgatggacacttgaggttgtatgagtggtttgatgcaggatcaaattggaccatggtatctgatgtaatccagaaattccctgatgattgtgctttcccaacagtgtgtggggattacgggatatgcacaagtggccaatgcatctgtcctcttcaggctaattctagttcaagttacttccatccagttgatgagcggaaggctaatcttggttgtgcaccagtgactccaatatcttgtcaagaaatgcaataccatcaattcttgagtcttacggatgtttcttactttgatgaaggccaaattattgccaatgcaaaaaacagagatgattgcaaggaagcctgcttgaagaattgctcctgcagagctgtgatgttcaggtattatgggcagaatgattctgatggagaatgccagtcagtgacagaggtcttctccttgcaatcaatacaacctgaaattgttcattacaactcttctgcttacctcaaagtgcaacttactccctcctcagcagcccctacacaaaactcctcttctgcacctacacagacctcctcttttgcccttacacaaaacaaaagtaacaaaatgaaggcaattttaggttctacacttgcagcaagtattactcttgttttggttgctattattgttgtctacgtacgaaggaggagaaaatatcaagagacagatgaagagttagattttgatatattgcctggaatgcccctgaggttatcacttgaaaaattgagagaatgcactgaagacttcagtaaaaagataggtgaaggtggatttggatcagtatttgaagggaaattaagtgaagagagagttgcagtgaaacgtctagaaagtgctagacaaggaaagaaagaattcttggcagaggtcgagactattggcagcattgagcatatcaatcttgtcaggatgatcggattttgtgcagagaagtcaaataggcttctggtatatgaatatatgccaggagggtcacttgataagtggatatattaccgccataacaacgccccacttgattggagcacaaggtgtaggatcattctggatattgccaagggtttatgttatcttcatgaggaatgcaggcgaaaaattgttcatttggatatcaaaccacagaatattctcttagatgagaacttcaatgccaaattggcggattttggactttccaagctaatagatagagatcatagcaaggtaatgactgtgatgagaggcacacctggatatctggcacctgaatggttaacatcacaaatcactgaaaaagttgatgtgtacagctttggcgttgttcttatggagataataagtggaagaaaaaatattgatatctctcagccagaggaagctgttcagctcatcaatttattacgagaaaaggctcaaaataatcagttgattgatatgattgataagcacagtagtgacatggtctcataccaggaggaagtgattcaaatgatgaagcttgcaatgtggtgcttgcagaatgatagtggccgaaggccttctatgtcaacagttgtcaaggtattggaaggtgtaatgagggtggaaaattgcctagattacagctttttcaatgcaaattcagtaatatctgttcaagggaacccatccacatattcagctccacctcatgcatcaatattatctagtccaagatga

SEQ ID NO: 4216 - DNA, 1563 bp, Oryza sativa
atggcggcggcgcccctccacttcgtgctcgtgccgctcccggcgcagggacatgtcatcccgatgatggacatggcgcgcctcatcgccggccatggcggcggcggcgcgcgagtcaccgtcgtgcttacgcccgtcatggccgcgcgccaccgggcggccgtcgcgcacgccgcgcgttccggcctcgccgtcgacgtctccgtgctggagttccccgggccggcgctggggctcgccgccgggtgcgagagctacgacatggtggcggacatgagcctgttcaagacgttcaccgacgccgtgtggcggctcgccgcgccgctcgaggcgttcctccgcgcgctgccgcggcggccggactgcgtcgtcgccgactcgtgcagcccgtggactgccggcgtcgcgcggcggctcggcgttccgcggctcgtgttccatggcccgtcggcgctgtacatcctcgcggtgcataacctggcgaggcacggcgtgtacgaccgcgtcgccggcgaccttgagccgttcgacgtgccggacttgccggcgccgcgcgccgtgacgacgaacagggcgtcgtcgctggggctcttccactggcccgggctggagagccaccggcaagacacgctcgacgccgaggccaccgccgacgggctggtgttcaacacctgcgccgccttcgaggaagcgttcgtccgccgctacgcggaggtgctcggcggcggcgcccggaacgtgtgggcggttggcccgctttgcctgctcgacgccgacgccgaggccacggcggcgcgcggcaaccgcgccgccgttgacgccgcgcgcgtcgtctcgtggctcgacgcgcgcccaccggcgtccgtgctctacgtcagcttcggcagcatcgcccgcctgaatccaccgcaagccgccgagctcgccgccggcctggaggcgtcgcaccggccgttcatctgggtgaccaaggacaccgacgccgacgccgccgccgccgccggcctcgacgcgcgggtggtggcggaccgtggactcgtcatccgcgggtgggcgccgcaggtgaccatcctgtcgcacccggcggtgggcggcttcctcacccactgcggctggaactcgacggtggagtcgctctcccatggcgtgccgctcctgacatggccgcactttggcgaccagttcctcaacgagtgcctcgccgtcgacgtgctcggcgccggcgtccgcgccggcgtgaaggtgcccgtcacgcacgtcgacgccgtgaactccccggtgcaggtgcggagcggcgaggtggcgagcgcggtggaggagctgatgggcgacggggcggcggcggcggcgaggcgcgcgagggcgagggagctcgcggcggaggccagggcggcgatggcggacggcgggtcgtcggcgcgcgacctcgccgacatggtctggcacgtcgcgcggaggagggacatggttgtggttgatccgccgccaccgccgtcgccggggggcatcgccggtggccatggcaagatggtgtcgccatcagtggcatcagaagtcgcctga

SEQ ID NO: 4217 - DNA, 684 bp, Oryza sativa
atggtgctctgggtcttcggctatggctccctgatctggaaccccggattcgacttcgatgagaagatcctgggcttcgtcaagggctacaaacgcaccttcaatcttgcttgcattgaccatcggggcacgccggagcatcctgcgaggacctgcacacttgagtccgacgaggaagccatatgcctgtawttamcrtcccgatatgaatatttgcaktggggrattgcatactgtgtcaaaggggggcttaaaaaggagcaagaagcaatgaagtacttggaaagaagagagtgtgagtatgaccagaagatctctgtggatttctacaaggaaggagattctttgaagccagctgtgacaggtgtactagtctttgtatccactcctgatccagtaggcaacaaatactatcttgggcctgctcctttggaggacatggcaaggcaaattgctacagccaatggccccaatgggaataacagggattacctgttctcaatggagaaggcattgtccaacatatgccatgaagatgattcaatcatcgagctagctaacgaggtcaggaaggtgttgagccggccgaaggagaagatcactggctccgatagcccacaaaaatctcacgctctcgtacacctgtctgcgcttcctgagggcactgttgtggactcaagatag

SEQ ID NO: 4218 - DNA, 1002 bp, Oryza sativa
atgtacgaccacaacacgcagaggcctaggggctttggattcatcacctatgactcagaagatgcggtggacaaggcactgcacaagaacttccatgagctgaatggtaagatggttgaggtcaagagagctgttccaaaggagcaatcacctggacctgctgcacgttcacctgcgggagggcagaactatgctatgagcagggtccatagcttcttgaatggtttcaaccagggttataacccaaaccctattggaggttatggcatgagggttgatggaaggtatggtctgcttacaggcgcacggaatggattctcttcatttggccctggttatggaatgggcatgaattctgaatctgggatgaatgcgaattttggcgccaattctagttttgtcaataactccaatgggcggcagataggttcattctacaatggtagttcaaacagattaggtagtcctattggttatgttggtcttaatgatgattcaggatcactattgagttcaatgtcaaggaatgtttggggtaatgaaaatctgaactacccaaacaaccccacaaacatgagttcttttgcaccatctggaactggaggtcaaatgggtattaccagtgacggtattaattggggagggcctactcctggccatggaatgggcaacatttcaagccttgggctggctaaccttggccgtggagctggagacagttttggcttgccttctggcagctatggaaggagcaatgcaactggtaccattggtgaacccttctctgcaccacccaatgcatatgaagtgaacaatgcagatacatatggcagcagctccatttatggagactcaacttggaggttcacgtcatctgagattgatatgcctccttttggtaatgaccttggaaatgttgatccagatatcaaatcaaacataccagcaagttacatgggcaactatactgttaataataatcagacaagcagaggtcagtaa

SEQ ID NO: 4219 - DNA, 1179 bp, Oryza sativa
atggagctccacctcacctcccgcggcgccctcccgctgtctccgccgctcgccggccagcggcgtcctcacctctctctctccacgccgtcgcttccgatcaagaatcacacttattcagtgccacctcctttctccaaggctcactgcgcgataggatgccaagcttctctagcaactaactacatggaaacctctgcggtggctgatttggactgggagaacctcggttttggccttgtccagacagattttatgtatattgcaaaatgcgggccagatgggaacttttccaaaggagaaatggtaccatttggacctatagaactgagcccatctgctggagtcttaaattatggacagggcttgtttgagggcttaaaggcatatagaaaaacagatggatacattctgctgtttcgtccggaggagaatgccataaggatgagaaatggtgcagagaggatgtgtatgcctgcaccaactcttgaacaatttgtggatgcagtaaagcaaaccgttttggcaaataaaagatgggtgcccccaaccggtaaaggctccctgtatataaggccgctgcttatgggaagtggagctgtccttggtcttgcacctgctcctgagtataccgaaggtttagcccctattaacttgattatagaagaaaactttcaccgtgctgcccctggtggaactggcggagtgaaaaccattggaaactatgcctcggtattaaaagcacagaggattgcaaaacagaaaggatattcagatgtcctctatctagatgccgttcacaagaaatatctggaagaagtgtcttcgtgcaatatctttattgtgaaaggcaatgttatttctactccagcaataaaaggaaccatactgcctggtataacaaggaaaagtattcttgaagttgctcagagaaaaggcttcatggttgaggagcgccttgtgtcagtggatgagcttcttgaagctgatgaagttttctgcacgggaacagctgttgtggtgtcccctgtggggagcataacttatctggggcaaagggtggaatatggcaaccaaggagtgggcgtggtgtgtcagcagctgtatacttcacttacaagcctccagatgggtcatgtggacgattgtatgggctggactgtggaactaaaccagtga

SEQ ID NO: 4220 - DNA, 830 bp, Oryza sativa
atgcgatcggtaccggcccatyttcctccttccgstcctcatcgggctgccattggggagaagcgcggatgtcagggggagtgggagcagatcagtggcaccaacgacgagctggttcatgccagcgtgctcgccaggatgccacaagggaaaccgtttttgtcagtagatgagatcaaggcagaaacgctggaaataatccttgctaccgtggacaacccatcaaatgctgtagagtgggcactggcagagatggtgaacaatccaaaggtcatgaagaaagcagtggatgaactcgatatggttgttggtagagaaaggcttgttgaggaatccgacattcacaacctcacatacctcaaggcatgtatccgggaggcgttccgcctccacccctaccacccattcaacccaccccatgtcgcgatcgcagacaccaccgtcgcgggatacatgatcccaaagggtagccatgtcatgttaagccgaattgggctcggtcgaaaccctagagcatgggataaaccactcgaattccaaccagagcgacatctgaaaaatactggtactgtggtgctagctgagccagagttacgttttgtatcgttcagtgctggtaggcgtggctgtcctgccgtgtcactcggaacatcaattacaatgatgctatttgcaaggcttctgcaggggttcagttggagcataccaccaggtggtgacaggattgagcttcaagagtcagctacaagcctgcaattgtctaaaccattacttatgcaagcaaaaccacgattactacttcatctatatgaggcggatgtattaaatta

SEQ ID NO: 4221 - DNA, 2523 bp, Oryza sativa
atgggtacaaggatgccaaccttacggagattgtcagccacactgtcatcggtgttgctcgagtggatcttgatgctgctgctgttcatcgatgcggtttattgcttcttggtcaccagatttgcccgcctctgcagattaccggcaccgtgccctttctgctcaaggctagaccatgtcctgggtaatgagaaaccatgcttctacagggaattgatctgcaaaactcacaagtcagagatctcatctttggccttctgccgtctacatcagaaacttgcaggtgcccaaagtatgtgtgagagatgcagtgactcacttgtagaaaacaatgatgaccgcaccgatgagccaacaatggctgccactctacctgatagtaatcaaggattatattcccatgatacaagaatttgctcatgttgtgcacagcattatacacaacagagaccgacaatgttttctcgaatgatcacagaactagaacctgctgaggctgtttgctcaccaaagatttgcacagattattccatacttcatcaagtggataaatctttggataaagatatttgtcaccagagtgatcactccatccatgaacgatacagtgtgctgcagatgacatctggctccgaggatgaggctccctgtgctgatgatggcaaaatttcacaccatcataaaaccaattgtatggaggaagatttgaatgaagatgccactgccgagaaatttgctgcttcttccactgagttggtcaggccattagaaatgaatgttccgatggaaaccgatgttggtgactcatatgatatatccttgccatatgttcttgtagatgatcatcctgatagtataattggtgagggccaaatggaagcagaagatgcttcattagaaaaacagacatgccagcatgatcccctagctgtcaaagaagagtcaggtttgacagatgatctggaaggtcacaggtcagaaattactgttacatcaagtagagagtttcaccagaaaagtgcattggttgatgatgatccagttaattttagagatgaccatgtttcacaagttaattctagttctgaagctgttgatgaagctgaagattatgctaaggaggctgaacagacttgtgatatggtaacacatgaagcggcactcaaagatccttccaatacaaattccaaagatcctacagcaaaaggttttgtggaagaagctcctatatcaccacaggctattagaccaaacagtgaggtatttcagggtctcaatgtcatcgaggaacatccgcaaacaagcgcgactattggtgaaaggagaccatctctaagcactcagattagcatgaatgaagcctacaagcttgccattggtgccaagagtagcttgccatcccccaccttgactgatgtgattcttggaaaggattcctcttctagtgtaaatgaagaattgaggttactgctgtcacagctctcggcttccagaggactcgaggctccatgggtcgacccaggccctagcccacgtgcgtatgggcgtggtgatgatttgatagtgcagaacatcacgaacagaatttcaattgagagaaatgcatctggtttggagtcactggagggtagcactgtaagtgagatggaaggtgaaagtgccactgaacggttgagacgacagattgatcttgaccgaaaatctatacacctcctctgcaaggaactggaagaagaaaggaacgcttcagcgattgctgcaagtcaagctttggctatgattaccagattgcaggatgacaaggctgccatgcagatggaagctttacattaccagcggatgatggaagaacaagcagagtatgatagtgatgcgcttgctaaagctaacgagctacttgctcagagggaacaacaaatagaggaattggaagctgagctcgaaaactacaggatgcagtttgcaggtggaccaacagagaaacaatccaatcaggtctcctttaatgaagaaaacattgccgaaactttgcttgatgaaactggtcttgaagctcctgcaattaccacaccaagtggtataaattcattagtgagctttgaagaggagagggcatatatagttgattgcttgacgaagctggagcagaagcttcaatcctactccaacaacagtactaacattcacttgtcaaattcagatgtcatagaggattacctttccaacaaaatgcacgttgtagatgatggctcactgcaatgccaagaaagctcaagagaggcccaggagcccgttttcttagctaaagaagctcattcttcaacagtgagtcggaagactgatcttagcacgcttcaagaagaaatctcaaacttgaacaaaagattgaagacgctagaaggagaccgcaactttattgaacatagcataaactcactcaggaatggcaaagaaggtgtgatgtttattcaggaaatcgctagcaacctaagagaactgcgagcaattgctggtagtaaataa

SEQ ID NO: 4222 - DNA, 2739 bp, Oryza sativa
atggcggctcggtggtggctgctgctgctgctcggcctcgccgtcgccggcgtcgttcgcggccagggcggcgcgcctgacacgtccggcttcatcagcatagactgcggcttgccggagaagaccagctacgtggacgacgccacgaagctgaagttcacctccgacgacgccttcaccgacgccggcacaatccacaacgtctcgtcggagttcgcaacgccgacgacgaccacggacaggagcctgtacaacgtgcgcagcttccccgccggcgcgcgcaactgctacacggtcccgtccgtcgtgccggggtccaagtacctggtccgtgccaagttcttgtacggcaactacgacggcctcaacaagccgccggtgttcgacctccacctcggggtcaacttctggcagacggtgaccgtgccatccgccgactggctggggaacgccgaggtcatcgccgtcgtgccggatgatttcttgcaggtctgcctggtgaacaccggcgccgggacgccgttcatctccggcctggacctgaggcccctgccgagctcgctctacgcgcccgccaacgcgacgcaggggttggtcctgctcgaccggaggaacttcggcgcgagcgggagcaccgtgatcaggtaccccgacgacacgtacgaccgcgtgtggtggccgtggagcaacccgccggcggagtggtcggacatctccacggcggacaaggtccagaacacgatcgcccccgtgttcgacgtgccgtccgtcgtgatgcagacggccatcacgacgcgcaactcctccattcccatccagttctcctgggacaccaaacccaatcacgtctaccctgatcccgggtcgatttttaccttgtatgtcaccgagctggagctcctggccggcaatgccgttcgccagttcaacgtcaccatcaatggcgtgatttggaccaaagccccatacaagccggtttatctgtccaccgacgccatgtacaacggagatcgaccctaccggggcatcacccggtacaacttttctttgaacgccgcgggaagctccacgctgccgccgatactcaacgccgcggaggctttctccgtcatctccacagccgaccttgcaacagacgctcaggatgtttctgccatcactgcaatcaaggccaagtatcaggtgaacaagaattggacaggtgacccatgcgctccaaagacactggcttgggatgggttaacctgcagctatgccatttcaacccctccaagaatcacaggagtaaatatgtcgtatgccggtttaagkggcgatatatcatcttatttcgccaatctaaaagaaatcaagaatttggacttgtcacacaataacttgacaggatcaattcctaatgtcatttcacagctacaatttctcgcggttctagatttgacaggaaaccagcttaatggatcaattccttctagtcttctgaaaagaagtcaagatggctccttgaccctaaggtacggcaataatccaaacctttgcagtaacagcagttcatgccagctcccacaaaagaagagcaactctatgcttgccgtctatgttgctgttccagtagtggtgataggagcagttgcagtgttcctgattttcttcatcaggaagaagaagaacaaatcaaagggtgctgtgaagccacagattttggggaatggcgtgcagtcacacagtcagaatggcagtggagggagcctgctggaactgcacaaccgtcagttcacgtacaaggacttggcagtcataacgaacaacttccagcgagtccttggcaaaggagggtttggccccgtctacgacggcttcttgaaggatggtactcatgtggcagttaaactacgggatgagtcttccagccaaggatatagtgagttcctgacagaggctcagactttaacgaaaattcatcacaagaatcttgttgcattaatcggttactgcaaagatgagatacatttggcacttgtgtacgagcacatgtcagaaggaactctggaagataagcttagaggcaaagatcgcaaaggtagatctttaacatggagggaaaggctccgtatcgtattagaatctgcccaaggactagagtatctacacaaggcatgcagcccacgcttcgtgcatagggatgtgaagtcatcgaacatcttgctgaatgcaaatcttgaggccaaggttgccgattttggcctgacaacggcttttaaatgcgacggtgacacacatgtatccacagtcagggtggttggcacatatggctaccttgcacccgagtatgccacagccctacaagtttcagagaagattgacgtatacagcttcggtgtggtgttgctagaggtgatcacaggacagccgcccattataaagctcccggaacctactactatcatccaatggacccggcaacgcctagcgcgaggcaacatcgagggtgtggtggatgtaaacatgccagacgaccgctatgacatcaactgtatctggaaggtagcagatgtggctctgaaatgcactgcacatgctcctgggcagcgacccacaatgactgacgtggtgacacagctaaaagagtgtctagagcttgaggaaaccagctttaaaggcgacacgagtagcagttatatgtcagggagcagcatagacccaaactcgagttataacacatataccactgagatgagctag

SEQ ID NO: 4223 - DNA, 1130 bp, Oryza sativa
atgtcgatacaaggccagatcctcgaagtcagagtcactgggtgcaggaagctgagggacacggagttcttcacgcggcaggatccctacgtctgcatcgagtatgccaccaacaagttccgcacccgcacctgcaccgatgggggaaggaaccctacttttgacgagaagtttcatatacctctcattgaggggcttcgtgagctaaccgtcacagtgtggaacagcaacacgctcacccatgatgatttcattggcaatggcagggtgcagctgcataaggtgcttacgcgtggctatgatgatgcctcatggcccctccagacacgccatatgagcaatggtgagagactggttaatctttgctgccttattcttgttggtatggcattgcctcatgggttttcttatgtgcaccagaagaacaagccgggaaaaatttctgccgcgtcaaccacacattctgttcttccagtgccggtaccagcagtaccatatgctgccccctcaccttcatacgcactaccccctgcaggataccctgcagtaccgccatatcaatcctatcctgctagccatgtcccggcgccatatcctacttcagcatacccacatccaccaccatctctgctagctcgcgatgttgagcatgcggcataccctcctacaagtacaacatatcctccacagccgtacccaccacagccgcagggacaaacatacccaccgcagccgcagggagaaacataccaaccgcagccgcagcgagaaacatacccaccgcagcctcaagtacaaccatacccaccaaagccacagggacaaccatacccaccgcagccgcagggacaaccatatccaccgcaaccatatggacaaacttacccaccacctccaaaaggacagcccacatatccacctgggtatccagccttcatcatccagttaattgaaacaaatgaaatcattcctgaagcgattcatgtcaacatcttagcaaccaatggtagtagttaccatctggtttggatggctgatttgtgtaaagttgggctagagttggtacttgatttttgcgatgggcttgatccagattccaagctacagtctcatgggcccctgtttgcata

SEQ ID NO: 4224 - DNA, 1347 bp, Oryza sativa
atggggcagggcaccccgggaggcatgggcaagcagggcggcgcccccggcgaccgcaagcctggcggcgacggcgacaagaaggaccgcaagttcgagccccccgccgccccttcccgcgtcggccgcaagcagcgcaagcagaagggccccgaggcggccgytcgcytccccaacgtcgcccctctctccaagtgccgcctccgcctcctcaagctcgagcgggtcaaggactacctcctcatggaggaggagttcgtcgccgcccaggagcgcctccgccccaccgaggacaagaccgaggaggaccgatccaaggtcgacgacctccgcggcacccccatgagcgtcggatccctcgaggagatcatcgacgagagccatgccatcgtctcctcctccgtcggccccgagtactacgtcggcatcctctccttcgtcgacaaggaccagctcgagcccggctgctccatcctcatgcacaacaaggttctgtctgtggtcggaattttgcaagatgaagttgatcctatggtttctgtgatgaaagtggagaaagctccgctggaatcctatgctgacattggtgggctagatgctcagatccaagaaatcaaagaggcagttgagcttcctttgacccatcctgagctatatgaagacattggcatcaggccacccaagggagtcatattatacggagaacctggaacagggaagacactacttgccaaggctgttgctaactccacatccgcaactttcttgcgtgttgttggaagtgagcttattcaaaagtatcttggtgatggtcccaaactagtcagggaactgttcagagttgctgatgagctttctccctcaatagtctttatcgatgagattgatgctgttggaacaaagaggtacgatgctcattcaggaggggagcgtgagattcagagaactatgttggagcttcttaaccagttagatggttttgactctcgtggtgatgtcaaagttatactagcaacaaatcgcatcgaaagtcttgatccagcattgctacgccctggtcgcatagatcggaagatagaatttcctctgccagatattaaaactaggcggcgcatcttccagatacacacatctaagatgacattggcagatgatgtgaacctggaagagtttgtcatgaccaaggatgagttttccggtgctgatatcaaagcaatatgtactgaagctggacttcttgctttgagagaacgccgaatgaaggtgacacatgctgacttcaagaaggcaaaggagaaggtgatgttcaagaagaaggaaggtgtgccggagggtctttacatgtga

SEQ ID NO: 4225 - DNA, 864 bp, Oryza sativa
atgacgaacgacgatgacgatgaggatgatgaagatgattcagaccatgagcttgaagacttgtttaggaggcagaggaggggctcatctcttgtaaggctgctccagaccctccgggatgacttgaggggcttggatgacattggcagggatagtgacagagacagggaaagggagagaagggagagggagaggctgagggagcgggagagggagagggagaggatgagagagagggagagagaacggaggagagaaaggacagaaagcttgatactgatcaactccaacaatgaggccattattctccaaggaacatttggacctgatgacaaccaggatgactcgagcaatacaagttctggtgtttcacttggtgactactttcttggtcctggattagatatcctcttgcagcatttggcggaaagtgatcttaatcgttctggtacaccacctgccaagaaggaagctgtagaagcattgccaactgtgaacatccaggaagtgttaggctgttctgtctgtcttgaggatttcgaaatggggacagaagcgaaggagatgccttgtcaacataagttccactcccagtgcatacttccatggctggagctacacagttcttgcccaatctgtaggtttcagttgcctaccgaggagtcgaaaaacccatgtgaatcagccggtggaattgtgtcagtgaacgatgatggagatgatgctggtacaagtagtgacgtagatagtgctaaccaacctggtagtcctatattctctgctttgagtgcacttttctcaaatccatcatcctcatcctcatcctcatctgatgataatgcaccacactcttctgagagctga

SEQ ID NO: 4226 - DNA, 2660 bp, Oryza sativa
atggccaacaaacggtatgtgaacttcttcctgttctttgtgatatcattttctctgctgcacaaatcctacccaaagtccacaaatcaatctaatgaagaacaccaaatcctccttgagctcaagaaccattgggggagctcacctgcgctaggcagaattccaccatcaattggactgttcccaaggctgaagtcactgctccttgacaccaatcagtttgatgggaggtacccagctgaggatatcagcaatcttgctgaccttgagaggctgacactagcagtcaatccatttgtaccggctccctttccagtggagtttggtaggttgacacgtctgacttacttgtggctgtcaaatatgaatattaccggtgaaatcccygaaaacttgtccagcctcagagagctcaamctcttggawttttcatcaaacaagctgcarggaaaattycmaacgtggatctggcaacataagaaacttcagaatttgtacctgtatgcaaacggattcaccggtgagattgaacccaatgtcagtgccttgaacttggtggagattgatgtttcttcaaacgaattaataggaaccataccaaatggatttggtaagcttaccaaccttaccttactgtttctctactttaacaagctgagtggatcaataccaccaagcgttgggctgctgccaaagcttactgacattcggttattcggtaacatgctctctggatcactcccaccagagcttggtaagcactcaccactggccaatcttgaggtctccaataataacctctctgggaagctaccagaaggcctctgcttcaacaggaagctatatgacattgttgtgttcaataacagcttttctggaaaacttccatcgtcattggacggctgctatctgttgaacaatttgatgatgtacaacaacaatttttctggagagttccccaagagtctttggtcagtggtgacaaatcagctaagtacagttatgatacaaaacaacaggttctctggcacattccccaaacagctcccatggaactttacacgtcttgacatcagcaacaacaaattctcaggtcctattccaacattggcaggaaaaatgaaagtattcatagcagcaaacaacttgctgtctggtgaaattccctgggatctgacaggcatttctcaggtcacagaagttgacctctctaggaatcaaattagtggctcactacccatgacaattggagtgctggcgaggctaaacacacttaacctaagtggaaatcagatatctggtaatatcccagcggcgtttgggtttatgacagtactaaccatccttgatctctcgtcgaataaattatcaggtgaaatcccaaaggattttaataagctgaggctcaattttctgaatctctctatgaaccaactcatcggggaaattccgatatcactgcaaaacgaagcatatgaacaaagctttctattcaacccaggcctctgtgtatcatcaaacaattcagttcataatttccctatctgcagggcaagaacaaacggcaatgatctatttaggaggcttatagccctcttttctgctgttgccagcatcatgcttttgggttcagcagtgcttggtatcatgctcttaaggagaaaaaagcttcaagaccacttgtcatggaagctaacaccattccacatattgcatttcaccacaactaacattctttctgggctctacgagcagaattggattggaagtggcaggtctggcaaggtgtaccgggtttatgctggggatagagcaagtggtggaaggatggtggccgtcaaaaagatatggaacacaccgaatcttgatgacaaactggagaaggacttccttgcagaggctcagatattgggagagatcaggcacacaaacattgtcaagctgctctgctgcatctcaagttcagatgcaaagcttcttgtctatgagtacatggaaaacggcagcctacatcaatggcttcaccagagggaaagaattggtgcgccaggacctctggattggccaacaagattgcaaattgccatcgactcagcgagaggtctttgctacatgcatcaccattgctcgcctcccatagtgcatcgagatgtcaagtgtgccaacatccttctggatcacaacttcagagcaaagatggcagattttgggcttgcaaagattcttctcaaagctggagacgacgagtcattttctgctatagctggaacttttggctacatggcaccagaatacggacatcggctcaaggtaaacgagaagatcgatgtctacagctttggtgtggtccttctggaaatcataactggtcgagtggcaaatgatggtggagagtactattgcttggcacaatgggcatggaggcagtaccaagaatatggtttgtcagttgatcttctcgatgaggggatcagagacccaacccatgttgaggacgcattggaggtgtttacacttgctgtgatttgtactggggagcatccttcaatgcggccatcaatgaaagatgtgctgcatgtgcttctccgatttgaccgtaaatccaatgggggaatcttgcaagatgatatctgtgacgaaacagctcttcttgaatcata

SEQ ID NO: 4227 - DNA, 1728 bp, Oryza sativa
atgggcggcggaggaggcgaggccgggggcggcgacggaggggagtcctctcctgctgcggctgcggcggcggcggttgccggggccgcggcgctgcacatccggtgcgcgaacgggtccaagttcaccgtgcgggccgacctcgacgccacggtgggggcgttcaaggaggtggtggcggggagctgcgacgtgccggcggcgcagcagcgcctgatctacaagggccggatcctcaaggacgagcaaaccctagaaagctatggtgttgaaacagatcataccattcatatggtgcgtggcgctggtcccccagccggatcagctgcacctgctgcagccagcccccaagcttcaggtggtcctagcagcggcccaacagatggtcttggaagtttgtttcctggccttggtggtacaggaactgctggtaccaggccatctggtctttttgggtctggatttccagaattggatcaaatgcagcagcagttaagccaaaaccccaacttaatgagggaaataatgaatatgccaatgatgcagaatctcatgaataaccctgatttaattcgtaacatgatcatgaacaatcctcaaatgcgtgatatcatcgaccggaatccagatcttgctcatgttctcaatgatccaagtgttctccgccagacccttgaagcagccagaaaccctgaaatcatgagggagatgatgcggaacacagacagagcaatgagcaacattgagtcttctcctgaagggtttaatatgctccgacgcatgtatgaaactgtccaggagcctttcctaaatgcgacaacaatgggtggagaaggcaacacagctccaaacccattctcagctcttcttggaaatcagggttctaaccaaccaagggatcctgctacaaatgctccaaatactggctcagagtctacaactggaacccctgctccaaacactaatccacttccaaatccttggagctccaatgctggaggtgcgcaaggagcaacacgggcaggttctactggcaatgcaagaaccggtgccactgggggccttggagggttggggtcagctgatctgagcagtttatttggtggtcttgccggtaatacaggaactggtgctactggtggtctaggagggttgggttcagcagatttgggaagtttgcttggtggttctcctgattcttcttccttgagccagattttgcaaaaccctgttatgatgcagatgatgcagaatatcatgtctgatccacagtccatgaaccagttgcttaacttcaacccaaatacacgcaacctcatggaatcaaacactcagttgagggaaatgttccaaaatccagaatttattcgccagcttacatccccagaaactatgcagcaattactctcgttccagcagacattattatcacagcttggtcaaaatcaacctaggcaggatggtagccaaggaggcaatgcgacaggcatgcggggaaatgttagcctcgacaccttgatgggcatgcttagtgggcttggtgctggaggtggcataggtgtacccaatacatccaatgttccaccggaagaactgtatgcaacacagctcactcagctccgagagatgggtttcatcgacactgcagagaacatccaggcgctagtcgcaactgctgggaatgtgaatgctgcggtggagcgtcttcttggcaatcttggccagtag

SEQ ID NO: 4228 - DNA, 1820 bp, Oryza sativa
atgagctctctatgcccctttgccaaactcgcctccgctggcgccacatgccccgtaaaatcatcatcagacaacaaaaccaccatcaatcacaccgacgacgacgacgacgacaatgaaaaaactggcaatgctaacaccgatcctcgtgtggtgccaccaaagtgcccctttggctatgactccaacaccttcaagcttggcccactcagctgcatggtctgccacgctctgctacatcaaagcagcaaatgcaccccgtgctcccacaagttctgcaaggcatgcatattgcgctttaaggactgtccattgtgtggtgctgacatccaagggatcgagcccgatgatgagcttcaaggccttgtcgaccgcttcattgatggccatgcccgaatcaagagatcacatgctgcaggcgatggggaagccgcaagtgacaacaagaccaaggtcmtttacgaggatgcctttcgcgcacagaacwttgaaagtgcaaagtcaaggctcagtatgtgtgcacaagacatcagggaagaattgaaatctaaacaagacaaccaagaactgtgttctcaacttggagctgtgttaggaatgcttggggactgctggcatagaacttgccttccgaacaagggaaaggtcattgatgtagcaacttctcttgccaaagttgcggatgtcgatagaaatcttgggaacgaaagcatggcagttgagggttttgaggaagcaattaaatgccttgagaatttgaagctggaatctggagaggccagtcttgagcagcgggtgagaccaggtattaatagtatacttccggcggcggcgtgcggtgatcatcacacagcagcaggggcagggctgccgccgggattccggttccacccgacggacgaggagctcctcctccactacctcggcaagcgcgccgcggcggcgccctgcccggcaccggtgatcgccgaggtggacatttacaagtacaacccgtgggagctgccggccatggcggtgttcggggagtcggatggcgagtggtacttcttcagcccacgcgaccgcaagtaccccaacggcgtccgtcccaaccgcgccgccggctccggctactggaaggccaccggaaccgacaagcccatctccatctcggagacgcagcagacggtactgctgggcgtgaagaaggccctcgtcttctaccgcggtcgcccgcccaagggcaccaagaccagctggatcatgcacgagtaccgcctcgccaacgccgccgcctcctcctcctcctcctatactagtaacatgaagcagctggcctcatcatcatcgtccagctccagcagcgccagcatgaggctggacgagtgggtgctgtgcagaatctacaagaagaaggaggccaaccagcagctgcagcactacatcgacatgatgatggacgacgacaacgatgacgaacacaacctgcaggtgcagcagcagcagcagcagcaggctcaaagccaccggatgccaaggcctccatccatctcagactaccttctcgactactccgacgacctcccgccgtccaccgatcagacgccatctctgcaccttggattcacggcggtgaacgagggcaacaacaagaggcacaaaactatggaggaatattattctatttccatttccactgcagatatgctgcatgcgtcgtcgtccacgtccaacaacaagtcgacgcaaatcaacttctcctccatatttgagccgcagacgcctgcagctgcgggccatcagctgatgtcttctcacaacgacgacacatccatatg

SEQ ID NO: 4229 - DNA, 1758 bp, Oryza sativa
atggccgtctcctcttctacctctacctgctccagcttctctctcctcctcctcctcctgctcctcgccgcggcgccatggcggtcaggcgaggcggcggcggcggcggcgagagctctcaacttcacaaggcaggatttccccggggagttcgtcttcggcgccggcacgtcggcataccagtatgagggggctaccgatgaagatggaaggagcccaagcatctgggacactttcactcatgcagggaagatgccggacaagagcaccggcgacatgggcgccggcggctaccacaaatacaaggaggacgtcaagttaatgagtgatactagcctggaggcataccggttctccatttcttggtctaggcttattccaaaacatgtgtccctcataagtcgttctaatcttgatccaatttctatgatcaacacaggaggaagaggacccgtcaatccgaagggactcgagtactacaatagcctgatagatgagctagtcgaacgggggattgagatacatgtgactctctaccacctggatttccctcaaattcttgaagatgagtaccatggctggctcagcccaagggtcattgacgatttcacggcgtacgcggacgtgtgcttcagggagttcggcgaccgggtgaggcactggaccaccatggacgagcccaacgtgctgtccatcgccgcctacgacagcggtgccttcccgccgtgccgctgctcgccgccgttcggggccaactgcaccgccggcaactccaccgtggagccgtacgtcgtcgcccacaactccatcttggctcatgcctcggttactaggctgtacagggacaagtaccaggctacacaggagggattcgttggcatgaacatctacagcttctggaactaccctttctcctccagctctgcagacatagcagcaactcagagagccttggatttcatggtcggttggatactggaccccttggtttatggggactaccctgaaatcatgaagaagaaggctggttccaggattccatccttcaccgaagaacaatctgagctgatccgtgggagtgctgatttcattggaataaatcattacacgtcggtgtacatcagcgatgcatcgaatggcgaaacggtgggccctcgagactacagtgctgatatggcagcaaccttcagaatttcgaggaacgatacgccgagtggtcagtttgtccctactaggctcccaagagatccgaaggggctgcaatgtatgctcgaatacctcagagacacataccagggcattcctgtttatattcaagaaaatggcaagaatggagccaatgtgaagggttactttgtgtggtcatttcttgatgtgtttgagctgttagcaggataccattcgccattcggcctgcattatgttgattttgaggaccccaatttgccaaggcagccgaagctctctgctcactggagcaatgacgcaattcaggttaaggattttcgcccaattagcttgattcacagttttgccaaactcttctccaagttgctagctgggcagttcaaaaaggagatatctgttttgccattcaactccaatactgaggcagtctcacagattctcaagatcttcggtgaagctatggcctacatgccaactttcagaaaagctcgatcatcccaattggatgcacggatgatcaaattggctaggcggccattgctctgggttgtcgagcggagcaatttctaa

SEQ ID NO: 4230 - DNA, 1820 bp, Oryza sativa
atggagaggcgtcctctgcatctgcatctcctcctcttcttctcggcatgggctactgctgctgctgctgcaaggtgtaagctcgctacagttcaggcgagaggacttccccgatggcttcgcgttcggagccgggactgcggcttaccagggaggcatccagaagatggaacaggtgacgtagcttctgatggctatcataagtacaaggaagatgtcaaactaatgactgagattggcctagaggcttatcggttcacaatttcttggtcaagacttatccctagtgggagaggagcggttaatccaaaagggttgcagttttacaacaatatgataaatgaactagtgaaagcaggtattcagatacaagttgccctatatcatagtgacctccctcagagccttcaagacgagtatggtgggtggattaaccccaaaattgttgatgacttcacagcatatgctgatgtgtgcttccgagagttcggcgacagagttgcgcattggacaactgtacttgagccaaatgtcatggctcaaggttgctatgacactggaattcttcctcctaaccattgctcatatccatttggcaacaattgtacaggtggaaattccacggttgagccatacttgtttatacaccataacctgctagctcatgcttcagctgttagactttacagggagaagtaccaagttgcacagaagggcattatcggcataaacatgtactccttgtggttctacccactcacagattcagctgaagatattggtgccactgaaagagcaaaacagttcatgtatggctggatcttgcatcctttggtgtttggagattacccagagaccattaagaaggttgtcggttcccgccttccgttcttctctaaccatgaatctgagctggttactaacgctttcgacttcattggattaaatcactatagctcagtttacacgagcaataataataacgtagtaaaggcacctttacaagacttgactgccgacattgctactttgttcagagccaccaagaatgacacacctactccagagtttctaccaggaaacactgtagatcctcaagggctggagaatgcacttgaatatattcgagaaaactatggaaatttgacgatttatattcaggaaaatggcagtggagcaccagacggaaccctggatgatgtggagaggatcaactatttgcaaaaatacatagcagccacactgaaagccatcaggaatggtgcgaatgtgaagggatactccatgtggtcattcatagatatttacgagatatttggtgggtataacagttggcattatggacttgttgctgtcgatttcggcagcacagaacggagaaggcagccgagacgctctgctagctggtactcagacttcttgaagaacaatgctcccatcaggagaattagaaggaggaagggggtgtgtaggggaacataccctgagaaaaatccccaaatcaaacagtatggtatcagagccaagaaacccaagctcaccagtgatcttcctccgattcgatttgttgatgtgaagggcccgatgatagaaactattcagaatgcaacaatagtatggacgacattgagcaacatgtattcaggagagggaaatgtaatgatgatggttgaggctcagaacaaagtagagaatttgaagcaagaggggagaacagtccaagagtacgctagtgagttgcagcacttatgggcagatcttgatcactatgatcccctacagttgaagcgtgaggatgacatatattgtgatcggaaata

SEQ ID NO: 4231 - DNA, 726 bp, Oryza sativa
atgccgtcattcttgtcggacgccaccatccgccgcttcctccgggcaaggaactggagcacggagcaagcaaccaaggctctcaaagagactgtcaaatggaggcgtcagtacaggccggacacaatccgctgggaagacattcctggaagggagcacgaagctaggagaacatatatagccgactactttgataagaatggaaggatcgtcttcatatcgaatccgacaattaagagtaaatcatccaccaaggaccagataaaacagttagtgtataacctggagatttttgccatgcactcagaaaacatggaagacgaatgtactgtttggttaactgactttcaaggctgggtgctaacaaatacgccattgccgttgcttcgtgaatgcactcacataattcaaaaccattatccagggctgatttctgtcgcaatcctcagcaacccaccaaggattttcgaatccttttggaagattgtgtgctatttcattgagccaaagttgaaagaaaaagtgaagttcgtatatactaacaatccagagagccacaagatagttgctgatatgtttgatttggacaagctggagtctgcatttggggggaggaacacacttccatttgacatggacaagtatgcagagagaatgaaacgaagtgaccaaatgagaggagctcccatgcatgccaatggctactcttgctctacccaaacctga

SEQ ID NO: 4232 - DNA, 900 bp, Oryza sativa
atggcggctccggtggtggacgcggagtacctgcgacaggtcgagggggcgcgccgcgacctccgcgcgctcatcgcctccaagggctgcgcccccatcatgctccgcctcgcatggcatgatgctggcacatatgatgcaaaaacaaaaactaggggtgcaaatggttcaattaggcatgaggaagagtacactcatggttcaaatgctggactaaaaattgccattgatctccttgagcctattaagcgaaagcatccaaatatcacttatgctgatctttatcagcttgctggagtggttgcagttgaagttactggaggtccaaccgttgactttgttcctggaagaagggactcatcagtttgcccgcgagaaggacgtcttcctgatgcgaagaaaggtgcaccacatttaagagacatcttttatcaaatgggattgactgacaaggatattgtagctaggggtgaaaacgctctatctggtggccacaccctggattgtttctcacagggaaaggcacatcctgaaagatctggatttgacggtgcatggaccaaggaaccacttaagtttgacaactcttacttcctagaactgctgagggaggaatcagagggacttttgaaacttccaactgacagggctctcctggaagatcctgaattcaggcgctttgtggatcattacgcgaaggatgaggatgccttcttcaaggactacgctgaatcacacaagaagctctccgaacttgggttcgctccacgtagctctgcaaaatcagatggttcaacggctgctgctacactcgcgcagagtgcgtttggggtcgcagttgctgcagccgtagtagttatcgcaggttacctctacgagtcttctaagaaaaccaagtag

SEQ ID NO: 4233 - DNA, 1506 bp, Oryza sativa
atggagctcctcctcttgtgtacgccgtgcgttattctccttctctcctccctgtacctcctccgtctcttcgtcgacgcccgccgcaacctgccgccgggtccccgcccgcagccgctcatcggcaacatcctcgacctcggctcccagccgcaccgctccctcgcgcgcctcgcggggcgctatggcccgctcatgacgctccgcctcggcaccgtcaccaccgtcgtcgcctcctccccgggcgccgcccgcgacatcctccagcgccacgacgccgccttctccgcgcgctccgtgccggacgccgcccgcgcgtgcgggcacgacggcttctccatgggcatgctcccgcccagcagcgccctgtggcgcgcgctccgcagggtktgcgccgcggagctytttgcgccgcgcagcctcgacgcgcaccagcgccttcgccgggacaaggtgcgccagctcgtgtcccacgtcgcgcgcctggcgcgcgaaggcgcggccgtcgacgtcggccgcgccgcgttcacggcttccctgaacctgctctccagcaccatcttctccgccgacctcgcggatttcggcgacgcccgagctgagtcgtcggtgggggacttaagggacttgatctcggagttcaccatcgtcgtcggggtgccgaacgtgtcggacttcttcccggccgtcgcgccgctcgacccgcagcggctgcggaggcgggtggcgagggtgttcgagcggctgcaggccgtgttcgacgggcacatcgaacggcgcctgcgggaccgcgctgccggggagccgcccaagaacgatttcctggacgctttgctcgactaccgcagcccggaggatggccggggttttgatcggccaacgctacagtttctgtttacggatttgtttagcgcgggaagtgatacaagcgcagtaactgtagaatgggcaatggctcagctgctacagaacccaccagcaatggcgaaagctcgtgaggagcttgctcgagtgattggctccaaacaagaaattgaggaatccgacattagccagctcaagtacctcgaagccgtcgtgaaggagacattacggcttcatcctccggcgccatttctgcttcctcaccaagccgaaacgaccacacaggttggtggctacacggtgcccaagggcacccgtgttctggtgaatgtttgggcgattggtcgggacagcaaggtgtggtctgaccctgacaagttcatgccggagaggttcctgcagagcgaggtggacctgcgtggccgtgacttcgaactgattccatttggctctggtcgaaggatctgtccggggttgccgctggctgttcgcatggtgtacctgatgctcgcgtcgttgctgcaccggtttgagtggaggcttctaccggaggtcgagaagaacggggtggacatggcggagaagttcgggatgatactagagttggctacgccactccgggctgttgctataccagtttaa

SEQ ID NO: 4234 - DNA, 1503 bp, Oryza sativa
atggagctcctgctcctgtatgcgccgtgtgttattctcctcgtctcctccctgtaccttctccggctcttctctgacgctcgccgcaacctgccgccgggtccccgcccgctgccgctcgtcggcaacctcctcgagctcggtgccaagccacaccgctccctggcacgcctcgcggagcgccacggcccgctcatgacgctccgcctcggcgccgtcaccaccatcgtcgcgtcctcaccggacgccgcccgagacatcctccagcgccacgacgccgccttctcgacgcgccctgttccggacatcgtccgggcgtgcgggcacgacaggtttgccatgccctggctccctcccagcagcccccagtggcgcgccctccgcaaggtgtgctccgcggagctcttcgcgccgcgccgcctcgacgcgcagcagcgcctccgccgcgagaaggcgcgccggctcgtgtcgcacgtcgcgaggatggcgcgcgagggcgcggccktcgacktccgccgcgtcgtgttcacgaccttgctgaacatgctctcctgcacgctgttctcggccgacctcgccgacctcgacgaggracgcgccggatcggcgggggaattagcggacacggtcgcagagttcgcgggcaccgtcggtgtcccgaacgtggtggactacttcccggcggtcgcggcgttcgacccgcagcggctgcggaggtggctgtcgagggtgttcacgcgactgttcgctgagttcgacgagcagatcgagcggcgcatgcgggagcgcgacgcgggtgagccgcccaagaacgacttcctggacgtgctgctcgactaccgcacgacggaggatggccggcagttcgaccggcaaacgctacggtcacggtttacggatttgtttagcgcggggagtgatacaagcgcggtaactgtagaatgggcaatggctcagctgctacaaagcccatcatccatgatgaaagctcgggaggagcttactcgagtgattggctccaaaccagaaatcgacgaatccgacatcgacagcctcgagtaccttcaggccgtcgtgaaagagactttccggctccatcctcccgcgccgttgctgctctctcaccgagccgagacggacacagagatcggaggctacacggtgcccaagggcgcgaccgttatggtgaatatttgggcgattggccgagatagcaaggtgtggtttgagcctgacaagttcatcccggagaggttcctgcagaaagaggtggatttccgtggtcgcgacttcgagctgattccatttggctccggccgaaggatctgtcccgggttgccgctggctgttcgcatggtgcatctgatgctcgcatcgttgctgcaccggtttgagtggaggcttctgccggaggttgagaggaacggggtgaacatggaggagaaatttgggatcgtaatgacgttggctacgcccctccaagctattgctacaccaatttga

SEQ ID NO: 4235 - DNA, 1110 bp, Oryza sativa
atggccgctctcagctcgcgccgccgccatggcagcctccgcctcctcgccgtggccctcctggtgctcgccggagtggcctcctccgccgccgcggcggggagcggccgcggcgcatttgacccatcccgcgtcgtgcagctctcgtggcgccccagggcgttcctgcacaaggggttcctgacggacgcggagtgcgagcacctgatctcgctggcgaaggacaagctggagaagtcgatggtggcggacaacgagtccgggaagagcgtcatgagcgaggtgcggaccagctccggcatgttcctcgagaagaagcaggtagttttcttttgtagtttgcgagagatgaaattcgatcaattatttcctatttacattagtattgtttgcaaagcactgaaccacgtagtcatatttgccatatggacgtcaatactgagtaacaggccagttctcaagctcgacgaagttgtagctaggatagaggagaggattgcagcttggacgttccttccaccagataatggcgaatccattcaaatattacattatcagaatggcgagaagtatgagccacactatgattacttccatgacaaaaataatcaagctcttggaggacatcggatcgccactgtgctcatgtacctttcagacgttgggaaggggggagagaccatctttccagaagcagaggggaagttattacaacccaaggatgatacatggtctgactgtgctaaaaatggatatgcagtaaaaccggtaaagggtgatgcccttctgttcttcagtctccaccccgatgcaacaacagactctgacagcctgcacgggagctgcccggtcattgaaggtcagaagtggtccgcaactaaatggatccatgtgaggtccttcgacatctctgtcaagcagggagcttccactgacgggtgcgaggatgagaacgtcctctgcccccagtgggctgcagtaggggagtgtgccaagaatccgaactacatggtgggtaccaatgaagcacctggcttctgccggaagagctgcaatgtgtgtgcacattgccgaatcgaatggaacacctatgccctggcctatgtgtaa

SEQ ID NO: 4236 - DNA, 1182 bp, Oryza sativa
  misc_feature (1)...(1182): n = A,T,C or G
atgagcgtcatcacggtggttgtggtggtcggcgtcgtcctcgcgctcgcggcggcggcgtcagtaatggcggcggagtacagcgtggtggactacggcgcgcgggcgggcsggarggcggacgcgscgggggcgttcctggccgcgtgggcggcggcktgcggcgacnacggcragcggccggtratgcgcgtccccgcggggacgttcctggtcgggcgggcgtacttccgcgggccctgccgcagcgccggcggcktggtgctcgccatcgacggcaccgtcgtcgcgccgccggccgtcggcaacgcgtcgtggatcacgttccactacgcccacggcctcgccatccgcggcggcacgctcgatggcaacggccacgccttctgggcgtgcaaggccgccgccggccgccgctgcccaccaggcaccacaacgctggacatcagccagtcgaacaacgtgtcggtgaagcgggtgacgctggtggacagcaagaacgtgcacgtctccatcttcgactgcgccggcgtgacgctccagggcgtgcggatcgcggcgccggcggacagccccaacaccgacggcatccacgtcgcgctgtcccgcgacgtcgccgtcctcagcgcgacggtgcgcaccggcgacgactgcgtctccgtggggcccggcacctccggcgtggccatccgcaacatccggtgcggccccgggcacgggatcagcatcggcagcctcggcgggcgcgccggcgagggtgaggtccggaacgtgacggtggagtccgcgtcgctcgccggcacgcagaacggcctccggatcaagacgtgggggaagcccttcgccggccgcgtctccggcgtacggttcgccaacgtcgccatgcgcgacgtccagaaccccatcgtcgtcgaccagaactactgccccggcaacgtcaactgccccggccagagctcgggggtgaagatcagcgacgtggagtacgagggaatcacggggacgtcggcgacggcggtggcggtgaggttcgactgcagcgggagcaacccatgcacggggatcaggctcaggaacatcaacctgacgtacgacggcggcggcggcaagccggcgaggtccttctgcaagaacgccggcgggtcggcgtccggcgtggtcatcccaccgagctgcctctga

SEQ ID NO: 4237 - DNA, 1370 bp, Oryza sativa
atggggtgctggatccgcatcccgcgccggctcggcggcggctgcatgtcgtcgcgctccaaggtcgactcctccaccaccaccagcggcggcggcggcggcggcagcgctcgcgtcggcggcgaaagcaaatcagcgaatgatggttgtcgagaccattcagttcaaccaatggcctctggttccacaacatccagtaacactggaagcatctcaccttcgtccatagtcggagaggaacttaaactagctttccaactccgtaggtttacatttaatgaacttaagtgtgccacaagaaacttccggcctgagagtctccttggtgaaggaggttttggctgtgtctttaaaggttggattgaggagaacggaactgctcccgtaaaacctggcacaggattaacggttgctgtcaagacacttaaccatgatgggctgcagggccataaagagtgggtggcagaagttgattttcttggaaaccttcaacatccacacctagtgaaattggttggttactgcatcgaagatgaccaaaggttgctagtgtatgaatttatgcctcgtggaagcttggagaaccatctttttaggaggtctttacctctcccatgggccatcagaatgagaatagcacttggtgctgctaagggccttgcttttcttcatgaagaagctgaaaggccagttatctatcgggatttcaaaacttcaaatattcttttagacgcggactacaatgcaaaactctctgattttggactagctaaagatggccctgagggtgataaaacacatgtatctactcgagtcatgggaacttatggatatgcagctccggagtatgtcatgacaggtcacttgacatcaaagagtgacgtgtacagctttggagtggtgctactggagatgatgtcaggcagaaggtcaatggacaagaataggccaaacggtgaacacaacctggttgaatgggcgcgtccttatcttggagaaagacggcgattctataggcttgtagacccccgtctggaggggaacttctccataagaggcgctcagaagacagctcagctggcctgtgcctgccttaaccgggatcccaaggccaggcctctcatgagtcaagtggtcgaagtcctcaagcccctcctgaacctcaaagacatggccagctcctcatacttcttccaatccatgcagcaggagcgtgccgcaagcctcggcaacccaattggcagccaaagcatgaaggcacagggcaccttcgcgcgcaacgggcagcagccaatgaggagcctctcctatggcccgcacgcctccccgtaccggcagtccccaaggcccaacaacggcaaactgcaatg

SEQ ID NO: 4238 - DNA, 1404 bp, Oryza sativa
atgcgccgctactccgcgctgcccggcggcggcgcccgccccgacacgctcgccgaccgcctccaccgctaccgcggcgtcctcctcgtcatcctcgccccgctcgccctcgtctccctcgtcctcctcctcatgccgcgytccccsgcctcctcctccgccgccgccggcaggaggtggggccccctcgacgccaacaagtacgccgtcattttcgacgccgggagctccgggagccgcgtccacgtcttccgcttcgacgccaacctcgatctgctccacattggcgaccagatcgagctcttcgtccagaaaaagccggggcttagcgagtacgccaataacccgcaggaggctgccaaatcgctcgtctctctccttgaggatgccaaacgagtggttcccgtggaattgcgcggccagactcctgttagagttggggccaccgccgggctaagagcgttgggagcagaaaaatcagaggagattttgcaagcggtcagggatcttcttcgcgaaaagagttcgttcaagacccaaccggattgggttacagttcttgatggacctcaggaaggcgcatatgaatgggttaccatcaattatctgctggggaaattgggaaagacttacgcagacacagttggagtggttgatcttggaggtggatctgtgcagatggcatatgcaattgcagagaaggatgcagtgaaggctcctaaaccatcagagggtgaagattcatatgtgaagaaactgtttcttaaaggaacaacatattatctttatgttcacagctatttgcattatgggttgctggctgctagagcagagatcttaaaagccggcaatggcaaaggttacagctactgtacattggaggggcatcaagggcaatacaaatatggcaatggcaaatttgaagcgtcggcttcaccatctggtgctagttattcaaaatgcagggatgatgtagtgaaagctcttaaagttgaccaagcatgcactcacatgaaatgttcttttggtggcatttggaatggtggtggtggcgctggacagaagaatttgtttgtggcatcatttttcttcgacagggcagctgaggctggatttgtgaatcccaaggcacctgtggctaaggttaaaccttcagattttgaaaaggctgccaagcgtgcatgtaagttaaacttgaaggacgccgaagctgcctaccctggtgtccaaaaggataacattccatatatctgcatggatctcgtttaccagtacaccttacttgtggatggatttggtgttggttctcaccaagagatgaccttggtaaagaaagtcccttacagcaacgcgtttgtggaagcagcatggccactgggaagtgccattgaggttgcatcttga

SEQ ID NO: 4239 - DNA, 2502 bp, Oryza sativa
atggcggcttaccttgcagtgtttgtgttcctgcttcttgtttgttcgtcatgcagagctgatgacaagcttacacctgcaaggccgctctcccccggcgacgagctcatctccagtggcggcgtcttcgctctcggcttcttctccctgacgaactcaacctcggacttgtacgtcggcgtatggtacaaccagatccccgtgcacacctacgtgtgggtcgccaaccgcaacaccccgatcaagaagagctcctccgtgaagctgccagccggtggtggtgctggagcgacggctgtgctgctcgactccggcaacttcgtcgtgcggctgccgaacgggtctgaggtatggcggagcttcgatcacccgacggacaccatcgtgcccaacgtgagtttctcgctgagctacatggccaacagcttagaccgcatcgtcgcgtggagggggcccaacgacccgtccgccggcgacttcaccatgggcggcgactccagctcggacctccagatcgtcgtctggaacgggacgaggccgtactggcgacgagcggcgtggaccggcgcgtccatcttcggcgtgatccagaccaacaccagcttcaagctgtatcagacgatcgacggcgacatggccgacggctactccttcaagctgaccgtcgccgacggctcgccgccgatgcgcatgacgctggactacaccggcgagctcaccttccagagctgggacggcaacacgtcgtcgtggaccgtcttctcccggttccccaccggctgtgacaagtacgcctcgtgcgggcccttcggctactgcgacggcatcggcgccacggcgactccgacgtgcaagtgcctcgacggcttcgtccccgtcgacagcagccacgacgtctcgagaggttgccggaggaaggaggaggaggtgggatgcgtcggcggcggcggcggcgatggcttcttgaccatgccgagcatgaggacaccggacaagttcttgtacgtgaggaacagaagcttcgatcagtgcaccgcagagtgcagccgcaactgctcctgcacggcttatgcttatgcaatcctgaataatgccgatgcgacggaggaccggtccaggtgcttggtttggatgggggagctcgtcgacacgggcaagttcagcgatggtgccggcggcgagaacctctacctccggattcctggctcacgaggcatgtatttcgataacctttatgctaataacaagacgaaaagtactgttctgaagattgtactgccggttgcggctggtcttctgctgatacttggaggcatatgtcttgtacgcaaatcaagagaagcgttcctttcaggcaatcaaccaagcaagaaagttcagagcaaatatccatttcaacacatgaatgattcaaacgaagttgggagcgaaaatgtagaactttcttctgttgacttggattctgtcctcactgcaacaaacaatttctccgattacaacttgcttggaaaaggaggttttggaaaagtttacaagggagttttggagggtggcatagaagttgctgtcaagaggcttagcaagggttcagggcaaggtgttgaggagttcagaaatgaagtggttctgattgctaaattacaacacagaaacttggttaggcttcttggttgctgcattcatgaagacgaaaagttactcatctacgaatacttaccaaacagaagcttggatgccttcctttttgggatattgatgatgtctgacaataaatttcattccacattgatcttggaagatgctaacagaaaaaacacgcttgactggccgacaaggttcaagataattaaaggagtagcaagaggtcttctttatcttcaccaggattcaagattaacaataatccatagagatctaaagacaagcaacattttgttggacacagaaatgagtcctaaaatatcagatttcggcatggcaaggatctttggtggaaatgagcaacaagctaataccaccagggttgtcggcacatatggttacatgtctcctgaatatgctttggatggctatttttccgtcaagtctgacacctatagttttggtgtcatactgttggaagttgtgagtggcttaaagatcagttcagcccatctcaaagtggactgttcaaaccttatagcctatgcatggagtttatggaaagatggaaatgcaagggatttcgtagactcatccattgtggagagctgtccacttcatgaagttctacgatgtatacatttaggactcctttgcattcaagatcaaccaagtgctaggccactgatgtcatccattgtgttcatgctggagaaacgaaactgccgtggcttacctgctccaaaggagcctatatatttcaccaaggagggagttacgggacagaccgaagacacgagagatagcatgagatcaagatctctgaaccacatgagtaaaacagcagaagatgggcgttaa

SEQ ID NO: 4240 - DNA, 2157 bp, Oryza sativa
atgggaagagcggatgcgccatggctgccgcttctgctcctgtgctcctcctgctgcttctgcatttggccccagaagcaaatcttggtcgctgcagacaccgaccctaatgatgttactgtcctcaatacgctcttcactagcctgaattctccggggcagctcaaaggttggcaggcaagtggtggagacccttgtggccaatcatggcagggtatcacgtgctcaggatcatcagttactgcaatcaaattaccaagcttggggctctccggtaatttggcgtacaatatgaataccatgggttcattgattgagatcgatatgagccaaaacaaccttggtggtggccaacagatacagtacaatcttcccactaataagcttgagaggctcaatctcgcaggaaaccagttcactggaaatttaccctactcgattttctcgatgtctaatcttaagtatttaaatctaaatcataaccaattgcaaggaaatataactgatgtattttccagcctctatagcttgacaacactggatctttcctttaattctcttgctggtgacctaccacaagggttcacatcattgtcaagcctgaagaaattatatctgcagaacaatcaatttactggttatatcaatgtccttgctaatctcccccttgatgatctgaatgttgcaaacaatcatttcactggctggattcctagtcaacttaagaagataaacaatctacaaactgacggaaattcttggagtaatggaccagcaccaccacctccaccgtattcagctccacctccaccaaaccgtccaaacagcccaggtcaaaacaatggtggttcaagttctggtggaagctctgggataggtggtggaggtgtagcaggcattatcatatcattgctggtagttggagcagtcgttgcattctttgtgataagaagaagaaaacgcagagcggcattggaagaacattttgaacagcaccagccattcacttcgttcccttcaaacgaagttaaagacatgaagcctattgaagagtctactacaatagatgtagagtctttgccatcccctgcttcatttagtctgaagccaccccccaagattgaacgccacaagtctttcgatgatgatgatttatcaaacaagcctgtcttgaagaaaaccaatgtggcacctataaaggcaactgtttattcagttgcagatctacagatggcaacagaaagctttagcatggacaaccttgttggggaaggtacttttggacgtgtatacagggcacagtttactggtggaaaggttctggccgtgaagaaacttgatagtaccgtgatgccattccattcatctgatgattttgctgaactggtctcagacatttcaaaactgcatcatccgaatctcaatgagcttgtgggctattgcatggaacatgggcaacacttgcttgtttacgatttccacaggaatgggtcactccatgatctactccatctttcagacgaatacagcaagccacttagctggaactctcgtgtcaagatcgcactaggctctgcccgtgcactggaatatcttcatgaaatttgttctccatccatcatccataagaatttcaagtcatccaaccttctactggattcagaattcaatccacacctttcagatgctggacttgcaagctttatttctgatgcagaattccaggcagcgcaacagagtgctgggtgcactgccccagaggtggacatgactggtcagtacacactgaagagcgatgtctacagctttggagtagtcatgctagagcttttgacgggacgcagacctttcgatagcactagaccgaggtcagagcagtcacttgtgcggtgggcgactccacagctccatgacatcgatgcattggacagaatggtcgatcctgcgctgaagggtctgtaccctgccaagtctctctcccggtttgccgacgtgctcgctttgtgtgtccagcctgaaccagaattcaggccaccaatgtcagaggtggtgcaagcattggttcgtcttgtccagagggccaacatgacgaagagaatgctcgacggagatacttcgtcgcgccgaacagacgaccaagaacaagatttcatatga

SEQ ID NO: 4241 - DNA, 1230 bp, Oryza sativa
atgggcggcgtgatcggagcgttattccgcggtggtggtcaccgtcgtgagatgcacagagcgccgatgaaccagccgggatacggcggcggcggcgagaaccaccggagggcgatgctgaccaagaagtactcgtacatacctgacaactaccagtctctcgatcaggtgacagcggctctgcgagatcaagggctcgagtcgtcgaacctgatacttggcatagacttcaccaagagcaacgaatggacagggaagcgttcgttcagtgggcagagcctgcacaagataggcagcacaccaaatccatatgagcaagccatcagcatcatcggcaagacattggcacctttcgacgatgataatctcatcccatgctttggcttcggcgacgcaaccacacatgactacaatgtgttcagcttccatcctgacaactcaccctgccatggattcgaggaggtcctatcatgctacaagaagattgtgccacacctcaggctatctgggcctacctctttcgcgccgatcgtcgaggcggccgtcgacattgttgacaggagtggaggacagtatcatgttcttgtcatcgttgctgatggacaggtgactaggagtgttgatacaagcgataatgatctgagcccccaggagaggaggacagtggactccgttgtcatggcaagctcctaccctctatccattgttcttgttggagttggagatggcccatgggaagacatgcagaagttcgacgacaagatcccggctcgccagttcgacaactttcaggagcacgacgcagcagcagaaagagtcggcgttcgcctggcggctctcatggaggtgcccatccaatacaaggccaccatggagctcggcatcctaggccggtcgacggggaaggctaagaggatcatgcctgctccgccgccgctgccgtcggcggcggggaggcagccatcgctgaggagggaagacagcgccgccgccaccgctgccgccgccccaccgtcaccaagagaggatcaagtgtgcccaatctgcctgaccaatgccaaggacttggcatttgggtgtggccacatgggaatgtggggagagcctgaccaaatgcccaatttgtcgacagacgattcggtccaagctgaggctgtactcaggatgatcaaatgcttatggactgatggaatggagcttaaatctgttcttaatgtacagaatgcatga

SEQ ID NO: 4242 - DNA, 3105 bp, Oryza sativa
atggaggacagggtcaaattcattctcttcctccttggggaggaagctgattcctttgcaaaaagggcagagatgtattacaagaggcgaccagaggtcatcagttcagtggaagaggcgtatcgggcatacagagcacttgctgaacgctacgaccacatatcaggagagctacacaaagcaaaccatactattgcaactgctttccctgaccaggtccagtactcaatgctagaagaggatgatgacaatcttccaaaggcatttacggcggttgatcctcgcaaaatccacaagtcaacagtggaaggactgatgaaaaagaaaaaaggagagaaatcaggactgaaagatggaggcaagaattctggagataaaatcaacaaggagaatgctcaagaagagataagtaggctccagaaggagatattagtgttgcagactcagaaagagttcctcaaaagctcttatgagagtggaatggcaaagtactgggatcttgaaaagcaaattaacgacatgcaggaagaagtttgttacttccaagaggagttcaatgaaagtgcagtgcttgaagataacgaagccagggctttaatgacagcaactgcccttaaatcctgtcaagagaccattatcaaattgcaggaacagcaaaagttatcattcagtgaagcaatggttgagtcagaaagagtcaggtcttccagagataagctgaagaatatcatgaaagtgcatgggaaatccctaccagacttaggaaagttttttgagaaaacagattcagtaaagtttgcaaatgagaatgtgacaaatgatggcagtaatacagtagatgttatgtactctattaatcaggagaaaattgaactgcaagcaacagtagataagatcaaagaatacttccagaaagactctgaagtttctgtggtagagatggcagataaaattgatgcactagtcaataaagttgtggatttggaacttatggtttcatcccagactgcgcaattaaacaggctgtgtcttgaaaatacagaacttgagaagtccttgcacgagctggaggaagagaagccagcactaaacagtggtccaggtgaatcatatagcaagttcaagcaggcagaagaggacctgattagagttcagaatcttgtgagctccttccatgcagaaggaactatagtccattcaaatttcactgaaacaataactaggttccgtgatgtttcagatatgctattgtcgcctcttcttgagcaccaccaagatggttctgctcccatgccgagtgacgaaacaacaccatccattgacatggaaacatcaagcgagcatgataaaacaaactcagaaaatgaagtagacgaattacctgaacattcgaaagaactggaaccagcagatctctgtgatgacaaccactcatctagtggttatcctgagacaaaggcagaaaactgctatcgtggagatggatcagaggatctgtggtatagtgcacttgaagataagtcgagctttgcagctgcatcagtaaatgaggaagaatcaggaaatgcagataatgattcatctcgtgatcacaacaacagaggagaagatcatgctcctgaaatagctagtgacgatgggagcagcaagcaacaatatactgtacaatctcatgagaagcctatattagaacgactgcatcatatttcctctaatgacccaggagatcataatgcgaaaaaagaagagaatgagcaagatttatcaatatcagatgaaagcatctctgaaggcaactcggagcaaaagattaataaagcaggcaattcatgtatcacagcagatacagctcctattagtagaaaagttgatgaggttggcgatcaagaggaaaacatgattaagctacagcagctgcttatgaatgggcttcaagataaggaaaaggtactattaaccgagtacacctctatactccgaaattataagaatgagaagagaaagcttacagaagtggagacaaagaatcaggaacgtttgaatgagatgtcagctatgataagtgagctacgctctgcaaattcaatgaaggatgagaaaattaggtcactgcttgaactcctgaatgctgtacttgacaaagatgtatcaggaaatgggcaccaaatgaacccaacaacgtccttcagttcgataagcaggacattcaggggtcaccgaaggaccccaagcttttcacctggtcatcaaaggaaacaaagtgtttcctccatttccagaataattctcgaatcccctaaggaagatgatgcattgtatgataccgttacagatcaagaaagcctaattttggaggacatcaaattgatcgatgttgtcaagatggagaatgcctcgccgcttgaagagaagttcagacaagacattgatgcacttctggaggagaacttagaattctggatgaagttcagcacatcattccaacagatccaagggtttcagaccaagtacgagcaactacaacctgagattgggaagctaacaaacaaggacaagctcaagacaaataatggccgtgcggatgatccatcagcaaagggtgactcaaatgccatagaaaaacggctaagagaactcaagatagaactacaagtatggttggaacagaatgccatgctcaaaggggagctccagtataggttcgcttccctctgcagcatacaagaggaaattgaagcaaccatggagatgggtgcagaccctgaggaaggagctcatttcacttcatatcaagctgcaaaattccaaggggaggttatgaacatgaaacaggagaacaacaaggttgctgatgaactgcaatctggtctggatcatataaaagggctccaagcagaaattgaaaaggtcattgaaaagatagtcgagagaactagcttatcggaggccaaaggaagcagcacctggaaaaatgcaccctctagaacaagagtgccactccggctattcctctttccagccaagaaaaagaagccgtcactattggcatgtgtaaacccggctcttcagaaacagcatagtgacatggtattcttcactaaatga

SEQ ID NO: 4243 - DNA, 1776 bp, Oryza sativa
atgatgctgtgctgcggcgtggattgctggtgcggcgcgctgcggctgtggcgcagggtggtgcttcgcaagtggctcaacgtcggctccgggtcgggcgactccgacttcagcgccgacgagtgcgacgccagcgacggcgagctcgacggcgaagacagggataatgaatcatatggtgaagggacgagtttagatggacttggtgcaggaacaattggcagggctgattggttgccttatgtgcagcacaagcacttgtttgataaaactgacatggcaggggatgaaattaaatctatgccttacaggcttagaagacgcaaatcagagacccttcgcgctcagtatattgacatcagagaactcaggatttgtgtagggacatggaatcttgcaggcaagtttccacccagtgatctggacattcaagactggttggataaggaggagcaggctgatatttatgttcttggatttcaagaaattgttccattaaatgctggaaacatatttggttctgaggataacagtccaattgcagtatgggagcatattattcgtgaaactttgaataagatttgtccagataagccgcagtataaatgtcacagtgatcctccttcaccatcaaggtttaatccatcagattatgttatggtgatgaaagatgaattgcttagcgagtctgacagtgacaattatggtgagcttcatccattgattaaacaaaatgatgatatagctattgacaatgatgtagttcatgataaaacatatgaaaacttcagtgctgcttccaacggaagagttcataaaggcaaagatttcagcaggatggattcagtaaagacttctgatcagtcccccaacttaagttatgaaaaagacagatcaaaactggaagagacaaccaaattactctatcatccagaaaggcttggaatgatttggcctgaacagccattggatatgatggctcagtgtcttcgggctagcacttcactgaaggctctagcaactccagcatctttgaaatcaacagtgaattttccaaatgatgatttatcccatcaagttaacagtgacaatggagtgattaaaagtaaaaggccatgctttctgcgaatagggtcaatatcagtcagcatgtctatacatcagacacatttttgctttgtatgttgccacctaacttctggagaaaaggatggcgatgaactgaaaagaaatgcagatgttgaagaaatcctccgaagaacagtatttaacccacttcctggacttagcacgcctaagggaatattgggtcatgaaaggatcatatggtttggagatctcaactaccgaatcaacttatcatatgaaagagcacatgaacttatctccaagcaagattgggatggattgtttgagaatgatcagctaaaaagagaattgagtaaaggacacacttttgatggttggatcgaaggagatatcagcttccccccaacatataaatacgagtttgactcagaaaagtatgtaagtgatgagccaaaatctggaaggagaacaccagcatggtgtgataggattctttcacgaggaaagggaatcaggttaatttcctacaggagaggagagcttaagctttctgatcaccgccctgtgactgcagtcttcatggcagatgttgaggttctctgccacagaaagttgcagaaagcattaacatttacggatgcagaggttgagtatcatctggcaagttcttcagctgaaggtcgctga

SEQ ID NO: 4244 - DNA, 1356 bp, Oryza sativa
atggctaagcagctcaggcgggtgcgcacgctgggccgcggggcgtccggcgccgtggtgtggctcgcgtccgacgacgactcaggggagctcatggccgtcaagtcggcctccgccggcggcgccgcggcgcagctgcggcgaaaggggcgtgtcctgtccgggctctgctcgccgcacatcgtcccctgcctcggatcgcgcgccgccgcgggcggcgagtaccagctgttcctcgagttcgcgcccggcgggtcgctcgccgacgaggccgccaggaacgggggctgcctcccggagccggccatccgggcgtacgccgctgacgtggcgagggggctggcgtacctccacgggaattcgctggtgcacggcgacgtcaaggcgaggaacgtcgtgatcgggagcgacggccgggcgaggctcacggacttcgggtgcgcgagggtcatggactcggcggggccgatcggcggcacgccggcgttcatggcgccggaggtggcgcgcggggaggagcaggggccggcggccgatgtctgggccctcggctgcaccatcatcgagatggccaccggccgcgcgccgtggagcgacatggacgacatccttgccgcagtccaccggatcgggtacacgaacgccgtgccggaggttcccgggtggctgtcagcggaggccaaggacttcctggatggctgcttcgagaggaacgcgtccgacaggtcaacggcggcgcagctcctggaacacccattcgttgcctccgccgcggccctcgaccgctggccggagccggcgaagcaagaacgtgcatcccccaagagcacgctgcatgacgcgttctgggactcagacaccgacgacgaggacgacgagatgccaaccggcgcggcggagaggatcggtgcattggcgtgcgccgcctcggccttgccggactgggactccgacgaaggatggatcgaggtgcacgacgaggtctccttcgccgccgtcacgccgccggccagcgacgcggactacttcgtctgggcagaactgtctgacccagagatggagcagttcgccgtcgccgcggatggcgtcaaccatgtcccgcgcaatgaagcagaagcgatcgaatcctccattaggcagggcagttacctgcacgtacatcttggcagtggtaaaaatgaaatttttcacccgttcgatactgacgggactgaatcagggcttgatgcccaccggctcacagcattgcaaaaacaccagtggaatctgagctcaagattgccacattcgagctggattgatcgaacctttggaagtgatctagatattggtgttcaattggcaaccacatgctga

SEQ ID NO: 4245 - DNA, 1257 bp, Oryza sativa
atggaggctgcggtcgacggcaggtggacacgcgtccgcacgctcggccgcggcgcgtccggcgccgtggtgtccctcgccgcagacgaccgctcgggcgcgctcttcgcggtcaagtcggcggcggcggcggcggcggccgagcagctcgtgcgcgaggggcgcatcctttccgggctgcgctcgccgcacgtcctcccctgccttggcttccgcgccgaagccggcggcgagtgccagctattcctcgagttcgcgcccggcggctcgctcgccgacgtggtggcgaggagtggcgggcggctcgacgagtgcgccatccgcgcgtacgcggcggacgtggcgaggggcctggcgtacctccacgggatgtcgctcgtgcacggcgacgtcaaggggaggaacgtggtggtcggcgccgacggccgggccaagatcgcggatttcgggtgcgccaggacggtgggctccgacaggccaatcggcggcacgccggcgttcatggcgccagaggtggcgcgcggggaagagcaggagccggccgccgatgtctgggccctgggctgcaccgtcatcgagatggccaccggccgcgctccgtggagcgacatggaagacatcctctcggcggtgcgccggattggctacacggacgccgtgccggaggtgcccgagtggctgtccgcagaggcgaaggacttcttggcccgctgcttcgcgagaaacccacgcgagcggtggacatcgtcgcagctcctggagcacccgttcctggcatcggcaggctgcagcgtgaaaacaggggaggcggcgccccaatgggtgtcccccaagagcacgctggatgtggcgttctgggagtcggacacggacgacgaggaggacgacatgccagcgagccccgccgagaggatcaaagcattggcttgcccctgctcggccttgccggattgggactccgacgagggctggatccaagtgctcaacgagtccagcgaagcttgcgacacggcagtggccaaggtggaggccgaagggaaggggcgcgttctgatcgaagcgttggaaacgatcaacgaatcttccggtggcgatgcagagtgtgttgatcccgagggcactgtacgattgattactgttgcttccattgggcagcaggaagtgttctgcttgggtctcattaatgacccacttgtattttctgttaataaaagtgaattaacaaagtctttgtttccccaaattgtctcattttaa

SEQ ID NO: 4246 - DNA, 1299 bp, Oryza sativa
atggagtacggtgcagcaacgcgtggcgcgctcctcgcggccgccccgctctccggcgcccggcgtagctggttgcccctctcatcgccgccgtcgccgccctctattcagattcagaatcgactttattcgatatcgtcgcttccactaaaggctcgaggcgtgagaagatgcgaggcttctctagcaagaataattctgatggcaactcttgcatattttycaaggaaggcatctgaggtagctgatttagattgggagaaccttggttttggaatcgtgcagaccgactacatgtatatcacaaaatgcggacaggacgggaatttttctgagggtgaaatgattccatttggacctatagcgctgaacccatcttctggagtccttaattacggacagggattatttgaaggtctaaaagcatatagaacaacagatgactctatcttattatttcgcccggaggaaaatgcactgagaatgagaacaggtgcagaaagaatgtgcatgcctgcgcctagtgttgagcagtttgtggatgcagtaaagcaaactgttttagcaaacaagagatgggtgcctcctaccggtaaaggttctttgtatattagaccgctactcatgggtagtggtgctgttcttggtcttgcacctgctcctgagtatacgttcattatatttgtctcgcctgtggggaactactttaaggaaggtttagctccaataaatttgatagttgaagataagtttcatcgtgcaacccctggtggaactggaagtgtgaagaccataggaaattatgcctcggtcttgatggcacagaagattgcaaaagaaaagggctattctgatgttctctacttggatgctgttcacaaaaagtatcttgaagaagtttcttcatgtaatatttttgttgtcaagggcaatgtcatttcaactccagcagtaaaaggaacaatattgccaggcatcacaaggaaaagtatcattgatgttgctctgagcaagggtttccagttttttgggaaatcttctattaatgtatttggtttcttgaaggtcgaggagcgacttgtgtcagtagatgagctgcttgaagctgatgaggttttctgcacaggaactgctgtcgtagtgtctcctgtgggtagtattacctatcaagggaaaagggtcgaatatgctggcaacaaaggagttggtgtcgtgtctcagcagctatatacttcattaacaagcctgcagatgggccaggcagaagattggctagkctggactgtgcaactgagttag

SEQ ID NO: 4247 - DNA, 1320 bp, Oryza sativa
atggccgcggagatgcgcgcggggctcgccgccgagggcgggagcgacctccagatgctcgtcacctacgttgactccctcccctccgggggtgagaaagggatgttttatgcacttgaccttggaggaacaaatttccgtgttttacgagttcaattaggaggcaaagaacgtcgaattatcaagcaagactcagaagggatatccattccacaacatttaatgtccagcagttcacatgagttgtttgattttgttgctgtggctttagcaaaatttgttgcctctgaaggtgaagactgccatcttcctgagggtacccaaagagaactaggttttacattctcctttccagtgaaacaaaaatcattggcatctggcactcttatcaagtggacgaagagttttgcaattgatgaaatggtcggcaaggatgttgtggctgaattaaacatggctatcagaagtcaaggacttgatatgaaagtcacagcattggttaatgatacagtagggacattagctgctgggagatatgtgaatcatgatactattgctgctgttatactgggaacaggtagtaatgcagcgtacatagatcatgcagatgcaattccaaaatggcatggatccctgcccaagtctggaaatatggtaataaacatggaatggggtaactttaagtcctcacatcttccacttactgaatttgatcaagagttggatgcagaaagtttgaaccctggcaaacaggtttacgagaaatcgatttctggtatgtatatgggggaacttgttcgaagaatcttactaaagatggctcaagaaactcgcatttttggtgataatatacctccaaaacttgagagaccatacatcttaaggacacttgacatgctgatcatgcatcatgatacatcatctgatctcagaacagttgccaacaagttgaaagaagtcttggggatcgaatatacctctttcacgacgaggaaactggttttggatgtttgtgaggccattgcgacacgcggtgcacggcttgctgctgctgggatatatggcattatccaaaagcttggtcagcattctgacagccccagtacgagaaggtccgtgattgctgtggatggaggggtctataaatactacactttcttcagccagtgcatggagagcactctgagtgacatgcttgggcaggagctggccccctctgttatgatcaagcatgtcaatgatggctcaggcgttggggcagctctcctggcagcctcttattctcaataccaccaggctgaatctgcagatagttcataa

SEQ ID NO: 4248 - DNA, 606 bp, Oryza sativa
atggcagtggctatagaggctccgttccatgtcctggctgtggatgatagccttcctgacaggaagctcatcgagaggctactcaagacctcttctttccaagttaccactgttgattccgggagcaaggctctggagttcttggggctccatgatcatgaggacagcccaatttctactcaatcagatcagcaggaggttgcagtgaacctgatcatcacagactactgcatgcctggcatgacaggatatgatcttctcaagaagatcaaggaatcgtcttatttaagggacatcccagttgtgatcatgtcatcggataacattccttcaaggatcaatagatgcctggaggaaggagctgatgaatttttcctcaaaccagttcggctctccgacatgagcaagctgaagccccacatactgaaaagcagatgcaaggagcactaccagcaggaacaacacctgcaaagcaacagcgaaagcaacaacagcagtaaccccacaagcgagaacagcagcagcagcactagcaccaacagccacaagagaaaggcagtcgatgaagaaattttgccccacacaataagaccaaggcatagttga

SEQ ID NO: 4249 - DNA, 1146 bp, Oryza sativa
atgggcttctccgggttcgcgctggcggggagggtgttcgccggcgacccacgcattttcccgggccaccgggaggtgctcgcyttcctcgatgccttcgccgtggagtccggcttcgccggccgcgtcaggctccgcgccgaggtggtccgcgtggggcccctcgccggccacggggagaggtggaccgtggcatggcgcggcgagggcggcgtggaggaggaggaggaggaggtgttcgacgccgtcgtggtgtgcaacgggcactgcactgtgcctctagtgcccaagctccgaggaattggcaattggcaagggaagcagatgcacagccacaactatcggactcctgaaccatttcaagatcaggttcaagatgctgtctcggttacagtatcaattgttgttgtggtaggattaggagcaagtggagttgacatagctagagagatctcaaatgttgccaaggaagtgcacattgcatctaggtacacagaagatcggcttgggaaggttgataccttccagaatacctggttgcattcagaggtggattgcatccaagatgatggccaagtgcgtttcagcgaaggatctgcatcaatcgcagcagatacctttctttactgcacagggtatcggtaccatttcccgttcctggacgtggagggggtcaccgtcgacggcaaccgcgtcgggcctctgtacaagcacgtcttccccccgaagcacgcgccgaacctctccttcgtcggcctgccagtcaagaccatcatgttccagtcgttcgagctggagtcgaggtgggtcgcccgggcgctgtcggggcgggccgagcttccgggcgaggaggccatggcggccgccgtggaggaggactaccggcggatggacgccgccgggaagcccaagcggcacacgcacgccctcatgcctgactggctcaccatgttccggccattggtggccgcgacgatcgacgaacggcaggtggagtacatggactgggtggcggcgcaggtcggcgagccgcccatggaggcgcggaggcgggagatatacgagaaggctctccggtgcatctggtctctggatgacagctaccgggacagctgggaggaggaagaagaagaagagaatagatag

SEQ ID NO: 4250 - DNA, 894 bp, Oryza sativa
atggagatctgggaacgccgtggcgaacgcttcgctgctcgtgctagcctaggawtcsgcacttgctgggtgaaacgtgtgggttttggggatatgctccgcctgacccatgttgcagctgttgagcaagcacttgtgcaagatgctacaaagttggaagctccagttgttattgtgaccggtgcctccagggggattggaaaggcgactgcattggctcttggaaaagctgggtgcaaggtcctggtgaactatgcccgatcctcaaaagaggctgaagaagtctccaaagagatcgaagcatgtggtggtcaggctattaccttcgggggagatgtttcaaaagaagccgatgtggattctatgatgaaagcagctcttgataaatggggaacaattgatgtgctggtaaacaatgcaggaattacccgagacacattattaatgaggatgaagaaatcacaatggcaagacgtaattgacctgaatcttactggtgttttcctctgtacacaagctgctacaaaaataatgatgaagaagaaaaagggaaaaatcatcaacatagcatcagttgttggtcttgttggtaatattggccaagctaattacagtgctgccaaggctggggttattggtttgacgaaaacagtagctagggaatatgcaagcagaaatatcaatgtgaatgcaattgcacctggtttcattgcatctgacatgactgctgaacttggagaggatcttgagaagaaaatcttgtcaaccatcccattagggagatatggcaaaccagaggaggttgctggcttggttgagtttttggctctcaatcctgcggccaactacatcacgggacaggttcttaccatcgatggagggatggtgatgtag

SEQ ID NO: 4251 - DNA, 1332 bp, Oryza sativa
atgggtcccccggatgttatctctgaaaatgatgagtttgatttctctgatgtttttggcaccactccagttcagacgccaacaggcatttcggtagctggtccagacagtcctgcacctttggctgagtccaatgagggggtttacaatgatcctattgtcatcatcaagcgatctcattctcttgttgggtccaacaatcaccttgaggggtcatcagaacctgcagaagaaaaggaaaggaacctagggcagctcagtgatgaagagtttgacaatgccacaacagaaaatgaaggtattgggcttgatgactttgaaatcttgaagcttgtaggccaaggggcatttgggaaagtctttcaggtgagaaagaaaggtacttcagagatatacgcgatgaaagttatgaggaaggataagatcttggaaaagaaccatgcggagtacatgaaagccgaaagagatatattaacaaaagttgaccatccttttgtagtgcagctcaggtactcctttcagacaaaatatcgactttatcttgtcctggacttcataaatgggggacatctcttcttccagctctacaagcaaggattgttcagggaggaacttgcacggatctatactgctgaaattgtatctgctgtagctcaccttcacgacaacgggattatgcatagagatctcaagcctgaaaatatccttttggatgctgatggccatgccatgctcactgactttggccttgccaaagaatttaatgagaatacaagatcaaactcgatgtgtggaacagttgagtatatggccccagagattattcttggtcgggggcatgataaggcagctgactggtggagtgttggaatcctcctctttgaaatgctcacgggaaagcctccgtttgttgggaacagggataaagttcagcagaagatagtgaaagagaagctgaagcttccatcgtttttgtccagtgaagctcattccctcttgaaaggactgctccacaaagaaggtggcaagcggctaggaagcggtccgggcggcagcgatgagataaagaggcacaaatggctcaaaccgatcaactggaggaagctggaggcccggcagatccagccgagcttccgacccaacgtgagcgggctcacctgcatcgccaacttcgacgagtgctggaccagcatgccggtgctggactcgccggtggccacccctgtcgccggcggcgccggccacagcagcttcgccgggttcacctacgtcaggccggctccgttcctccaggatgtcaagcctccctcttcctctaggctgaaagactag

SEQ ID NO: 4252 - DNA, 4254 bp, Oryza sativa
atgcgcgacgtgaggatctccggcgagggagagggggcgttggacgtagcggctctgcacgaggcagagagggagaagaggtgctcgttgcgcctgcgggtgcgcgacgcgccggaggagggtttccggcttggccagtggcctgtggtaccttcagattgtgtgatcctggagtatgccatcgccggtatggttttctctggatgttttgatggtcccgatgaaggtgtatcaggcctcgcccatttggttagattgagattcgtgacattgcgtgttcatgcctttgctgtatctcggtctgctgattccgtgtcggttgcatcatttagagttagattggggttgatggagcaggcttttgctacatgcgaatcattgttggaggtgacaaggcatccgtggaggaagagtttcatgaatatgatggcttgggttcgtcctgaggtcatgacctcggctgcaatatatgggatggatggtcttgcccggcctataaatggaggtgctaatggtgattttaccccaaagaaggattctcagtttgatcttgctgctttctacgaagccgttaagccctcaatggaggctggactgttggaagaggagcttcccgatttgcttcctcatctcagaacctatcaacttcgtgcagcgaattggatggttcaacgtgaaaagggaaacacaatgatttcatcaccaaatcaacattatgttcattctgcaccttattgtgttcccatagattttatgcacaagaaatctaggatgttctacaatccattcaatggaaatgtctcgatgcatccagaaccttctccaccttatgtctctgggggcattttggctgatgaaatgggcttagggaaaactgttgagcttttggcttgcatttttgcacatcgcaggccatattcagcagactgttctgtctcttcgaatataaaaggagcagatcagataaagaggcataaaagagaaagagttgagtgcatttgtggagctgcaagtgtaacctctgcataccaggggatatggatccagtgtgacatatgtgacgcttggcaacacgctagttgtgttggttactcaccaaaggaggaaatgcatgttgatgatgatgatggtgatgaagcatcaaacaatgaaaaaggaaccctaaagtcaaaaaatagaaggaagaagaaagacagacacacaagaccaggatctctgaaagtttgcatttatgaaggtgcaaagaacacggacttaacatctacccaaaaaagtgatatggctgagataagcacagctgacattgttttgacaacttatgatgtcctgaaagaagatctatcacatgattctgatcggcatgatggtgatcgccgttttttgagatatcaaaagaggtaccctgtcactccaactgtcctaacaagggtccactggtggcggctatgtttggatgaagctcagatggtagagtccagcaaaacttctgtgactgagatggcaatgaggctaaatgctcaacaccgctggtgtatcacgggaactccaatacaacgccggcttgatgatctttttgggcttcttcgctttctcaaaactcatccttttgacacatatagatggtgggtggatattattagggacccatatgagaagggggacatggtagctatgaattatgcacacaagttcttcaaggaaatcatgtggcgctcctctaaaattcatgtttcacgggagttacagctgcctccacaagaagagtgcttttcgtggctcatcttttcatcaattgaagaatatttctatcagaagcagcatgccacttgcatggaccatgcacatgaaattataagacgtatcagagatgatgccaacaaaagcgagccaatatcagactcgaatgttgtatcaaatttgtacctctccaatgatgacattgccaaactcctagtcccactgctcaaacttcgacaagcttgttgccacccgcaagtggggagtttcggtctctgctccctgcagcgtactcctttatcaatgggtgaaattttacaggttcttattgggaaagcaaaagtcgaaggggaggaagagctcaggaaaattgttgtcgccctgaatggtcttgctggacttgctgtcattgaacaaaataatcaagaggccatctctctgtataaagaagcactagctttggcctgtgaaaattttgatgatttccgtgttgaccctttgttgaatcttcatatcaaccacaatcttgcggagctgctcagagctagttctgagtatttgcaagaatgcccactaaaagaacaaacctctgaagtccatggtgcgcgaaaaagaaaggaaactagtcccgctgactcaggtctcaactctcagtatggagttacagaatcaaaatatgaattggtggctaacaaggattctgctgatgagctcattaggaagattgatatttcttccaataaaagcaccactggcttgggttcaacagggatgtcttccagggttcaaaccattgctgggttgaagtataccattcaaactggtattgattctctgcaaagttcaaggcaacaagtgatggacagacttttagaacttgacaaaacaatggatagcccaaaggatgaagacattgagtgtcagcgatattgtccaaattgctatgatggtaatggttctttatgcatccaatgtgaattggatgatctgtttcaggggtatgaagcacgtctgtttcttgttaagaaatcaaataatgattctgttattgcctcagtagaggaagcaagggacttgcaaaggcgaaaatatgagttgaatcagttttttcgtaatactaaaactaacgagggatctgaacctggtgacgacaataagaatccaagatctgctcgagaaggttttctggtctacaggcatccttctcgaattgagacttccttaagggttattctaacccactcaaagacaataatgggagagcaatctgctaaaattgctaaaaagaatttgctgctttttgaggctatgcgcaaggagttctctcaagcaaggaatctatcaatagcacagacccagttactgcgtgcccatgatgagatcaagatgtctctctcacgcctgcagctcaaggagaaagatgatgaacccagtgcagtcaatattgttactagagaagagcttataccatacaatgtgcagtttacaagtgaaaaattcttgtctttgtcatctttagctcgtataagaggccaactcagatacttaaagggattggtgctatccaacaagaaaccactgggcaagcatggtgaatcactgcccgagtcaggcaacagtgttgctatagcaacttccatccctgccacagggcaaactgcttctgatattatcaatgaaccatgcccaatttgtcaggagaagatctttgaccagaaaatggttttccaatgtggccatttcgtttgctgcaagtgctgtctttacatgacagaacaagctgcagcccactttgggaggagcaaaaaatggattatgtgccctacttgccgtcaacgtacagatcttgaaaatgttgcttttgtagttgaaaaccagagaggaaatgctgatagagaaattgaggatttggcagaaagcgctatttctgtccaaggttcatatggaacaaagattgaagctgtgacaagaaggattttgaggatcacttcaactgacggagcagccaaaatacttgttttttcaagctggaatgatgttcttgatgtgctagagcactcccttgccgctaacaatatctcttatgttcggatgaaaggaggaagaaaatcgcaaacagcgcttgcccagttcaaaggtctggcaagtagtataagtggagagaaagcaaagaagtcattttccaagatgcaacctgctcaagtattgctaatgcttatccagcatggtgcaaatggtcttaatcttttggaagcacaacatgtaatattagtggagccgttgttaaaccctgcagctgaggcgcaagctatcagcaggatccatagagttgggcaagacaaaagcacgtttatccaccgttttattgtgaagaatactattgaagagagcatctacaaattaaacaggggcagagctgtttgctccacgatacaccgtaaatcaaaaaatttcaaagatgagcttgttttgacactgaaggatattgagtctttatttccctgtggcaacacttga

SEQ ID NO: 4253 - DNA, 1596 bp, Oryza sativa
atggtttcaggtgttaatcattcttggaccaagaagtctgtctctgctttgtcagtaactagcaaccttggtgttctcatggctcattctcatgaaatgacgagtaggaaacctcctggtattcgattattcggaggcattacggtgctacggacgtaccagacacttgttttggtgcttacatttgtcgcgtatacttgctttcatatgactaggaagataccgagtattgttaagagcgtgcttgatccacagacaaagttggggtcctctccatggggacgactgcacacaaaaaacactcttaacatcggttggttgccgtttaacaccattgatggctcagcattgcttggtgagatagatgtggcgtttcttgcggtttattctgttgggatgttctttgctggacatcttggtgaccgcatggatttaaggatcttcctgacaattggcatgtttggaactgctgtgttcactgccctttttggtgctggatattggctaaatatccacaatttctactatttcctggtcattcagatgattgccggtttattccaagcaattggatggccttcagttgtcgcgattgttggaaactggtttggaaaaagcaagaggggattgattatgggcatttggaatgcacacacttctgtcggcaacatatctggttcactgctggctgcatttctgctgaagtttgggtggggctggtcatttgccatccccagcttaatcatggttgctgtcgggttgttggtgtttgtcttcttaccggttagcccagaggtgatggagatagacattgatgatggggagataagctctgttaaggatactaccaaggagcccctcttggaaccaggacaagaagtgaaacacaatgcagtaggtttcttagaggctttggaagatacctggagttgcgccctttgctctgtgcctcttcttctccaaattggttgcttacaccttcttgtattggctaccgttctacatcagtcatacacaacttcacttgtttcagctattggcggtgagtacctctcagatgctttggctggcagcctatcaacaatctttgatgttggaggcgtgttgggtggagtccttgctggtcacatctcggatcgcttaaatgcacgagcggttacagctgccagcttcatgtactgcgcgatacctgccctcttcctataccgcacatacggcagcatgtcgataatgtggaacatttgcctcatgttcatcaccgggatgttcgtcaatggtccttatgccctaatcacaactgcagtgtcagctgaccttggcactcacagctcattgaatggaaattcccgggcattggctactgtgacagccatcattgacgggaccgggtctgttggcgccgccattgggccattgctgacaggctacatctcgtcgagtagttggagcgctgtgttcacgatgcttatggcagcagctctccttgctgggctcctcttgacacaacttgtgtgcagtgaactaaaaggaaaggcgacctccaatgcgagcaaggatgtcgccgatgctcaaggtacctactcagatgaggtgtaa

SEQ ID NO: 4254 - DNA, 789 bp, Oryza sativa
atgtcggcacaggcggagctttcccgtgaggagaatgtgtacatggccaagctcgctgagcaagccgagaggtacgaggagatggtcgaattcatggagaaggtggccaagacggttgactctgaggagctcaccgtggaggagcgcaacctcctgtctgttgcatacaagaatgtgattggagcccgccgtgcgtcatggcgcattatctcctccattgagcagaaggaggaaagccgtggtaacgaggaccgtgtcacactcatcaaggactaccgtggcaagatcgagactgagctyaccaagatttgcgacggcattctcaagctgcttgaatcccaccttgtcccctcttccactgcccctgagtccaaggtcttctacctcaaaatgaagggtgactactacaggtaccttgccgaatttaagaccggggctgagaggaaggatgctgctgagaataccatggtggcatacaaggctgctcaggacattgctttggctgagctgcctcctactcatccaattaggcttgggctagctcttaacttctcagtgttctactatgagatcctcaactcgcctgatcgtgcttgcaacctcgcaaagcaggcttttgatgaggccatctcggagctggacaccctgagcgaggagtcctacaaggacagcactttgatcatgcaactcctccgtgataacctgaccctgtggacttcagacatctcggaggacaccgcggaagagatcagggaagctccgaagcgcgactccagcgaggggcagtaa

SEQ ID NO: 4255 - DNA, 1914 bp, Oryza sativa
atgatgggaggtggtctggtgatggaccagggcatgatgttccccggcgtgcacaacttcgtggatctcctgcagcagaacggcggcgacaagaacctcggcttcggcgcgctcgtgccgcagacgtcgtcgggggagcagtgcgtgatgggggagggcgacctcgtggacccgccgccggagagcttcccggacgccggtgaggacgacagcgacgacgacgtggaggacatcgaggagctggagcgccgcatgtggcgcgaccgcatgaagctgaagcggctcaaggagctgcagctgagccggggcaaggaccccgcgggcggcgtcgtgggcgacccgtccaagccgcggcagtcgcaggagcaggcgcggcggaagaagatgtcgcgcgcgcaggacggcatcctcaagtacatgctcaagatgatggaggtgtgccgcgcgcaggggttcgtgtacgggatcatcccggagaagggcaagccggtgagcggcgcctccgacaacctccgcggctggtggaaggagaaggtccgcttcgaccgcaacggccccgccgccatcgccaagtaccaggccgacaacgccgtcccgggcttcgagagcgagctcgcctccggcaccgggagcccgcactcgctgcaggagctgcaggacaccaccctcgggtcgctgctctcggcgctcatgcagcactgcgaccctccgcagcggcggtacccgctcgagaagggcgtccctccgccgtggtggcccaccggcgacgaggagtggtggccggagctcggcatccccaaggaccagggcccgcctccgtacaagaagccccatgacctcaagaaggcctggaaggtcagcgtgctcaccgctgtcatcaagcacatgtcgccggacatcgagaagatccgccggctggtccggcagtccaagtgcctccaggacaagatgaccgccaaggagatctccacctggctggccgtcgtcaagcaggaagaggagctgtacctgaagctgaaccccggtgcccgccctccggcacctaccggcggcatcaccagcgccatatcgttcaacgccagctcaagtgagtacgacgtcgacgtcgtcgacgactgcaagggcgacgaggccggcaaccagaaggctgttgttgtcgccgacccgaccgcgttcaacctcggcgcggctatgctgaacgacaagttcctcatgccggcgtccatgaaggaggaggccaccgatgtcgagttcatccagaagaggagcgcgtctggcgcggagcctgagctgatgctgaacaaccgtgtctacacctgccacaatgtccagtgcccgcatagcgactatggatacgggttccttgaccggaacgcgcgcaacagccaccaatacacttgcaaagcacggagaacaagccattcgccaccggccatcttcccggcaacctacaacacgccgaaccaggctctgaacaatctggatttcggcctgcccatggatggccagaggtcaattacagagctgatgaacatgtacgacaacaacttcgtggccaacaagaaccttagcaacgacaatgccacgatcatggagaggcctaatgcagtcaacccaaggatacagattgaagaaggcttttttggacagggaagtggcatcggcggcagcaacggaggtgtgttcgaagatgtcaatggcatgatgcagcaaccgcagcagaccaccccggcacagcagcagttcttcatccgcgacgatactccattcggtaaccagatgggcgacatcaatggcgcatcggagttcaggttcggctctggtttcaacatgtcaggtgccgtcgaataccccggcgcaatgcagggccagcagaagaatgacggcgcatcggagtttgaggaattggaatga

SEQ ID NO: 4256 - DNA, 1917 bp, Oryza sativa
atgatgggaggtggtctggtgatggaccagggcatgatgttccccggcgtgcacaacttcgtggatctcctgcagcagaacggcggcgacaagaacctcggcttcggcgcgctcgtgccgcagacgtcgtcgggggagcagtgcgtgatgggggagggcgacctcgtggacccgccgccggagagcttcccggacgccggtgaggacgacagcgacgacgacgtggaggacatcgaggagctggagcgccgcatgtggcgcgaccgcatgaagctgaagcggctcaaggagctgcagctgagccggggcaaggaccccgcgggcggcgtcgagcaggcgcggcggaagaagatgtcgcgcgcgcaggacggcatcctcaagtacatgctcaagatgatggaggtgtgccgcgcgcaggggttcgtgtacgggatcatcccggagaagggcaagccggtgagcggcgcctccgacaacctccgcggctggtggaaggagaaggtccgcttcgaccgcaacggccccgccgccatcgccaagtaccaggccgacaacgccgtcccgggcttcgagagcgagctcgcctccggcaccgggagcccgcactcgctgcaggagctgcaggacaccaccctcgggtcgctgctctcggcgctcatgcagcactgcgaccctccgcagcggcggtacccgctcgagaagggcgtccctccgccgtggtggcccaccggcgacgaggagtggtggccggagctcggcatccccaaggaccagggcccgcctccgtacaagaagccccatgacctcaagaaggcctggaaggtcagcgtgctcaccgctgtcatcaagcacatgtcgccggacatcgagaagatccgccggctggtccggcagtccaagtgcctccaggacaagatgaccgccaaggagatctccacctggctggccgtcgtcaagcaggaagaggagctgtacctgaagctgaaccccggtgcccgccctccggcacctaccggcggcatcaccagcgccatatcgttcaacgccagctcaagtgagtacgacgtcgacgtcgtcgacgactgcaagggcgacgaggccggcaaccagaaggctgttgttgtcgccgacccgaccgcgttcaacctcggcgcggctatgctgaacgacaagttcctcatgccggcgtccatgaaggaggaggccaccgatgtcgagttcatccagaagaggagcgcgtctggcgcggagcctgagctgatgctgaacaaccgtgtctacacctgccacaatgtccagtgcccgcatagcgactatggatacgggttccttgaccggaacgcgcgcaacagccaccaatacacttgcaagtacaatgatccactccagcagagcacggagaacaagccatcgccaccggccatcttcccggcaacctacaacacgccgaaccaggctctgaacaatctggatttcggcctgcccatggatggccagaggtcaattacagagctgatgaacatgtacgacaacaacttcgtggccaacaagaaccttagcaacgacaatgccacgatcatggagaggcctaatgcagtcaacccaaggatacagattgaagaaggcttttttggacagggaagtggcatcggcggcagcaacggaggtgtgttcgaagatgtcaatggcatgatgcagcaaccgcagcagaccaccccggcacagcagcagttcttcatccgcgacgatactccattcggtaaccagatgggcgacatcaatggcgcatcggagttcaggttcggctctggtttcaacatgtcaggtgccgtcgaataccccggcgcaatgcagggccagcagagaatgacggctcgaattggtactactgagagtactgraggattaaacttgtag

SEQ ID NO: 4257 - DNA, 1284 bp, Oryza sativa
  misc_feature (1)...(1284): n = A,T,C or G
atggccgccgccgccgccgccggcaacaacccccaaattccctccttctttcggcgcccggcggaacccaagccggccttcgcggcggactcgccgctccgtctycccamgcgggcagccaggatytcctgcgcggccgtggccacgcccgcgcagtcctcctcctccccngccgccgccgccgccgaccgcggggtctacaacttcgccgcgggcccggccacgctgccgctctccgtgctccagagggcgcaggcggagctcgtcgactaccgcggctccggcatgagcatcatggagatgagccaccgcgggaaggagttcgacgccgcgatcaagaaggcggaggccgacctccgcgcgctcctcgccgtgcccgacacccacgaggtgctcttcctccagggcggcgccacctcccagttcgccgccgcgccgctcaacctctgcgcctccccctccgaccccgccgacttcgtcgtctccgggtcgtggagcgacaaggcgttcaaggaggccaagaagttctccgccgcgtccgtcgcctggtccggcaaggacggcaagtacacctccctcccgcccttcgacgccatcgagcagaaccccgaggcaaggttcctccacatctgctccaacgagaccatccatggcgtcgagttcaaggactacccggagcccaagaacaagtcgggcatcctcgtcgccgacatgtcctccaacttctgctccaagcccgtcgacgtctcccgcttcggcctcatctacgccggcgcgcagaagaacgtcggcccctccggcgtcaccatcgccatcgtccgcaaggacctcgtcggcagcgcgcagcccatcaccccggtgatgctcgactacaagacgcacgcggacaacgcctccctgtacaacaccccgccgtgcttcgccatctacatctgcggcctcgtgttcgaggacctgctcgcgcagggcggcctcgccgaggtcgagaagaagaacgcccacaaggccggcatcctctacgacgccattgatgccagcggcggatactacatctgccccgtggagaaatccgtgcgatcgctgatgaatgtgccgttcaccctcgccaagggtkgggattttgagaagcagttcatcgccgaggcggccaaggagggaatggtgcagctcaaggggcacaggtcggtcggcggcgtgcgcgcctccatctacaacgccatgccgctcgccggtgtggagaagctcgtcgcgttcatgaaggatttccaagccaggaacccttaa

SEQ ID NO: 4258 - DNA, 3063 bp, Oryza sativa
atggagagctacctggaggagaatttcggcggggtgaaggcgaagaactcgtcggaggaggcgctccggcggtggcgcaagctctgcggcgtcgtcaagaaccccaagcgccgcttccgcttcaccgccaacctcgacaagcgcggcgaggcccaggccatcaagcacgccaaccacgagaaactgcgggttgcggtgctggtatcgaaagctgcactacagtttatacagggtctttcacttcgaagtgagtatgttgttcctgaagaagtcaaggctgcagggtttcagatttgcgctgatgaactgggctctattgttgagggtcatgatagtaaaaagttgatcacccacggtggagttactggaatagcagacaagcttgcgacatcaccagcggatgggttaagtacagctgaggaaagcattaagcgcaggcaagatgtatatggactaaacaaattcacagaaagcgaggtccggagtttttgggtgtttgtatgggaagcacttcaagatacaactcttataattcttgctgtctgtgcctttgtatcgttggttgttggcattgccatggaaggatggccaaaaggtgctcatgatggtctgggaattgttgcaagtatcctcttggtcgtgtttgttaccgcaacaagtgactatcggcaatccttacagttcaaggacttggacaaggagaaaaagaaaatacaagtgcaagtcacaaggaatggttttagacaaaggctatcaatatatgatcttcttcctggagatgttgtccatttagcaattggtgatcaggttcctgctgatgggctattcatttctgggttttctctactgattaatgagtccagtctcactggcgagagtgaacctgttgttgtaaatgaagataatccttttcttttgtcggggaccaaagttcaagatggttcctgcaagatgctgattacaacagttggcatgcgaacccaatggggaaaactaatggctactctcagtgaaggtggcgatgatgaaaccccactacaggtcaagcttaatggtgttgcaactattataggcaagattggtctatttttcgcagtcataactttcattgtcctttctcaagggttaatcagcaagaagtaccatgaggggctgcttttaagctggtcaggagacgatgcactggaaatgttagagcattttgctattgcagttaccattgttgttgttgctgttcctgaggggttacccttagcagttactttgagtctggcattcgcaatgaagaaaatgatgaatgacaaggcattggttcgtcacttagccgcatgtgaaacaatgggctcagctacgaccatctgcagtgacaagacaggaacactgacgaccaatcatatgactgttgtcaaggcctgcatttgtggaaacataaaggaagttaacaatcctaagaatgcatctgatttgtgttctgagcttccagaaactgttgtcaaaacccttctggagtctatttttaacaatactggtggtgaggttgtgattgaccaagatgggaaatatcagattctaggtaccccaacagagacagctttgttggaatttgcattgtcacttggtggaaattttaaggcaaagcgtgatgaaactaagattgtgaaaatggaaccctttaattcaacaaaaaagaggatgtgtgttgttcttaagcttcctggaggaggatgccgtgcacattgtaaaggtgcttcagaaatagtgttggctgcctgcgataagtttatggacgagacaggtgctgttgtcccccttgataaaacaactgctgacaagcttaatgggattattgaaagctttgctaatgaagctcttaggacattgtgccttggttatcgggaaatggaagaaggcctttctgttgaagaacaaataccactgcaagggtatacatgcattgggattgtaggtattaaagatcctgttcgcccaggcgtgagggagtctgttgcaacctgccgatctgctggaattatggtgagaatggtcactggtgacaacataaatacagcaaaagcgatcgctcgtgaatgtggcatacttactgaagatggcctggctattgagggaccggagttcagagagaaaagtcttgatgaactactcaagttgattccgaaaattcaggtaatggcccgatcatcaccacttgacaagcatacacttgtaaagcatttgcgcacaacattcaatgaagttgttgctgtaactggtgatggcacaaatgatgcgcctgcgcttcatgaagcagatattggacttgcaatgggcattgctgggactgaggtggcgaaagagagtgccgatgtcataattctggacgacaacttctccacaattgttactgttgccaaatggggacgctctgtttacgtcaacattcaaaagtttgtgcagtttcagctgactgttaacgttgtggctttacttgtcaacttctcttcagcttgctttacaggaaatgcacctctgacagctgttcaacttctttgggtgaacatgatcatggacacccttggcgcccttgcattagctaccgagccacctaacgatgacttaatgaagagagagccagtgggcagaacagggaaatttatcacaaatgttatgtggaggaacattctggggcagtctttctaccaattcattgttatgtggtatctccagacgcaagggaaaagcatgtttggccttgatggccctgatgctgaagttgtgctaaatacaattattttcaactcgtttgtcttctgccaggtgttcaatgagataagctccagggagatggagaagatcaacgtgctgaggggcatactgaagaactacgtcttcttgggtgttctcaccagcacggtagtcttccagttcatcatggtgcaattcctcggcgagtttgcgaacacgataccactcaccaggctgcagtggattgccagtgttctccttggcctcattgggatgcccatctctgccattatcaagcttcttcccgtcggctcgtcgtga

SEQ ID NO: 4259 - DNA, 993 bp, Oryza sativa
atgggaggaagcgaatacgatgatgactgggagttgcctagcgctgacatcactgtagttctttgcggcaaacttggctgtggcaagagcgcaactggcaatagcatcgttggaagagaagcatttgtatcagagtactcccatgctagtgtgaccagtacttgtcaattggccagcaccgcgctaaaggatggccgtaccctcaatgttattgatacgccaggattatttgaaatgaccattacatctgaggatgccggtaaagaaattgttaagtgtatgagtatggccaaggatgggatacatgcagtgctgatggttttttctgccacatctcgttttactcgagaagattccagtaccattgagacaattaaagagtttttcggagagaagattgttgatcacatgatactagtatttacttatggagatttagttggtgaaaataaattgaagagcatgctgaataatgccccagagtatctgcagaaaactgttgagctatgcaaaaacagagttgttctctttgataatatgaccaaggaccgatggctccaagagaagcaacttgaaaatttgcttgatgttgttgactctgtgaatacaaataatggaggaaagccattttcagatcaaatgctcgcttgcattaaggaagcacatgccagagaacaggaggtgcatgatgctattggatatacagaagagcaaatatctgaattgaaaaaggagatccagagaactcgggatgaacagcttgcaaacattaccaacatggtggaggaaaagctgaatatcactgttgacaagctgcaacagcaactcatggaagaacagaatgcaaggctagaagcagagaggttggcagctgaagctaggctccgatcagatgaggagatccgcaagctcaaaaagcgcctcgagaaggcccaacaagaaaatgaggaattccgaaagatggcttctcaacacaagtgttctattctatga

SEQ ID NO: 4260 - DNA, 1176 bp, Oryza sativa
atgcaacaaaaggaagccggcgaggaagccgtcgtcgtcgtgggcgccgggatcgccggcctcgccgtggctctcgggctgcacaggaaaggggtgaagtgctcggtgctggagtcgtcgccggagctccgggcgtcggggttcgccttcgcgacgtggacgaacgcgtggcaagcgcttgacaaccttggggtgggcgacaagatcaggaagcttcatctgcatcttcaggagttgcatgtcttctcttcgtctacgggagagataacacgaagagcggatctcacggtgcaggggaaacgaggacccaatgaactgcgctgcgtcaggcgggactggctgctccgagcactagaggaagagctaccaaaaggcaccatccgttactcctccaagatcgttgcaatcgaagaggatggcaacgccaagatcatacaccttgccgacgccgcaattctcagagcaaaggtgctgatcggctgcgacggggtgaattccgttgtggcaaaatggctggggctcacaaagccgtcgtcctcggggcgcttggcgacgagaggcctcgcgcattaccctgatggccatggattggacccaaggttcaagatgttcgtcggccatggcttccgtgctggcgtgatcccctgcaacgagactgatgcctactggttcttcacctggtctccttccgaacacgaaagtaatggcgtcgaggagagcgcggaaaagatgaagcagttcgtgctgaccaagctgaggagctccaagatcccaaccgaggtgctcgaggtcgtcgagaggagcaacataaacgacgtggtcgcgttcgccgctgcgtttccggcccccgctgtcgctcctgctcgcgagcatcagcaaggggaacgcggcggctgcgcggcgctcgaggacggcgtcgtgctggcgagatgcctcggcgacgcccttctcggcggcggcggcgccgccgagagcgagaggatcgaggcgagtctacgtgagtacgctagaatccggcggtggaggagcgtcgagctcgtcgggacagcctacgtcgtcggcatcgtgcagcagagtaacaatgcggtcatcagctttctgcgggacaagtggttggccggagtgctcgccggaaggcttctgaaaatggcggactatgactgtggcaagctctaa

SEQ ID NO: 4261 - DNA, 1143 bp, Oryza sativa
atgcagcaagaacaggcagacggccgggagatcgtcatcgccggcgccggcctcgccgggctcgcagtggccctcggactgcacaggaaaggactgaggagcgtggtgctggagtcgtcgccgacgctgcggacgtccgggttggcgttcatcacatggacgaacgccttccgcgcgcttgatgcccttggggtaggcgacaagatgaggagccagcaccagcagatccagaggttgaatgtcatgtcttcagctactggagaaatagtgcaagaaattgatctgagggcgcaaggcaaacggggaacccatgaggcacgctgcgtgagccgcaccgcgctgctactggcgttggaggaagagctcccaagaggcaccatccgctactcctccaagatcgtctcgatcgaggaagacggcaacgccaagatcctccatctgtctgacggatcgactctcagagcaaaggtgctgatcgggtgcgacgggatcaactcggtggtggcgagatggctggggctcgcgaagccgtcggactcggggcacacggccacgcgcggacgcgccaagtacccggacggccatggcttcgagcccaggtttctgcagttggtcggccagggattccgtgcaggcatggtgccctgcaacgacaccgacgtctactggttcttcacgtggtctccttccccagatgataaggatgtcgacaagagttcagccgcgacgaagcagttcgtgctgacaaagctccggagcacgaacgtgccaccacaggtgctcgaggcggtcgarcggagcgagatgaacgacgtgctcgcggcgccgctgcggttccgatcgccgctgtcgctcccgttcgcgagcatcagcaaggggaacgtgtgcgtcgccggcgacgcgctccacccgacgacgccggacctggcgcagggcgcgtgcacggcgctggaggacgccgtcgtcctggcgaggtgcctcggcgaggcgctgctgctccgtaccggcgaytgcgccgccgaggagagtcaccgggtcgtcgaggccgcgctgcgccggtacgcggacgcccggcggtggaggagtgcgcagctgaccgctgcaagtctgcaacctgtaatcatatcgtcgtgctgtttgtga

SEQ ID NO: 4262 - DNA, 1220 bp, Oryza sativa
atggagggctcgggcgtcaagggcatcgtcatcgccggcgccggcctcgcggggctcgcgacggcgctcgggttacacaggaaaggggtgaggagcctggtgctggagtcgtcggcgacgctgcgggcgtccgggttcgcgttcacgacatggacgaacgccttccgcgcgctcgacgcccttggtgtcggcgacaagatcagggagcatcatctgctctacgagaggctgttggccttctctgcatccacgggagagcctgccgcgaagttgagtctaaagatgcaagggaaaagtggaccgcatgagattcggtgcgtgaagcgcaacttcctactggagactctggagaacgaactgccggaaggcaccatcaggttctcttccaagatcgtctcgattgaggaagacggcaatgtcaagctcctacatttgtccgatggctcaacgataagagcaaaggtgctgataggctgcgacggcgtgaactcggtggtggcgaagtggcttggcctgccaaagccgatcctctcagggcgctcggccaccaggggcctcgctgagtacccggccggccacggattcggcccggagatcctgcagttcatcggccagggcttccgctccggcgtgctcccctgttccgacacctccgtctactggaactacacctggtacccctccccggatgacggcgacgcggaggagagcgtggccaagatgcggagctacgtggtggcgaagctgagggcggcgaggatcccggcggaggcgctggacgtgatcgagcggagcgagatgagcgacgtggtgtcgtcgccgctgaggttccggtcgccgctcgcgctcgtccgcggcagcatcagcaggggcaacgtctgcgtcgccggcgacgccttccacccgacgacccccgagctcggccagggcggctgcgcggcgctcgaggacggcgtcgtcctcgcccggtgcctcagcgaggccttcctcgccgacggcgccgagcacgacccggggtacgaggccgtcaaggcggcgctggagaagtacgccgaggagaggcggtggcgcggcatccggctgatcacggcggcctacgtcgtcggcttcatccagcagagcaccaacccggtgatcaagttcctcagggagaagttcttgtcaggattgctggcaaaaactatgatcgccatggctgattacgattgcggaaagctatg

SEQ ID NO: 4263 - DNA, 1167 bp, Oryza sativa
atggaggggaagccgccggtgacgccgatgcagcagcagcagcagcatgcgccgccgccgagggtgtcgaggtttcggaggttgctggtgagggtgtctgcgtcggagaggctcgccggggatgggaaggagaggggggagaaggaggcggagaaggtctccgcctccgccgccggcggtgaggtggaggccgggtcggtggggctcgaccgcatggtgctcagcttcatggaggattccgcggccgtcgagcggccgcagcgcgggcgctgcaactgcttcaacggcagcaactacgaggagagtgacgacgaggagggcttcttcctcccctccgaccactcctccgcctccgcccccgccgccgccggcgacgccttggagtctctcaagggtttggtgcagagcgcgagcgtcgcggagcggaatcttctcgcggacgcgtcgaggatagcggagaggtgctgcaagggatccaagggcaaggcggagtgccgccgcgcggtggccgacggcctccgcgcactcggctacgacgccgccgtctgccgctcgcgatgggagaagacctcctcgtaccccgcaggtgaacatgagtacatcgacgcggtggtcggcgaggaggtgaggctcattgtggaggtggacttccggtcggagttcgaggtggcgcggtcgaccaaggcgtaccgggcggcgctgcaggcgctgccgccgctgttcgtggggacgccggaccgcctcgggcagatcgtggccgtcgtggcggaggcggcgcggcagagcctgaagaagaagggcctgcacttccctccatggcgcaagccggagtacatgcgcgccaagtggctgtccccgcacgtccgctccggcgacaaggccgccgccgccgctaaaactgtgacgtccactacgtcggcgacggcgacgccggtctcggcggcgagcttctccggcgcgttcgagctcctgttcgataggaaacagagcggggagatccccgccgcggagaagatcacggtggtggtgtctccgtcgccgtggcgcccgacggaggaggcgagcaagaagaagccgccgccgtcgccatcgccgccgcagctgtggcagcagcatcagcagcctcccaaagcgaaggtcgtcacggggctcgccgccgtcctctga

SEQ ID NO: 4264 - DNA, 792 bp, Oryza sativa
atgcatacggacgcaggcgacgatttttccgagagttgcaggagcacggagcacttcgtccttgtgcatggcgccggccatggcgcctggtgctggttcaggctcctccgcctgctccaagactccggccaccgtgtctccgccgtcgacctcgccggcgcggccggcagcctcgtcgatcccaaccacgtccgctccttcgacgactacaacgcgccgctccttgacctcatggccagcttaccggccggcgacaaggtaggtgattcagattatggttcactgttccatcaacatcttttactcaaagtccaacttcagataaatatgttttacgtcagtggtcaaccatttaacctgatgcacagttctcttgtttgtcagggtgtacctgatttatccgagcatggagatgtgtatgacctgacatttggtctaggagctgatcatccgcctacagctgtggcattaagaaaggagttccaacgcattattctctatcaacaaagcccccaagaggactctgcactagcttccattctactccggccatggccaacggcgctcagcacggccagattcaccggcgacgatggaggagttgagagcttcatcgacagggtccgccgcgtctacataaagacggagaacgaccggatggtgcagccggagcaacaggaggcaatgatccgccggtggccgccaagcaaggtgatggtcatggacaccgaccacagccccttcttttccgcgccggagcttctcttcaacctcatcctcaagtcgctgtga

SEQ ID NO: 4265 - DNA, 2952 bp, Oryza sativa
atgacacaacgtgacaaccagagggagcaaggaaagcaggatagctttacaaggaaaggaaaaggaaagcggccgcggacgccagccgccattccaatccaccctatagaagtgcctccaactgcagtgccaggtgggccccgagaaccgggcccacatgtcatcgaggttctgaggataaaaggcaggagtaatatgaagtactctatcaatttcataatttgggacttcaaaagattgtgcgaataccaaacagggaaaaggtcaaatccttgtcctcgttctctgcctccaaacgcggttatgggcttggcgcttactagggattgccggggaagtgggctgttgaaacgatgctacgcgttagagaactgtgggcaagactggctgttggggagaaggggtggaggcatcccttcggcaaatgtggtgatggaccgaccacaagatcctttcaactcacgagggattgcagttycccctgcagtcaagatgaggaacatggctggaaacaacagtccatggatagaccctctgccaccaccgatgaatgcgcgcaatgggctggcaaatgccagcctcttctccacctctttgccagtccttcctcatgaaaaaatcaactttcttgattctgcacgtggcaccccattgatggatgatgcttctgcaaaactaaaagagctcgatgatgaccctgaagggaaggactacaagtttgactttgatctccgccaaatcgatgatttattgcctaatgaagatgatcttttcgcgggtatcacaaatgagattgagcctgctgggcagacaaattctatggaagaactggaggaatttgatgtatttggcagtggagggggcatggagctggacacagaccctgtggagagcatcacagctggtttggggaatacaagtatagctgatgggcttagaggccatggggtcaaccatttgggtccgtcaaatagtgccagcactgtggccggggagcatccatacggggagcacccttctagaacattgtttgtgaggaacatcaatagcaatgttgacgacacagaattgcgctcactttttgagcaatatggggatatccgaacactttatactgcaacgaaacatagaggttttgtgatgatatcttattttgatatccgagctgcacgtggtgcgatgcgtggattgcagaacaagcctctgaggaggagaaagttggacattcatttctccatcccgaaggagaatccatcagataaagatttaaaccagggaactctggttatttttaacttggatccctcagtttccaatgaagaagttcgccagatttttggaacatatggggaagtaaaggagataagagagacaccaaataaaaagcatcataagtttattgagttctatgatgtaagagcagcagaagctgctcttcggtcactgaataaaagcgagatagctggaaaacgcataaagttggaaccaagtcgtcctggtggaacgcgcagaaagaaaataaacaaaaacggaaaaaccgraaaaagggcaaatgggagggacaaaaatgggtataataaatggatcaaatgcttgatgcagcagcttggtcatgatatagaccaggatgaacccagaagctacaggattcctcatgttggttcacctattgccagctctcctccaggggcatgggctcaatacagtagtccaactgataacaatttgttgcaagcattcaatgcgtcaccaactggaaatggcatgagtcctattgggatgcctccttccttgatatcgaatgctgtgaagattgctccaatcgggaaggatagcaactggtctaaatatgacaaaggcctgagtttctatggggtagtccaaagccttattctgaacatgctcaatcccctatttggcgtccaccagcaattgggtcatgcaataccatctaatacccgttctcaggggcagggattattgtatggtggccgtcaggcttcactttttgggtctcaagatcagcttcatcatcatcatgttggctctgccccttcaggtgctccatttgagagccactttggatttttacctgaatcaccagagacgtcttatatgaatcaagtcaggtttgggaacattgggaatattggtagtggccgaaacggaactggcctcatgctgaacatggctgctcgtgcttctgtaaaccctgtttctgctttgagtggaaacatgtcagacaataactctagtagctttagaccaatactatcacctagattgggacaatcattttacgggaatcccacatatcaagggcctggttcttttggacttgacaattccatcgaacgtggtcgtaaccgccgagttgacagcagtgtgtttcaagctgatagcaagaagcaataccagcttgatttggagaagatccgtaaaggcgatgatactcgaactacattgatgattaaaaatattccgaacaagtacacttctaagatgctgctggctgcaattgatgagtttcataaaggaacctatgactttttctacctgccaattgatttcaagaacaaatgcaatgttggctacgcgttcattaacatgatatcacctgtgcacattgtatcgttctaccaggcgttcaatggcaagaaatgggaaaaattcaacagtgagaaagtagcctccttggcctacgctaggatccagggaaggactgcactcatttcacatttccagaattcaagtttaatgaacgaggataagagatgccgccccattctttttcattctaatgggccagatgctggaaatcaggaaccatttcccatcaacggcatatgtatccatatgccactggaagatggagcaattgcaacaggggatccctttggaaatgaagaggacaacaatcagaacgagaggacagcaggagaagagttatga

SEQ ID NO: 4266 - DNA, 1575 bp, Oryza sativa
atgggagtggcggtggccaaccacggcgacaacgacgggaktggcggcggcacgacgacggcgacaacgagaacgatgcaagcatgcatgaaaggaagggctgaagtgttgagagaagaagttagaacattattaaagggtttaaaggaagtacaaaaaatattggacattacaatggcaatacaacggttgggactagacatgtactatgtgaacgagattaatgagctgttgcactttgtttacagctctgattacaatgacaaagatttgaatttagtttcacttcgattttatcttctgcgaaagaatggctacaatatgtcatccggtatttttctcagttttaaagacaatgaagggaatttcattgttgatgacacaagaagtcttttaaacttatataatgcagcaaaccttagggtttatggagagaaggtgcttgatgaggctgcaactttcactataagtcgccttgagggtgtgttggaatcatcagactcaatattatcaacggaagtatcctttgcccttgaagcaccaatattccgaagggcacgaattgtagaaatgagaaactacattcctatttatgaaatagaggctacaagaaatgaaaccatattggagtttgcgaaactgaatttcaaccttctgcaacttctttactgtgaggaattaaataagatcacattgtggtggaaggagcttaaagtcaaatcaaacttgagtttttctagagataggatagtagaaatgtatttttggatgaatggagcactatatgaacctcattactctcactccagaattatacttacaagggtgacagcatttatgacaataatagatgatatatttgacacatatggtacaacagaagagagtatgctacttgctgaagcaattaataggtgggatgaaagtgcaataggactgctcccagagtatattagggggttctatgcatacttgttgaagacatttgactcattcgaggaagagcttggacctgagaagagataccgtctaaaacggttagttcaggcctacaccaaggagttaaaatggcgtgacgaggattatacgccaaaaacgttggaggaacattttgaggtttcaatgagaagtagtggtggttttacattagcagctgcttcatttgttggaatggatgacatagcaaccaaagacatatttgaatggattttgagttatccatcccttttcaagacttttgatatatttgtgcgactctccaatgatattgtatcaaataagcgtgagcaaactggggaccactatgcctctacaattcaatgctacatgaaggagcatgggacaacaattcatgagacctaccaaaggttaagagaactcatcgaagactcatggaaggatatggtagaacattgcacaaacccgattgatgaccaaccattgatcgtgccccagactgtagtgaacttcgcaaggacagtgacaaccatgtatacccacggtgatgcattcacttcttcacacacaatcaaggaaatgatatcatcgatctatgtggttccaatacaagtgtga

SEQ ID NO: 4267 - DNA, 2540 bp, Oryza sativa
atggcggcggcgggggagtactcgttcgcggcggagtacgacggcccgccgctgccctactcgctgccgcgcgccatcccgctcgacctgtcgcggatcccgctcgcctcgctctcgtcccccacctcgccaccgccacccacggcgccgccgctccccgtcgtgcgccccctcacgccctcctccctctgctccgccatccacggccaccgcgccggggtttcctccgctgctgctggtgccgccgcggcgcagtcgtcgtcatcgtcgtcctccgctgccgcctycgcctccgcgggtggtggtggtggggttgctggggcagcggcggtggattcacccacctccgtcatcgagaaccaccacgcggctctccaccactccgccgagctcccgtcgacgccctccgacgacgacgagaacgcggatgaggacgactacgatggacgcagggcgggtgcgccgccgccgccgctgttgaagtcccaccaccagcccatggtcaccttcgcggagaccagcggctccctcctccaatcctcggaagacgacgacgacgacgaggaggatgaggaggaagacgaggaatacggcgaggacgccatgcccgtgcgatcgagcggctccctctcccccgcgcactkgaggggagcctccaaatcccgtggttgcttcagatgcggraaagggggcagcttctgggcccgcggggacaaggaggcttgcctcgccttgcggcgcgcggggcgcaagtgcctggactgcatagggcggccggtggccgagtcaaagcgggattcgctggggagaggctcacgtgtgctgcggcggctgctcagcgccacggaggtggagcttgtcatgaggagcgagcgggaatgcgccgccaaccagctgcgaccggaggacgtgtatgtgaatggcaccaagctgtcgccggaggagctcgtcatgctgcaggggtgccagtgccctccttctaagctccggccggggttctattggtacgacaaggtttccggcttctggggaaaggagggtcacaagccccattgcataataagcccaaatctaaatgttggaggcgctctagatcaaaaggccagcaacgggaacactgggatcttgataaacggccgcgagattacgaaatctgagctgcaaatgcttaagcctattgtgaagctgcttagtcctgtcctatcactgccaacgcctaacaargcaaataatcaatgcggtgaagagccagtgaatgtggtaaatcgacccatccctgactacttggagcaaaggaccattcagaagctcctgttggttggatcagggacaaacaccatactcaagcaggccaagttcttgtacaagagcagaccattttctgtagaggagtgtgaagatctcagacttatcatacaaagtaacatatacaactaccttggtatactacttgaagggcgtgaaagatttgaagaggaagctatagctgacagaagaactacctgccaaagtgatccttctagctctggccattgtgaaccagagctttgtaatgacattactgagtactatattgctccacgcctgaaagcattctctgattggattctaaaagctatggccataggtaatcttgaagacattttccctgcagctagtcgtgaatatgcaccaatggttgaggaactatggaaagatcctgctattcaagctacatataaccggagaagtgaactgccattccttccatctgctgccagtaattcccttgacaaggctgttgatatttcccgaacggaatatgagctctctgatatggatatcctttacgctgatgggataacatcctcagatgggttagcatctacagatttctccttcccacaactggctttggacgggcggggttttgatgagccagatccacaagacactttgctaaggtaccaactaataagaataaacaacaaaggattgcatgagaactgtaaatggctgcaaatgttcgatgatgtgaggcttgttatcttctgtgttgcggtcagcgactatgatgagtactacgaggatgcaaacggcaatgttgtgaacaagatgatggagaccaggcagctatttgagagcattgcccttcatccgatatttgagcagatggatttccttctacttctcaccaagtttgatatcctagagcagaagatcggcaaatctcctttaacatcatgcgactggttcagcgacttcactcccctggtaagccgcaatctgatcaacggcaccagcaaaagctcgcggggcagctccactggctcgacattggcgcagatggcgggtcactacattgcggtgaagttcaagagcgtattccagtcgttcacggagcggaaactctacgtgtcctacgtgaacgccctggaccaggagtcggtccgctccgcgatccgctatggaagggagatcatcaagtgggaagacgagaagcccgtgtttgggtccagcgagacgacatacagcgaggagccgagctcctactctcactg

SEQ ID NO: 4268 - DNA, 1338 bp, Oryza sativa
atggaggacctcgccctgcccgccgctcctcctgcccccacgcttagcttcacgctcttagccgccgccgccgccgtcgccgaggccatggaagaggctctgggcgccgcgctgccgcccctcaccgcccccgtccccgcccccggagacgactccgcctgcgggagcccgtgctccgtcgccagcgactgcagcagcgtcgccagcgccgacttcgagggcttcgccgagctaggcacttcgctcctcgcggggcccgccgtcttgttcgacgacctcaccgccgcctccgtcgccgtcgcggaggctgccgagccgagggctgtgggggccactgcgaggagcgtgttcgccatggactgcgttccgctctgggggctggagtccatttgcggccgccgcccggagatggaggacgactatgccgtggtcccgcgatttttcgaccttcctctgtggatggttgccggcgacgcggcagtcgacggcctcgaccgggcctccttccgccttccagcccatttcttcgccgtctacgatggccacggtggcgttcaggttgccaattactgcaggaagaggatccacgccgtactgacagaggagctgcgtagagcggaggacgacgcgtgtggctctgacttatctggccttgagtccaagaagctgtgggagaaggcgttcgtggattgcttcagtcgtgttgacgctgaggtgggaggaaatgctgcgtctggagcaccgcctgttgctccagacaccgtggggtcaactgctgtcgtcgcagtcgtttgctcgtcacatgtcatcgtagccaactgcggtgactcgcgtgctgttctctgccggggcaagcagcccctgcccctgtcactagatcataaaccaaatagggaagacgagtacgcgaggattgaggcgctgggtggcaaggttatccaatggaatggttatcgagttctcggtgttcttgccatgtcgcgatcaatcggggacaaatacctgaagccatatataatcccggtccctgaggtcacagttgtcgctcgtgcaaaagacgatgattgccttattcttgcaagtgatggcctttgggatgtaatgtcgaacgaagaggtctgtgatgctgctcgcaagaggatattactatggcacaagaagaatgcggccaccgcatcaacgtcatcggcccaaataagcggtgattcttcagatccggctgctcaagcagctgccgactacttgtccaagcttgccctacagaaggggagcaaggacaacatcactgtcgttgtaattgacctcaaggcacataggaagttcaagagcaaagcatga

SEQ ID NO: 4269 - DNA, 1374 bp, Oryza sativa
atggcggcagcggcggtggcgcggctcactgcggcgacgacgtgccggatgcgcgtcagtggcccggtcactgccgcgacgacgtcggctgcctcgccggtgaccgtcactctgggtgatctgccacagcagaagcgatcggccgccacggcgacgacgacgacgagtagtggtggttctcctgtggtggtggagaagagagcggcggcggcgacggcggcggaggaggaggaggtggaggaggcggcggcggtggcggcgctggcgagcgcgtggcgggaggtkcagggcgccggcgactggaggggcatggtggagccgctccacccgctgctccgggacgaggtggtccggtacggggagctcgtcgcggcgtgctaccgggcgttcgacctcgacccggcgtcgaagcgctacctcaactgcaagcacggcaagaagcagatgctgccggcggtcggcatggccggcgccgggtacacggtcaccaggtacatctacgccgcccccgacgtcgcgctgcccttcggcgtcggcggccgctgctcctgcgccggcaagagccggtggatcggctacgtcgccgtcgcgtccaaccgcgaggccgcccgcctcggccgccgcgacatcctcgtctccttccgcggcacggtgaccggatcggagtggctggccaacttcatgagcgcgctgtcgccggcgcggttcgacccggccgacccgcgccccgacgtgcgcgtcgagtccgggttcctctccctctacacctccgacgacctctccggcaagttcacctgcgggagctgccggaaccagctcctctccgaggtgacccgcctcatcgacaagtacaagcacgacgacgtcagcatcaccctcgccggacacagcatggggagctcgctggcgatcctcctcggctacgacctcgccgagctgggcctcaaccgcggcggccgcggcggccgcggcggcgccatcccgatcaccgtcttctccttcggcggcccgcgcgtcggcaacctcgagttcaagagacggtgcgatgagctccgcgtcaaggtgctccgcgtcgcgaacgcccgcgacccggtgacgaggatgcccggcgtggtgctcaacgaggccgccgctagggttttccgggtcgagctgccgtggagcaaggcgtgctacacccacgtcggcgtcgaagtcgccctcgatttcttcaaggccagccacgcggcgtgcgtccacgacctcgacgcctacataaatcacctcctcgacggcggcgcggcggcgtcggcgacgacgacgaccttggagtcgtggaggtggcagatggcggcgattcgtgcaggcgagtggctgcagacgctagggatttga

SEQ ID NO: 4270 - DNA, 2394 bp, Oryza sativa
atggccatgtttgggacaagaagctactctgtgtttggggacatacttgatgcctttctgattctacttgtattgtcaacatgctgtttgtcaagcacaataacaacggacagcttgttaccaaataaacaaatttcagatgggcagaccattgtgtctgcaaatgagacattcactctcggcttctttagccctggaacttctacatatcggtatgttggtatatggtacagcaatgttccaaataggacagttgtatgggttgctaatagaaacaatccggttctagatacttctggaatccttatgtttgacacaagtggaaatctggtaattttagatggcagaggcagctcgttcacagtagcttatggatcaggagcaaaagataccgaagcaactatactggattctggcaaccttgtcttgaggagtgtcagtaaccggtcgaggctgagatggcagagctttgactacccaactgatacatggctccaaggaatgaatcttggatttgttggtgcacaaaaccagttgctcacttcatggaggagctcagatgacccagcaataggagactattcttttgggatggatccaaatgagaagggtgatttttttatctgggagaggggcaatgtctattggaagagtggactatggaatggccaatcgtataattttaccgagtcagaaagcatgagtttcctatatgtttccaatgacgccaggactacgctcagttactcttccataccagctagtggaatggtaagtggcttgtgcttgggagctggccagagggaagctgcaaagcatatagtccatgtggagcttttggcatctgtgccggaaatcaagactggcaaaaccgttgcaaatgcccaaaaggatttaatccaggagatggggttggatggtctagtggagataccaggagaggatgataagtgcagcttgtggtatggaaatattatgaacttgagggagggggagagtggtgatgcggtaggaactttctatcttcgtctggctgcctcagagttggaatcaagaggtaccccagtggtcttgattgcagctacagtttcttctgttgcatttcttatttttgcctcccttatttttctttggatgtggaggcagaaaagcaaagcaaagggggtggacactgacagtgcaataaagctttgggagagtgaggagacaggttctcactttacctcattttgcttctctgaaatagcagatgcaacatgtaaattttcgcttgaaaataaacttggagaggggggatttggtcctgtctacaagggcaacttacctgaagggcaggagattgctgttaagagacttgcagcacattcaggacaaggtctacttgagtttaagaatgagatcatgctgatagccaaacttcagcacagaaacttagttaggctcttgggatgctgcatccaaggagaagaaaagatacttatatatgagtacatgccgaacaaaagtttggattttttcctctttgctgggcaggtcatacagtgtgggttggaaggtataattgaaggtattgctcaaggtctcctttatcttcacaagcattcgaggttcaggattattcatagggacctgaaagcaagcaatattctgttggacatcgatatgaatcctaagatatctgattttggtatggcaagaatatttggttccaaagaaacagaagcaaacaccaaccgggttgttggaacatatggatacatggctccggagtatgctatggaaggcattttctcggttaagtctgatgtgtttagctttggagtcttgcttctagagattgcatgggaactatggaaagaaggaaggtggtccgagctcgctgatccatccatatataacgcatgtccagagcataaggagagtcccatcaatcgacctaccatgaccgagataatttcagcgcttgataatgaaagcaccaccctgcctgaaccgaagcagcctgccttcgtctccgctgggatttggactgaagctggtgttcacggaggaacacactccataaacggaatgacaatttccgacacgcaagatggtccaggcaacaagtgtcgcgatggtgtcaaaaccccgcctgctggctcgtgcaaccttcaaacgagagttacaaaaccagagattaaaggactcttcgctcacgggcaggcattacggcaacccaatcttggagagaacgaccccaccatagttggcaagattccgggcaagcgaccagaatgtgatcgatgctttcgtcgtgttgatcacagagcacacaacgataaggatgcggcaaccctcgagatcacagacggtctgtcgtccaacatctcttcatcgcgaccagccaaatga

SEQ ID NO: 4271 - DNA, 1782 bp, Oryza sativa
atggcgaatcattcacaattaattgcgcaagattcaatgaagaacaaccttgtgaaaaacaacatgctgaaagagttctacatcccaacttatatattcgtgccagagtctccagtagagaaggtttctcaaatacctagttgtccagtgattgtttttatcaacaccaaaagtggtggccagctgggacatgatttaattgtcacgtaccgtaagctgctcaacaattctcaggtgtttgatctgcttgaggaagctccagataaggtcttgcacaaactgtatggaaacatggaaaggctaatgcgtgatggggatactgttgctgctgaaattcacagaagattgaggctaatagttgctggaggtgatggtactgcaggttggttgcttggagttgtttctgatcttaagctagtacatccaccacctgttgctacagttcctctgggaactggaaataacttgccatattcttttggatgggggaagagaaatcctggaacagatgaaaagtcagttctatcgtttctacagtcagtaagacaagcgaaagagatgaaaattgatagttggcacattgtcatgaaaatggaaagcccaaaaagttctacttgtgatccaattgctcctttggatttgcctcattcgctgcacgcgtttcaccgtgtgccaaacaatccacaagataaggaatattcttgcacgtttcgtgggggattctggaattacttcagtatgggaatggatgctcaggtgtcatatgcctttcattctgagaggaaattgcatccagaaaaattcaaaaaccagttgtctaatcagaaaacatatttgaagctggcatgcacgcaaggatggttctgtgcatccctatgtcatccaatgtcacggaacattgcgcacctttcaaaagtaaagataatgaagaaatctggaaaatgggaaacattggaaattccacagagtatccggtccattgtttgtctgaatttacccagcttctccggtggactgaatccatggggaacaccaagtgagagaaaacaaagaaaaagggatttagtaatgcctccacttgtggatgatggtcttctggagattgtgggttttaaagatgcttggcatggacttgtgttgctatctccaaaaggccatggcactcgtcttgctcaggctcatcgcgtccaattcaaattccacaagggtgcaaccgaccatgcttacatgagacttgatggggaaccctggaatcagcctcttccgaaggatgacggcaaggtcttggtggagatctcacatgccggccaggtgaagatgcttgctaccaaaaactgcattgctaaaggcatccatgaggcactgtctatgtcaacggttcatccagagtccagctcctccagtgacgatacggatgacgatgatgatttcgcggaggagaggaagaactttggtgctgcattgtcgtttcggcatttcgatgggctgttggttcacgactgtcttcgaattatatttgcagagaactatctcctccagaacttgttcgattcgttgcttgttgattttcccaatccaaagacaaatagttcaggccgtgaaactctaaaagtgtgcctgttgctttctcctaagaaactgttggacattagcaaggccattgacttgttcccaaaatggattattgcgtctctgtgcccaatagtcacctacagaaacagaaagaggaatgagaatctgatgccggacttgctgataaagcatatgaggatgctagaatga

SEQ ID NO: 4272 - DNA, 3570 bp, Oryza sativa
atgaggctgagcaggctgtacagtttcgcgtgcgggcggaggccgacggcagtcgacgacgaaagctccagcaggatcggcgggccggggttcacgcgcgtcgtcaacgccaacggcggcggcggcatcccggagtacgggtaccgctccaactcggtgtcgacgaccaagtacaacgtggtcaccttcgtgcccaagtccctgttggagcagttccgcagagtggccaacatctacttcctcatctccgcctgcctcacctacaccaacctcgccccctacacctccgccagcgctgtcgcccccctcgtcctcgtcctcctcgccaccatggtcaaggaggccatcgaagactggaggaggaagcagcaggataccgaggtaaacaacagaaagacaaaagtgctccaggacggtgctttccattctaccaaatggatgaacctccaagttggtgatattgtcaaggttgaaaaagatgagtttttccctgctgacctaatcctcctctcatctagctacgaagacgccatttgctatgttgagaccatgaacctggatggggagacaaatctcaagctcaagcaatctctagaggcatcatccggcttgcaggaggatgacagcttcaatagcttcagggctgtaataaggtgtgaggacccaaatccacacctctattcctttgttggcaacatcgaaatcgaagaacagtatcctctgtcaccccagcagatccttctcagagactcaaagcttcgcaacaccgagtatgtgtacggtgtggtcatcttcacaggccatgatacaaaggtcatgcagaatgctatgaaagccccatccaagagaagtaagattgaaaggaagatggaccggatcatctacttgcttttgtctgcacttgtcctgatttcagtcatcggatcggttttctttggcatcacaaccagagatgacctacaagatggcaggccgaaaagatggtaccttaggccggacgactctaccatctacttcaagccaaccaaagcagccatatcagcaatacttcatttcttcacagccatgatgctatatgggaacttcataccaatctctctgtacatctctattgagattgtcaagcttctgcaggctctgttcatcaaccaagacattcatatgtatcatgaggagaccgacacaccggctcatgctagaacatccaacttgaacgaggagttgggtcaagtggacacgatccttacggataaaactgggactctgacttgcaattccatggagttcatcaaatgctcaattgccggaactgcgtatggccgtggtatcactgaggtggagagagcaatggcgaaaagaaaaggttctcccttgatcgccgacatggccagcaacacccaaggctctcaagctgcaatcaaaggatttaatttcacggatgagcgtgtgatgaacggtaactgggttagccaaccccactctggtgtgattcagatgttcctcaggttgttggccgtttgccatacgtgcatacccgaagttgacgaagaatcaggcacgatttcttatgaagcagagtcacctgacgaggctgcttttgttgttgccgcacgggagctcggtttcacgttttaccagaggacacagaccggtgtttttctgcatgagttagatccctcgtctggaaaacaagtcgacagatcatataagctcttgcatgtccttgagttcaacagtgctcggaagcggatgtcggtaatagttaggaatgaggaggggaagatctttctctttagtaaaggcgctgacagtgtgatgttcgagaggctatcaagtagtgattgtgcgtacagagaagtgacccmggatcacataaatgaatacgctgatgctggtctgagaacacttgttctcgcataccgccaacttgatgaggccgaatatgcgaatttcgacaggaagttcactgcagccaagaactctgtcagtgctgatagagatgaaatgattgaagaggctgcggatttgcttgagaggaaattgattcttcttggtgctaccgctgtcgaggataaactacagaagggggtgcctgaatgcatcgacaaacttgcacaagctggtatcaagatatgggtgctgacgggcgacaagatggaaaccgccatcaacatcgggtatgcgtgcagtctactgagacaaggtatgacgcagataaccatcacactggagcaaccggatatcatcgccctggagaaaggcggtggcgacaaagcggctgttgcgaaggcatcaaaggaaaacgtggtgaagcaaatcaacgagggaaagaagcggatagatggatcggtagttggcgaagcctttgctttgatcatcgatgggaagtcgctgacatatgccctggaggaggatgccaagggcgcgttgatggaccttgcggtgggctgcaagtcggtgatctgctgccgttcgtcgccgaagcagaaggctctggtgacgaggctggtgaaggagagcacggggaaggtgagcctggcgatcggggacggcgccaacgacgtgggcatgatccaggaggcggacatcggggtcgggatcagcggcgcggaagggatgcaggcggtgatggcgagcgacgtgtccatcgcgcagttcaggttcctggagcggctgctgctggtccatggtcactggtgttacagcaggatatcggcgatgatctgctacttcttctacaagaacatcacattcggcgtcaccctcttcctgtacgaggcctacacctccttctccggccagaccttctacaacgactgggcgctgtcgacgtacaacgtcttcttcacgtcgctgccggtgatcgccatgggagtgttcgaccaggacgtgtcggcgcgcttctgcctgaggtacccgatgctgtaccaggagggcccccagaacctgctgttccgatggtcgaggctgctggggtggatggcgtacggcgtggccagcggcgtgatcatcttcttcctgacgtcggcggcgctgcagcaccaggcgttccggcggggcggcgaggtggtggacctggccatcctgagcggcaccgcctacacgtgcgtggtgtgggcggtgaacgcgcagatgacggtgacggccaactacttcaccctggtgcagcacgcctgcatctggggcagcgtggcgctgtggtacgtgttcctcctcgcctacggcgccatcaccccggccttctccaccaactacttcatgctcttcaccgacggcctggccgccgcgccctcctactgggtggtcaccctgctcgtccccgccgccgcgctcctcccttacttcacctactccgccgccaagacgcgcttcttccccgactaccacaacaagatccagtggctgcagcaccgtggctccaacgccgacgaccccgagttcggccacgccctgcgccagttctccgtcaggtccaccggggttggcgtctccgcccgccgcgacgccagggacctccacctccctcctccttcccaatcacattcacattcacaaaccacatctacctag

SEQ ID NO: 4273 - DNA, 1563 bp, Oryza sativa
atgcgctcccgatctctcctcctcgtcgccctcgccacccttcttctccacgcctccgcctccgcctccgacgacgacctcgactacctcatcgacaacgccgacgacatccccgccaacgaccccgacggctggctccaggagggctcccccgacgacgacgacgacgacgacctcttccaccatggccaggcccaggaccatcccatagatgagacccacgtcttcctcctctccgccgccaacttctccgacttcctcgcctcccaccgccatgtcatggtcgagttctacgccccctggtgcgcccattgccaggcgctcgccccagactacgccgccgccgccgccgamctctcccctcttgcccatcaagtcgccctcgccaaggtcgacgccaccgaggacactgatctcgcccagaagtacgacgtccagggcttccccaccatcctcttcttcatcgacggcgttcccaaggactacaacggcgcaagaaccaaggaagccatcgtgtcgtgggtcaacaagaagctagctcccggggtgcaaaacatcaccaccgtcgacgaggcggagaagatactcaccggggaggacaaggccattcttgccgtcctcgactccctatcgggtgctcacagtgatgagattgctgctgcttcgaggctggaagatgctatcaacttttaccagacttccaatcctgatgttgccaagctttttcaccttgacccagcggccaagcgcccgtccttagtcctgctcaagaaacmagaaggaggagaaattttactatttgttgttgcaaacgaatcgtcgaaatttctgcccatctttaaggaagcatcaaaatcattcaaggggaagcttttgtttgtctttgtggagcgtgacaatgaggaagtaggtgaaccagttgccaactactttggtattactggacaagagaccacagttcttgcttacactgggaatgaagatgctaggaattttttccttgatggtgaaatatcgagatttgctgaggatttcttagaggaaaagctcacaccgttctacaagtctgaacctgtacctgaatctaatgaaggagatgtcaaaattgttgttggaaaaaacctagatcagattgttttggatgaatcaaaagatgcccttttggaggtatgttcttcctggaagatatatgcaccatggtgtgggcattgtcaggaactggagcctacctacaacaagctaggaaagcatctccgtggcattgactcccttgtaatagctaaaatggatggcactgccaatgagcatccacgtgcaaagcctgatggattcccaacgatcctcttttatccagcaggaaagaaaagttttgagcctattacttttgagggggaccgtacggtggtggagatgtacaagtttatcaagaagcacgctagcatccctttcaaactgaagcggccggattcgtcagcaacgaaaacagagaaggatcagagcacagcttcaactaatttgaggggggagaggagttccggtacaaatttcaaggatgagttgtag

SEQ ID NO: 4274 - DNA, 1137 bp, Oryza sativa
atgtcttcttcactccagtgccccgacgacccggcgccatccatgaacgtggaggccgtcctccacatgaaggaaggtgtcggcgagaccagttacgccaagaactctacgcttcagaagaagagcatggacaccgtgaagagcctcgtgacggagtccgcgagggacgtgtacgcgtcgctcaagccggaaaggttcaccctggccgacctcggctgctcgtcggggacgaacgctctcggcatggtggaggagatcgtcaggagcgtcgccgaggtgtgccgcgggtcgtcgccaccgccggagttctcggtgctcctcaacgacctccccaccaacgacttcaacaccatcttctcccgccttcccgagttcaccggcaagctcaaggccgacgccgacgccgacgccggcgacgacccgatggtgttcctgtccggcgtccccgggtccttctacgggaggctgttccccagcaagaatgtgcacttcgtctgctccttctccagcctgcactggctctctcaggttcctcccggtcttttggatgagacgaacgggcccgtgaacaaggggaagatgttcatatcgagcacgagccctccagccgtggcagcggcgtactcgaggcagttccggagagacttcagcctgttcctcaggtcacgcgccgccgaggtcgtcgccggcggccggatggtggtctccatgctcggcagggagggcgagcgccacgcggacaggaacacgaccctgctgtgggatctcctctccgagtcgttcgccgcgctggtgtcacagggggtggtggagcagggcaaggtggacgcgtacgacgcgccgttctacgcgccgtcgataggggagatcgaggaggaggtgcggcggcaggggtcgttcaggatggaggtcgcgcgggcgtacgaggcgagcctgagcggcagcggcgacgcgaggaaggacggaaggacggtgtcgatggcggtgagggccatccaggagtccatgctggggcaccacttcgggacggagatcgtcgacgcgctcttcgccaagtacaccgagctcgtcacggcgaccatggagagggaggaggtcaggagcgtccagattggagtggtcctcacgaggctgtga

SEQ ID NO: 4275 - DNA, 1520 bp, Oryza sativa
atggcaacagcaaatcttctctacgctgcattgcttgtgccaacggtgctgtacctcgccgtcacccggcggcgcagccgccgcttgccaccaggaccggtggggcttcctctcgttggcagcctcccattcatcgacccaaacttgcacacctacttcgctagcctcgccgcgaagcacgggcccatcctctccatccgcctcggttccaaggtggacatcgtcgtcaattccgcccagctggcccgcgaggtgctccgcgaccaggactccgtcttcgccaaccgggtcatgctggatgccggcgacgccgtctccttcggcggcgcacagaatatcgtgggcaacccgctcgggcctatgtggcgcctgctccgccgcgtctgcgtccaggagatgatgagccccgcggggctcgccagcgtgcacggcctccgtcggcgcgagttcaggtccaccctccggtacctccactccaagcccggcgagccggtggacgtcggcgcgcagatgttcctgaacaccatgaatgtgatcacgggcaccatgtgggggggaacgatcggaagcgagagcgagaggtcggcggtggggagcgagttcaggggtctcgtcgcagaggtcaccgagctcctcggaacgcccaacgtctcggacttgtttccggtgctgaagccgttcgacctgcagggtatccggaggaagatggagcggctcaggtcgcggttcgacctgttgttcaccaagatcatacagcagcggatgagatcccagcaagacgggggcgagatgacaacggacttcttggagtgcttgctcaagatggaaaaggaaggtagcgacggcaaaacaacctttaccatggacaacgtaaagggcttcctcttggagatggtggtcggcgggacggacaccacgtcgaacagtgtggaatggattatggcggagttgctgcagaaccctcaggttctgaacaaggtgcagcaagaactcgacagcatcgtgggccgggacgccgtcgtggaggagtcccacctcccgcagctccactacctccgcatggtgatcaaggagacgctccggctgmacccgccggtgcccctcttggtgccgcacagcccgagcgccgccgcgacggtcggcggataccacgtccccgagggctgccgcgtgctcatcaacgtctgggcgatccagcggaacccactggtctggaacaagccactcgatttcaacccggataggttcgccagggacggcggccacaagggggacttcaccggtagccagctggactacctcccgttcgggtccggccggaggatgtgcgccgggatggccatgggggagaaggtgatggtgtactcggttgccatgctgctgcaggcgttcgactggaagctgccgcagggcgtgcagcttgacctgtccgagaagtttgggatcgtgatgaagaaggccacaccgctggtggcaataccgacacctaggttgtctaagcctgaactttattattcgtg

SEQ ID NO: 4276 - DNA, 1116 bp, Oryza sativa
atgagcaccacggccaagttcttggcgctcgccgtcttcgcggcggcggcgatcctgtcgctggactcgcggagcgacgtgaggcagctggagataagggacggcgacgtcgagctgatccctctgctcgacggcgccgcggggccggagagcatagtgttcggcgacgccggcgatgggccgtacacgagcgtgtctgacgggaggatcctcaagtggctgccgccgccggagcgccggtgggtcgagcactcctgctccgtgccggagctgttggatagctgcagaggatccaaggacacgaaacgggagcaggagtgtgggcgtccactgggcctcaagttcaatagcaagactggtgagctgtacgtcgcagatgcgtaccttgggctgagagtggtcagcccgggtgagaacgtgtctaggccgcttgttcctaagtggacagaaagcccattcagcttctccaatggcgttgagattgaccatgaaactggagtaatctacttcaccgagaccagtacaaggtttcagagaagggagtttctaaacatagttataacgggtgacaacactggaagattattgaaatatgatccaaaggaaaacaaggttgaagtcttagttgatggcctatgttttcctaatggtttggctatgagcaacgatggttcttatttgctacttgcggaaaccacaacgggtaagatcctaagatattggattaaaacaccaaaagcatcaactattgaagaagttgtgcaactacatgggtttccagacaacatcaagatgagtcctagaggagggttttgggttggtcttcatgccaagagagggaagatcgctgagtggtcaatttcttacccttggctaaggaaagtaatcttgaagctaccagctcaacgcattcaacgcatcacatcgttcttgacaggatttggtcgtcaggtgatagctttgaggttgagtgaggatgggaagaccatagaagcaatgagtgttcatggtgatgttaggaagttgttcaagtctattagcgaagttgaagaaaaggatgggaacctctggataggatctgttttgtcaccttttcttgggctttatcgtatatag

SEQ ID NO: 4277 - DNA, 1155 bp, Oryza sativa
atggccaagtggaggtcgtggatgccggcgacgccagcgggtggttccggtggcggcgctaacgacggcggaggtgatggagaagacaagaagaagagcggtgaggtggcggaggcggtgatcagcgtgccggtgcactgcgacggctgcgcccggaagctgcgccgctcggtgcagcgtcttgatggtgtggaggaggtgaccgtggattgccggaccaacacggtgatcgtgaggggccccaaggcagcggtggacccggctgggattgtggaggtcttggacaggaggaccgggaagaaggccctgcttttgagctcgttgccgtcggccaacctgaagccaccgctgtcaccggagaagaggagttctgagacggcgaagaaagatgctgcagagcaggacatgggcaaagagatgtcagaagaggacatggacccaccggaaatggtagtggtgatgaggatagacctgcactgtgaggcatgctgcgaggagatcaaacggaggatactcaagattaaaggagtggaggaagttacgccgcatatgaaatcgtcccaggtgatggtgagaggaaaggttgagccagcaaccctagtagggctcatccacaagtggacaggaaggagagccgccattttcagggcagaaccacagcatccgctgcccccaccatctgagtctccgccaaaggtcgacgatgacaacgagcctccaaaggtagccggaagtactgagccggccgaggaggaggagacaaagcaaggaggagacccatcaccatcagacgatgcgcaggagaagaaggaaggggaggaagcagatcagatgaaggatcagaaagaagagccggaagagaaggagaagaaggaagaaccagatgagaagaacgaaggaggcgaagctgatgacctgaagcccctaacggaggacgacgcaagctacaatggcgtcgcggaagagagccacagcacgaaggatcacctgttcagagttgctctcccgagatcagttgtcgcggttgcgccgccggagagtgagaagatggccatgaacagcctctgctacagctactactactacccggcatatccgtatccgtgtcatcagtattatcaatatccgcagtcagaacatttacgccgctggtaa

SEQ ID NO: 4278 - DNA, 1404 bp, Oryza sativa
atggcggtgtcgtcgtcgtcgctgctgctccgccgcggagccaccggcggcgccgggaaacggtggggtccgggggargcgttscggaggctggtgtcgtcgtcggaggcggccccggcggaaaaaggtttccggcgcggttgcccsccggtgatgccggccgttcgagcaccggcccaggccgttacgsccgggtggagcggcgatgagatcctcgcgaagaggaarcagtttcttggatcgtctgtgttctactactaccagaagccgctgaacattgtggaagggaagatgcagtatctgtacgatgagaatgggaagagatacctcgattgcttcggaggcatcgtgacagtttcatgcggccattgccatccggatatcgtgaacgctgtggtggagcagaccaagctgctccagcacacgaccaccatatatttgaatcaacccatcgtcgagtttgcagaagcgctcgcgtccaagatgccaggaaatctcaaggtggtgtattttgtgaattctgggactgaagcgaatgaactggcgatgctgatggctcggctgtacagtgggaatctcaatatgattgcattgagaaatgcttatcatggtggtagtgctggaacaataggattgacgggtttgcagacgtggaagtacccaatccctcagcttatgccaaggaagtcgaagaaccaaataaattatggtacctccggaagggttgcgggtttcattgctgaaactttccaaggcgtgggaggtgcagttgaactagctcctggatatttaaagttagcttatgacactgtccggaaggctggtggtgtttgtatagctgatgaagtccagagtggatttggtcgaactggaagtcactattggggatttcagacgcaagatgttattcctgacattgtaacaatggcaaagggaattggaaatggtctaccattgggggcagttgtaacaacacccgagattgcaaatgtgctggcgcaaaaaatccaatttaacacatttggtggaaaccctgtttgctccgttggtggacttgctgtgctcaaggttcttgacaaggagaaacgccaggcacattgtgctgatgttggatctcatttggtgaatcgtctaaaagagctccagcaaaagcatgaaatcattggagatgttagagggaggggattgatgcttggggtggagcttgttaccgataggaaggagaagacacctgccaaggccgagaccaatttattgtttgagaaactcaaggatctcaacattttagttggaaaaggtggtctgcatggtaatgtcttcaggataaaaccaccaatgtgctttacaagggatgatgcagattacctggtggatgccatggactatgcaatgtcagggctctga

SEQ ID NO: 4279 - DNA, 1665 bp, Oryza sativa
atgtcgtcagccggtatagccacactgagccccctgctggaccagttttgttttgcgccccatggcgagccccggttgcagcagctggattctattgtcatttttcttgccatgccaggggtggcacccatgccaatgcgtgtcctgcactcagactctgttgcctcggtcaagctccgcatccagcagttcaagggctttgtcactaccaagcagcggctggtgttcagtgggcatgagctgtcactaaacaactcccatgtcagggattatggacttaccgatggaaatgtgcttcatcttgtcgtgcggttggctgacctccgtgcgataagcattgagactgccaatgggaagaaatttcagttccaggtggagagttgctgcaatgttgggtatctcaaggacaagctctcagctgagagtggacagcaacttgggagtctcaaggaccaaaggcttgtgtttgacgatattagcaagaagggtgctgcagttatccacttgttcatccgcaggccagcaaaggttcagacacagcagggtgataaggaaactgttgttacagttgttactcccaaagacaatgataacctccaaacagatgctttgaaccttgcgaaaccagctaagggtaaacctgctccagttgagccaatcattgctaatggaaaggtgaaattgtctcctgctgtgatggaaatgatctactcaacaatttctggtatagaaaacgggtaccttcccgtgatgtcaacagagggttcagggggagtctatttcatgaaggactcttcaggtgaaagcaatgttgcagtattcaagcctattgatgaggaaccaatggcaaagaataatcccaggggccttcctttgtcaactgatggtgaggggttgaaaaggggaacgcgagtaggggaaggtgcattaagggaggttgcagcatatattcttgaccatccagtttatggatgtaaatcgtgtgatgttcctggattttctggtgtaccacccacagcgttggtccgttgtttccatatggggaagggatctaataaggttggatcattgcagctgtttgtagataacaatggcagttgtgaggatatgggccctcgagctttcccagttaaagaggttcagaagattgccatactggatattaggttggcaaatgctgatcgtcatgctgggaacatattagtgtgccaagatggagaagatcacttgaagttgattccaattgatcatgggtactgcctgccagagaagtttgaagattgtacctttgagtggctctactggccccaagcccgcgaacccttcggtccagaaaccgcagcatacattggatcactagatgctgacaaagacattgcgcttctcaagttccacgggtgggcgctatctccccagtgtgcccgagttctgcgcatcagcacaatgcttttgaagaagggggcagagagaggcctaacgccttatgacatcggcagcatcttatgcaggcaaacagtcaaaaaagaatctgaaatcgaggccatcatagaggaagcagaggatgccatccttccaggaactagtgaggagacattcttggagaccatctcggagatcatggactttcaccttgataagcttgctgtgaagttaaagaagttctga

SEQ ID NO: 4280 - DNA, 1098 bp, Oryza sativa
atggcgaacaaacagtgggccgcaggcagcgtcgtggctcgcgcacgtccgtgcgtgcgtgtgcgcacgctgcgcggcaggcgcgccggggacggccgtgcgcctgacgcatgcagatcagatacgttagttaagaatgtttgccacgatagcgtgacaggcagcgagcattccaaaatggaaaaccaaagtggttggttctacgtgaccatctcgaaagaaagccaaaagcgtcgacggaaacgagaggcgcaggagttccagtccatcccggggctcgccgggcggctgttcggcggcgcggcggcggctgacatccggcgcgcgcaggcgcagcagggcccggcgtcgcggtgcggcgggataccgtcgccggaggcggtgaagtgcccgcggtgcgagtcgaccaacaccaagttctgctactacaacaactacaacctctcgcagccgcgccacttctgcaagagctgccgccggtactggaccaagggcggcgtcctccgcaacgtccccgtcggcggcggctgccgcaagaccaagcgtagcggcagctcgtccgctgcgtcctcggccccgtcgacgccgacggcggcaactgacaacgccaagaaccagcggcgcgcctcggcgtcgtccccacgatccagtagcggcggtagcggcaacacgagccccacggccgccgcggcgacgaccccgacgacaccggccacgccgtcgtcgaacaccatcgccgtcataaaccacgcgacgacgacgacgacgacgacgaaccccttcccgacagacgtgccacctccggcgccgattttcgccgaccaagcggcagcgctcgcgtcactgttcgcccctcctccgccgccgcctctcccggtgttcagcttcgcagcgcaggcgaagaccgaggacgggattgcctccgttctactcgccggacagacgacggcgcccactgccgccaccgttgccgacatgacgccgttcacgtcgctggacgcggggatcttcgagctcggcgacgtgccgccggcggcgtactggaacgccgggagctgctggacggacgtcccggacccgaatgtctacctaccctag

SEQ ID NO: 4281 - DNA, 1500 bp, Oryza sativa
atggtgcaacaacagcagcagcagcagcacagaatctacatcctacagttcaggaagggcgagcaggatcaggaggtcgcatgcaaggtctcgacgccgcccaaggccggcaccggccgccgtgtcatgtactactaccacgactacggcggcggcggcgccggcaagaacggcaaggcggcgcagcctagggcgttcagcatgcgccgcttctttgggctgctgctgctgtcgttcgtctcggttgggacgctgttcgtggcgcccgtgtcgttcttctccttcgkgtactccgacgagctcgtgtcgtcgtcgtccgggaacgcgacggcggcggcggtggaggaggagaggatacggccgtacacgcgcaagtgggaggcgaacgtcatggcgacgatcgacgaggtgcggctccgtcgcgtgcccgccggcggcgcggcgcggtgcgacgtcgtgcacgacgtgcccgccgtggtgttctccacgggcgggtacacgggcaacgtgtaccacgagttcaacgacgggatcctgccgctgttcgtgacgtcgaaccacctccgccgccgcgtggtgttcgtcatcctcgagtaccacgactggtggatgaccaagtacggcgacgtcgtgtcccgcctctcggcgttcccgccgatcgacttcaccgccgaccgccgcgtgcactgcttcccggaggtgatcgccggcctgcgcatccacggcgagctcaccgtcgatcccgagaagacgccggagggcaagagcatccgccacttccggacgctcctcgacgacgcctaccgcggccgcatccagtacctcgagcggctcgagcgccgcgccgctcgcagccgcaagcgccgcgccgccgcggccaagcccaccaccacctccatcgccctgccgatcatggcgcctccggcgaagcaggcctcgccgtcgccgccggacaggcctcgtctggtgatcgtgtcgcgcacggggtcccgcgtgatcgagaacgaggcggacgtcgccgcgctcgccgcggacgtcggcttcgacgtgcgcgtggtccgccccgagcgcaccaccgagctgtgcaagatataccgggagctcaacgccagcgacgccatggtgggcgtgcacggcgccgccatgacccacttcctcttcatgcgcccgggcaaggtgttcgtccaggtcgtgccgctcggcaccgactgggccgccggcgcctactacggcgagccggcggcgcgcytcggcctccgctacgtcggctacaagatcctccccgaggagagctccctctcccgcgagtaccccaccggcgaccccgtgctcaccgaccccgccggcgtcggcaagcgcggctgggacgtcaccaagaaggtctacctcgatcgccagaacgtccgcctcgacctgccacgcttcagggaggtgctcgtcggagctcaccggcacttggtcgccggcaagcggcggcgccggcaaagagagagccagtga

SEQ ID NO: 4282 - DNA, 3933 bp, Oryza sativa
atggcccagcctcgacggcgcggcggcggaggccacaacaagtgcccgcgcccggccctgctgccggcggcggcgctcctgctcttcctcctcgccgccgtcgcgctgctctacgtctccccgccgccgctcatcgatcacccggccctcgcttcctctcgccgccgctcccctcatgcccccctgctgaacagctccggcggcggaagcacggtggtgtccgagcacagcgagatttcgcgcgttccgataagcaaagaggcagatggcctttggggttctaagtttgcgagcagattctatgggtgcagcaactcaagcagcaggttccttggttcaagtgttatcacgcaaccagaccgttatttgatgatcgttacaagtggaggcctcaatcaacagagaacagggataattgatgctgttgttgctgcacgtatcttaaatgccacacttgttgttcccaaattggatcaaacatctttctggaaagatgcaagcaatttctctgaaatttttgacgtcgactggttcatctcgaatctatcaaaggatgtaaagattgtgaaagagcttccagagataggaggcaaactgcggactcctcatagaatgcgtgtgccccgaaaatgtactcagagatgttatgtgaaccgtgtgttgcctgcacttcttaagaaacatgttgttcggctgacgaaatttgattatagactagcaaacaggttggacacagatctgcagaagctgagatgcagagtaaactatcatgggttgagatttactggcctaatagaagaaatgggtgaaaaattaatacaaagaatgagagagagaagcaaacattttattgctcttcatttaagatttgaacctgatatgcttgcattttcggggtgctattatggtggtggagaaaargaaagaaaagagcttggtgcaatacggaagagatggaaaaccttgcatgctatcaaccctgagaaaggaagaaggcaaggtagatgcccattgactcctgaagaggtggggctgatgttgagggcactgggctacagaaatgatgttcacatttatgttgcatctggagagatatatggcggggcaaggacattagcacccctcaaagcgttcttcccaaatctccacacgaaagaaacaatatcaagcaaagaggagctggctccattctctaaatactcatctcgcatggctgcacttgattttattgtatgtgatggaagtgatgcttttgtgactaacaacaatggtaacatggctaaaattttggctgggcgaaggagatattttgggcataagagaacgatccggccaaatgctaaaaggctctattccttaatttcgaacagaagaaacatgtcatgggattcattctcctcaagagtgcgcatggttcagaaaggatttatgggagagcccaaggaactcaggccaggaaggggagaatttcatgagaacccttctacctgtatatgtgaaaaaaccgttagcaaaacagtagccaaatctaactcccaatctgagcaagtcttaagtaatgatactgagagaggaatagccattcaaactgagcaagtctcgagtaatgatactgagatgggaatagccactagtgagcccacagttcctgatcatactgatgaagaggcaggtgaatccgaggcagatgaagatgctcctggagagaaagaggagataattgatcctgaagcggatgatgatgcgttcttcgggatatcgtatggttttgttgttactgaactaacttttctggagtctgtaacctccatggacgtaaataaccggccaaacaaacagaggtctcacctctcaacaagtcaagcctctgaagcttttgatcccttcacctcgcactcgcagcagcagcaggctgtactgaccaaccaccaagaactgcaagaacctattgccgtgctgcatgggccatccaccggcgacctcaccggccggcgccaaccgccggcgtcaagcgttaaggtcagcgaccgatatgttgagattaaaaatggcatatttgagcttacgctgtccaaccccgacgggatcgtgaccggcgtccggtataatggtgtggacaacttgatggagattcttaacaaagaagacaacagagggtactgggaccttgtttggagtaaactgggagaaagaactggcatatttgatgtaataaaagggacagagttccgaatcatatatcaggatgaaaaccatgcagaggtctcgttcgttagaacatgggatccttctctggaaggcaaagctgttcccttgaacattgataagagtttgcygaattatgctamatyttacmctgaatktctgaatccattactttggtgcaaattcaggtttcattacatggcattagctgacgacaggcagagaataatgccgatgcctgaaraccgagtgccgccccggggacagcaattagcataccctgaagctgtccttcttgtggacccaataaatcctgacctaagaggagagatcactccgagtgacgagttccgaacaggaggtcccgtcaagcagaacttgacctctcatgttgggccaactatgctggctatgtttcttagcggtcattatgctggggatgaccttacacccaagttcttgactggtgaatactggaaaaaggtccatgggcctgtcttcatgtaccttaactccagttgggatggaagtgacccaactctactctgggaggatgcaaaagttcaggtgataacattcaggttgattcttattgacagtacaagtgttatgaacacggcacaaatgatgattgagaaagagagctggccgtactgttttgcactgtcagatgattttcagaagactgagcaaagaggttgtatctctggtagattactcgtccgagacaggtatttagatgatgcagatctttatgctacatcagcttatgtaggcttagctctaccaggagatgttggatcctggcaaagagagtgcaagggataccaattctggtgtagggcagaagatgatggaagcttttgcataagaaacattgtagctggagactacaacctttatgcatgggttccaggatttataggggactacaaactggatgctaagctaaccatatcttcaggggatgacatttatctgggtgaccttgtgtatgaaccaccaagagacggtcccacgatgtgggagatcggaatacctgatcgatccgcctctgaattctttgttccagaccctaatcccaactatgtgaataggttgtatatcaaccatcctgacagatttaggcagtatggactttgggaaagatatgcagagctgtatccagacggtgatctggtatacacaattggccagagcgactataccaccgattggttctttgctcaagtaaacagaagaactgatcagagcacctaccagccaaccacatggcaaataaagttcaatcttgacagtgtcagtcctaacagcacatacaaattcagagtggctcttgcatcatccgcaaatgccgagttgcaggttcgtttcaacgatcaggacagaactgctcctcacttcacaactgggttgattgggaaagacaacacgattgcgaggcacgggatccatgggctgtactggctgttcaacatcgatgtgagtggagcttggcttgttcaagggatgaacaccatctacctgaagcagcccaggaaccagagtccatttcagggactgatgtatgactacctgagaatggaagaattaaggtctcccctctcaacaagtcaagcccctgaagcttttgatcccttcacctcgtactcgcagcagcagcaggctgtactgactactgaccaaccaccagtttcggcgccattgctgtcctcctccttggcttga

SEQ ID NO: 4283 - DNA, 2289 bp, Oryza sativa
atggccatagctcgccgggccgctgccactatccttgatggagagggaatggagctgtggatggatgaagaagaggagtggaggggccttggaaggggatttttcccagatgtccctccttcatactatcttggtgtgcccaattccaacaattcatcttatattgatgagttatcaaaaatagtccctgatgtgaagtgcgttcaaggtttatcactgtggtgccggaattcagcggtgatgaatgaccatttgtataagggttataagggtgggaataagaggaggacatcgaacgaatatcttgctggctatgattttcttgatacaagcaagaggaggtttcatgtgtatgtctcatacaactctaccttcagcagggacaatggacaccatcccatgacagttttgcgtgttgcacggttggttaatatggcatccaccgcatatctgaagtttcttcgaggacctaatgtagaaatgcgcctggaatatttgaaagaaatgccaaaagctgcaatgaaaatcaggctagaccttaccacactccttgatgcactattctttacatggacagttcaactcctccttccagtaatgttgacatatcttgtttatgagaagcagcacaatttaagactgatgatgaagatgcatgggctaaaggatggaccttattggatgatatcttacgcctattttttgtccctttcagcagcttatatgatgttcttcgtgatgtttgggtcccttatagggctagatatcttcagattaaatagctacagcatacaatttgtattctattttctatatatcaaccttcagatcgtgctcgcctttctgcttgcgtctttcttctcgtctgtcaagtctgctagtgtaattagttacatttatgtctttggatcaagccttcttggagaagcacttctgcaattgttcattgaagatattacattcccaaaacaatggcttgtgacaatggagcttgttcccgggttcgccctttaccgaggattttacgagctcgcagagtatgcatttgcaggaaggcaaatgggaaagcctgggatgcaatggagggacttgaatgaccccatcaatgggatgaaagatgttttgcttctaatgtctatagaatggatacttctgcttcctgtggcatttttactggatcatagacctacatggcatccactgttcctctttgggtttatgtcaacaargcactcttcaccaacaatcataccagacaaagtgaaacagaggtccagaaaggtgtttgctgatatggcaaaacctgatgttttccttgaggatcaggatcacctaccttcaaagtcatgtgactttgtcactgacatgtgggacaaaggcatggtgatttcgaagcgcaaggtggtgaaaaaattgctgaaggaaatggacatgaggaatatgatcatatgccataacctgaagaagatgattggacttgtggcgccaacttatggaactgcctacatacatgggatggatttgaggagagatatgaatgaaatatatgcaaacattggtgtatgtccacagcacgatttgctttgggaaactctgacaggaagagagcatctaatgttctatggccgactgaagaatctcacaggtgctgctctactgaaggcagtgaatgaatccctgaagagtgtaaatctgttccacagcggtttcggcgacaaatcggtgaacaagtacagtggtggcatgaaaagaaggcttagtgtcgccatcgcactgattggcaacccaaaggttgtttacatggacgaaccgagcaccggattggacacgacatcgaggagcaatctctggaatgtcattaagagagcaaagaagaactgcaccatcattctcaccacacattccatggaggaggctgaggagctctgcgaccgcgtcggcatcttcgtcgacggcaatttccagtgcctcggaactccaaaggagctgaaggcgaggtacggcggcgtgcgggcgctgacgataacgacggcggcggggcacgaggaggcggtggaacgcgcggtggcgcggcggtgccccggcgcggcgaaggtgtacggcgtgggcgggacgcagcggttcgaggtgccccggcgaggggcgcggctggacggcgtgctgggcgcggtggaggcggcgcggcgggcggcgccggtggtggcgtggggggtggcggacgcgacgctggaggacgtgttcgtccgggtcgccatggacgcgcgcgccgccgcccacgtcctctcgtga

SEQ ID NO: 4284 - DNA, 2475 bp, Oryza sativa
atggcagacacctcctcctcgtcgtcgtcgaggggcgccgccggattcgccacgcaggccaatgccctcctccgcaagaacctctgcttccagaggaggaacatgaagacgaacgcgtgcatcacggtgttcccggtgttcctgtgcgtgatcctcgtggtgctccagggggtgatcaaccacgagatcaacaagcccaagtaccagtgcggctgcgcctgcgtggacgccgcgccggacgggacctgccggaggacggagtgcggcgtcgagcactccacgctggaccaggtggggagctgcccgatcaagagcccgacgccatggccggccttggtccaggtcccccgccccgagtcccgggccgtcaggatcgcctcccagccgttcgacggtttgcctgacccgacctgcagggacacagggtcttgccctgcctctgtccttgtcaccggaatgaaccgctcgcttgctcaaagtctttggggtggattgttccctgctgtgcctccctctctgaatttcacggattatcttgacgcgttctccaagattgttgctgggtcagacacatggacatggacaacgcagttcatagagccgcaatgttctgttgatgttgaattccagtgttatacttcaacagcatccaatgcatacatgaaatttcttaaaggaagtggagtggagatgctgcttgaatacgttaaagatatgccaaaagtaggaaccaaaccaaaatttgatctctcttctcttcttggtgctctgttcttcacctggatcattgaactactttttccagttatcttaacatatctcgtgtacgagaagcaacagaagctgaaaattatgatgaagatgcacggcttgaaggatgagccttactggatgatatcatattcttacttctttgctctatcagctgtctatatgatagtgtttgtggtatttggatccttgataggtttaaatttctttaaaacaaataactacggcattcagtttgttttctacttcatctacataaatcttcagatcgcacttgcatttttcgttgcggccttcttttcttctgtaaaaacagccacagagggttggatagtagtcatggaaatcatccctggattttcgctgtaccgagggttatatgagcttggtcaatatgcattctctggaaatgcaatgggaacaaatggtatggagtggactaatctgagggactctgagaatggaatgcgcaatgtcttgattatcatggttgtcgaatgggctattctactcccattagcattttatttggataaaatctcatcattgggtagtggagcccgtaaaacacccatgttcttcttgaaacgtttcaaaaatcgtgctgtatcactgcggaggagctttgggagacaagggtctaaagtagttgttgaaatggacaaccctgatgtttcccaagaaagagaggtagtcgagcaacttctgctggaaccaaatgcaagccaagcaatcatatgcgacaacctgaagaaggtttaccatggaaaggatggaaaccgggacaaacttgcagttcgagggttgtctcttgccctccctaaaggccaatgttttggtatgcttggcccgaatggagctgggaaaacatcatttatcagcatgatgattgggctcattccacccacatctggcacagcattagtccatgggatggacataaacactgatatggatagcatctacacaaatatgggtgtatgcccacaacacgacctactttgggaaacattgactggaaaagagcatctattgttttatgggagattaaagaatcttaaaggcgctgaattagagaaggcagttgatgactccctgaagaatgttaacctgtttcacggtggtgttggaaataagcaagtggggaagtacagtggtggcatgaaacgaaggcttagtgtcgcaatctcattgattggggaccccaaggttgttttcatggatgagcctagcactggactagatccagcatcaagaaataacttgtggaatgttgtgaaggaggcaaagaaaaatcgtgctatcattcttacaacacattcaatggaagaggcagaggtgctatgtgatagactcggtatttttgtagatggtggttttcaatgccttgggaatccaaaggagctgaaagctagatatggtggcacatatgtgttcactatgacaacatcttcagaacatgaacaggaggtcaaacagctggttcagcatttgtcaccaagtgcaaacaggatatatcacatatcagggacgcagaaatttgagctgccaaaacaggaggtgaagatagcagacgttttccatgcagttgagaaggcaaaaagacagttcagcatacacgcttggggcctcgtcgacaccaccttggaggatgtcttcatcaaggttgccaaaggagcacaaggagtcaatgtgatcgcgtaa

SEQ ID NO: 4285 - DNA, 1640 bp, Oryza sativa
atgaagcaggagaggcggaggaagcggcagcccgggccgccgcgcctcgagctggtggtagcgcacccgcgggaggaggagatggccgggctcgacggcggcggcgacgccgaggagggggccacgcatgcccgcggcggcggcggcgcgccgcmgccgtggcgggagcagctgacggcgcgcgggctggtggcgagcctggccgtgggcgccatgtacagcgtcatcgtgatgaagctgaaccttaccacgggcctcgtccccacgctcaacgtctcagccgcgctcatcgccttcgtcgtcctccgcggtgggtttggttcttacttgcttgggctcaacaagaggacttacgagatggcgggcgaggacacggagggcaacgtgccggggagctacaaggagcccggcattgcgtggatgactggattccttctcgccgtcagcttcgtcggacttctcgctctcgtccctcttaggaaggtcatgataattgactacaaattaacttacccaagtgggactgcaacagctgtgcttataaatggattccacacacctcatggggatgcaatggcaaaattcttcttcgatttcagtctcacatatgttggggcagggatgatttgctcccaccttgttaatctgtctctcctactcggcgccattctctcatggggagtaatgtggccactgatcagtgatttgaaaggggattggtattcagcagatatacctgaaagcagcatgaaaagcctgcaagggtacaaggccttcatctgtgtagctctcatcctaggtgatggcctatacaattttgtgaagatagttgcactcactattaagaatctgtttgatagctcaaaactgaagaatgcaaagaagggggaagacatgccagtgctcgatgaacttcatcgtaatgaagtttttacaacagacaatattccttcctggctagccttctctggttatcttggattaacttttattgcagtaattgccattcccatgatgttccatgagatgaagtggtattatgttgtcatagcatacttattggcgcctgcccttggtttctgcaatgcctatggagcaggcctaactgacatcaatatggcctacaattatggaaagattgccctcttcattcttgcagcctgggctgggaaagactctggtatagttgctggcctagtaggctgtggtttggtgaaatcgctggtgtccatatctgctgatctgatgcatgatttcaagacgggacatctaacattaacatcaccgagatcgatgattattgctcaggccattggaactgtcatgggttgtgtaatttcaccactaactttcttcttgttctacagtgcctttgacattggcaacccagaagggtactggaaagcaccatatgctctagtctaccgaaacatggcgattcttggtgttgagggcttctctgctctgccccagcattgcttgcagctctgctatgggttttttggctttgcagtggcagctaaccttacgagggacctttgcccaccgaagtatgggagatgggttccctaccgatggcaatgggggttcctttcctggttggtgcaagctttgccatcgacatgtgtatcgggagcctg

SEQ ID NO: 4286 - DNA, 513 bp, Oryza sativa
atggcggcagcggcgcaggctccggcggcggcgaaggtggtggtggcgacgtcgccgagggcaggcggaggcggaggcggcggcggggacaggaaggtggtgccggttgtggtggcggcggcggccggcgacgaggcgcagagcgagatgcacgtgctggcggtggacgacagctccgtggaccgcgccgtcatcgccaagatcctccggagctccaagtacagggtgaccacggtggagtcggcgacgagggcgctcgagctcctctgcctcggcctcgtccccaacgtcaacatgatcatcaccgactactggatgcccggcatgaccggctacgagctcctcaagcgcgtcaaggaatcgtctcagctcaaggagatcccggtggtgatcatgtcgtcggagaacgtgccgaaccggatcagccggtgcctggaggagggcgccgaggacttcctgctcaagcccgtacgcccctccgacgtgtcgcggctctgcagccgtatcagatga

SEQ ID NO: 4287 - DNA, 2142 bp, Oryza sativa
atggagtgcgagaacggccgcgtttctgccaatggcatgagtggtctctgcgtcgcggcgccccgcgccgacccgctgaactgggggaaggccacggaggagatgacggggagccacctcgacgaggtgaagaggatggtggcggagtaccgccagcctctggtcaagatcgagggcgctagcctgaggatcgcgcaggtcgccgcggtggccgcggccggcgaggccagggtggagctcgacgagtcggcccgcgagcgcgtcaaggccagcagcgactgggtgatgaacagcatgatgaacggcacggacagctacggtgtcaccaccggtttcggcgccacgtcccacaggaggaccaaggagggtggtgctctgcaaagagagctcatcagattcctcaatgccggcgcgttcggcactggcaccgacggtcatgttttgccggcggaggcaacccgcgcggcaatgctcgtccgcatcaacacactcctccagggatactccggcatccggttcgagatcctcgaggcgatcgccaagctgctcaacgcgaacgtcacaccgtgcctgccgctccggggcacgatcaccgcctccggtgacctcgtcccgctgtcctacattgccggccttgtcactgggcgcgagaacgccgtggcggttgcaccagatggcagcaaggtgaacgccgctgaggcgttcaagattgctggcatccagggcggcttcttcgagctgcagcccaaggaaggccttgccatggtcaatggcactgccgtgggctctggccttgcatcgaccgtgctctttgaggctaacattcttgccatcctcgccgaggtcctctcggccgtgttctgcgaggtgatgaacggcaagccggagtacaccgaccacctgactcacaagctcaagcaccatccaggacagatcgaggccgccgccatcatggagcacatcttggagggaagctcctacatgaagcatgccaagaagcttggtgagctcgacccactgatgaagccgaagcaagaccggtacgcgctccggacatccccacagtggctcggccctcaaattgaggttatccgcgccgccaccaagtccatcgagcgtgagatcaactccgtgaacgacaacccgctcatcgacgtctcccgcggcaaggcgctgcacggtggcaacttccagggcacgcccatcggcgtgtccatggacaacacccgcctcgccatcgctgccatcggcaagctcatgttcgcgcagttctcggagctcgtgaacgacttctacaacaacggcctgccatccaacctgtctggcggtcgcaacccgagcttggactacgggttcaagggcgccgagatcgccatggcctcctactgctccgagctgcagttcttgggcaacccagtgaccaaccacgtccagagcgccgagcagcacaaccaggacgtcaactctcttggactcatctcctccaggaagaccgacgaggcaatcgacatcctgaagctcatgtcctccacgttcttgatcgccctctgccaggccgtcgacctgcggcacatcgaggagaacgtcaagagcgccgtcaagagctgcgtcatgacggtggccaagaagacactcagcaccaactccaccggcgatctccacgtcgcacgcttctgcgagaaggacctgctcaaggagatcgaccgcgaggcggtgttcgcgtacgcggacgacccgtgcagccacaactacccgctgatgaagaagctgcgcaacgtgctcgtggagcgcgccctcgccaacggcgcggccgagttcaacgccgacacctcggtgttcgccaaggtcgcgcagttcgaggaggagctgcgcgcgactctgccaggtgcgatcgaggccgcacgtgcggctgtggagaacggcacggcggcgattcccagcagaatcaccgagtgcaggtcgtatccgctctaccggttcgtgcgcgaggagctcggaacaaagtacctgaccggcgagaagacacgatcgcctggcgaggagctgaacaaggttcttgtggctatcaacgaaggcaagcacatcgacccgttgctcgagtgcctcaaggagtggaacggcgagcccctgccaatctgctga

SEQ ID NO: 4288 - DNA, 2142 bp, Oryza sativa
atggcgtgcgagaacggtcaggttgctgccgatggcatcaacggcctctgcatggcggcgccccgcgccgacccgctgaactgggggaaggcggcggaggagatgtcggggagccacctcgacgaggtgaagcgcatggtggccgagtaccgccagccgctggtaaagatcgagggcgccagcctgaggatcgcgcaggtcgccgcggtggccgcggccggcgaggccagggtcgagctcgacgagtcggcccgcgagcgcgtcaaggccagcagcgactgggtgatgaacagcatgatgaacggcacggacagctacggtgtcaccaccggcttcggcgccacgtcccacaggaggaccaaggaaggtggtgccctgcaaagagagctcatcaggttcctcaatgccggcgccttcggcacgggcacggacggccacgtcctgtccgccgaggccacgcgcgcggcgatgctcgtccgcatcaacactctcctccagggctactcaggcatccgcttcgagatcctcgaggcgattaccaagctgctcaatgccaacgtcacgccatgcctgccactcaggggcacggttaccgcgtccggcgacctggtcccgctctcctacattgccggcttggtcaccggccgcgagaactctgtcgcggtcgctcctgatggcagcaaggtgaacgccgctgaggcgtttaagattgctggcatccaaggtggcttcttcgagttgcagcccaaggaaggtctcgccatggtgaatggcactgccgtcggctctggacttgcctccacggtgctctttgaggcgaacattcttgctgtccttgccgaggtcctgtccgccgtgttctgcgaggtgatgaacggcaagccggagtacaccgaccacctgacacacaagctgaagcaccaccctggacagatcgaggctgctgccatcatggagcacatcttggaaggcagctcgtacatgaagctggcgaagaagctcggtgagctcgacccgttgatgaagccgaagcaagaccggtacgcgctccgcacgtcgccgcaatggcttggccctcagatcgaagttattcgtgcggccaccaagtccattgagcgcgagatcaactctgtcaatgacaacccactcattgatgtctcccgcgacaaggcgcttcatggtggtaacttccagggcactcccatcggtgtgtccatggacaacactcgcctcgcaattgctgccatcggcaagctcatgttcgcgcagttctcagagcttgtgaacgactactacaacaacggccttccctccaacctgtccggcgggcgcaacccgagcttggattacggcttcaagggcgccgagatcgccatggcttcgtactgctccgagttgcagttcttgggcaacccagtgaccaaccacgtccagagcgcggagcagcacaaccaggacgtcaactccctcggcctcatctcctccaggaagacagccgaggccgtcgaaatcctgaagctcatgtcctccacgttcttggtcgccctgtgccaggccatcgacctgcggcaaatcgaggagaacgtcaagagcgccgtcaagagctgcgtcatgacagtggccaggaagactctgagcacgagcgccaccggcggtctccacgccgctcgcttctgcgagaaggatcttctccaggagatcgaccgcgaagccgtgttcgcgtacgccgacgacccgtgcagcgccaactacccgctgatgaagaagctccggaacgtgcttgtggagcgcgccctcgccaacggcgcggccgagttcaacgccgagacctcggtgttcgccaaggtcgcccagttcgaggaggagctccgcgcggcgctgccagcggcggtgttggccgcacgggcagctgtggagaacggcacggcggcaacgcccaacagaatcaccgagtgccgctcctacccamtgtaccggtttgtgcgcgaggagctcggaaccgcgtacctcaccggcgagaagacgcggtcgcccggcgaggagctgaacaaggtgctcgtcgccatcaaccaaggcaagcacattgatccgctgcttgagtgtctcaaggagtggaacggcgcgcccctgcccatctgctaa

SEQ ID NO: 4289 - DNA, 2157 bp, Oryza sativa
atggagtgcgaaaccgggcttgttcgttccctgaacggcgacgggctgtgcatgtcgtcggtgtcggcgccgccgcgggccgacccactgaactgggggaaggcggcggacgagctggcggggagccacctcgacgaggtgaagcggatggtggaggacttccgccagccgctggtgaagatcgagggcgccagcctgacgatcgcgcaggtggccgccgtggccgccggcgccggcgacgccagggtggagctcgacgagtccgcccgcggccgcgtcaaggccagcagcgactgggtcatgaacagcatgatgaacggcaccgacagctacggcgtcaccaccggcttcggcgccacctcccaccgccgcaccaaggagggcggcgcgctccagagggagctcatcagattcctcaatgccggcgccttcggcaccggcaccgacggccacgttctgccggcggaggcgacgcgcgcggcgatgctcgtccgcatcaacaccctcctccagggttactccggcatccgcttcgagatcctcgaggccatcaccaagctgctcaatgccaacgtcacgccgtgcctgccgctccggggcaccatcaccgcctccggtgacttggtcccactgtcctacattgccggcctcatcaccggccgccagaactccgtggccgtcgccccggatggccgcaaggtgaccgccgccgaggcattcaagattgccggcattgagcacggcttcttcgagttgcagcctaaggaaggtcttgccatggtgaacggcactgccgtcggctctggccttgcatcgaccgtgctctttgaggccaacgtccttgccatcctcgccgaggtcctgtccgccgtgttctgtgaggtcatgaccggcaagccggagtacaccgaccacctgacacacaagctgaagcaccaccctggacagatcgaggctgccgccatcatggagcacatcttggaaggcagctcgtacatgaagctggcgaagaagctcggcgagctcgacccgttgatgaagccgaagcaggacaggtacgcgctccgcacgtcgccgcagtggctcggcccacagatcgaggtcatccgcttcgccaccaagtcgatcgagcgcgagwtcaactccgtcaacgacaacccgctgatcgatgtctcccgtggcaaggcgcttcacggtggcaacttccagggcacgcccatcggcgtgtccatggacaacacccgcctcgccctcgctgccatcggcaagctcatgttcgcgcagttctctgagctcgtgaacgacttctacaacaacgggcttccttccaacctgtccggtggacgcaaccccagcttggactatgggttcaagggcgcggagatcgccatggcgtcgtactgctccgagctccagttcttgggcaacccggtgaccaaccatgtccagagcgcggagcagcacaaccaggacgtgaactcgcttggtctcatctcctccaggaagaccgccgaggccatcgacatcctgaagctcatgtcctccacgttcttgatcgccctgtgccaagccatcgacctgcgccacctcgaggagaacatgaagaccgcggtgaagaactgcgtgatgcaggtggccaagaaatccctgagcatgaaccacatgggcggcctccacatcgctcgcttctgcgagaaggacctgctcaccgcgatcgaccgcgaggccgtgttcgcctacgccgacgacccctgcagcgccaactacccgttgatgcagaagctccgcgcggtgctcatcgagcacgcgctcgccaacggcgacgccgagcgcgtcctggagacctccatcttcgccaaggtggccgagttcgagcagcacgtccgcgccgcgctgcccaaggaggtggaggccgcccgcgccgccgtcgagaacggcaccccgctcgtcccmaaccggatcaaggagtgccgctcgtacccgctctaccggttcgtgcgcgaggaggtcggcaccgagtacctcaccggcgagaagacgcggtcgcccggcgaggagctgaacaaggtgctcgtcgccatcaacgagcgcaagcacatcgacccgctgctcgaatgcctcaaggaatggaatggcgcgccactgccactctgctga

SEQ ID NO: 4290 - DNA, 2280 bp, Oryza sativa
atggcgggcaacgggccgatcaacaaggaggacccgctcaactggggcgcggcggcggccgagatggccggcagccacctcgacgaggtgaagcgcatggtggcgcagttccgcgagccgctggtcaagatccagggcgccaccctccgcgtcggccaggtggccgccgtcgcccaggccaaggacgccgccggcgtcgccgtcgagctcgacgaggaggcccgcccccgcgtcaaggccagcagcgagtggatcctcaactgcatcgcccacggcggcgacatctacggcgtcaccaccggcttcggcggcacctcccaccgccgcaccaaggacggccccgccctccaagtcgagctcctcaggcatctcaacgccggaatcttcggcactggctccgatggccacacgctgccgtcggagacggtgcgggcggccatgctcgtgcgcatcaacaccctcctccagggctactccggcatccggttcgagatcctcgaggccatcaccaagctgctcaacaccggcgtcacgccgtgcctgccgctccgtggcaccatcaccgcgtccggtgacctggttcccctgtcctacattgccggcctcatcaccggccgccccaacgcgcaggccatctcgcccgacggcaggaaggtggacgccgccgaggcgttcaagctcgccggcatcgagggtggcttcttcacgctgaaccccaaggaaggtctcgccatcgtcaatggcacgtccgtggggtcggcgctcgcggccaccgtgatgttcgacgccaacatcctcgccgtcctgtccgaggtgctctcggcggtgttctgcgaggtgatgaacggcaagccggagtacaccgaccacctgacccacaagctgaagcaccaccctgggtcgatcgaggccgccgccatcatggagcacatcctcgccgggagctcgttcatgagccacgccaagaaggtgaacgagatggacccgctgctgaagccgaagcaggacaggtacgcgctccgcacgtcgccgcagtggctcggcccgcagatcgaggtcatccgcgccgccaccaagtccatcgagcgcgaggtcaactccgtgaacgacaacccggtgatcgacgtccaccgcggcaaggcgctccacggcggcaacttccagggcacccccatcggtgtgtccatggacaacgcccgtctcgccatcgccaacatcggcaagctcatgttcgcgcagttctccgagctcgtgaacgagttctacaacaacgggctgacctccaacctggccggcagccgcaacccgagcttggactacgggttcaagggcaccgagatcgccatggcctcctactgctctgagctccagtacctcgccaaccccatcaccaaccatgtccagagcgcggagcagcacaaccaggacgtgaactcgctgggtctcgtctcggccaggaagaccctggaggcggtggacatcctcaagctcatgacctccacctacatcgtcgccctgtgccaggccgtcgaccttcgccacctcgaggagaacatcaagagctccgtcaagaactgcgttacccaggtggccaagaaggtgctcaccatgaaccccaccggcgacctctccagcgcgcgcttcagcgagaagaacctccttaccgccatcgaccgcgaggccgtgttcagctatgccgacgacccgtgcagcgccaactacccgctcatgcagaagctccgcgccgtgctcgtcgagcacgccctcaccagcggcgacgccgagcccgaggcctccgtgttctccaagatcaccaagttcgaggaggagctccgctctgcgctgccccgggagatcgaggccgcccgcgtcgccgtcgccaacggcaccgcccccgtcgccaaccggatcgtcgagagccggtcgttcccgctctaccgcttcgtccgcgaggagctcggctgcgtattcctcaccggcgagaagctcaagtcccccggcgaggagtgcaacaaggtgttcctcggcatcagccagggcaagctcatcgaccccatgctcgactgcctcaaggagtggaacggcgagcccccttcccaccaatcaactaagccaagatcccatcgccattgccattgccatacacccatcatcgaggaggagaggagactaaaaataaaagaaaacgaaccgcttcgtgtatcttcagacaaaaaagaccctgtattttcttcgttcgttgccgtttggtttatagtgatctcgtgttctttgtgttag

SEQ ID NO: 4291 - DNA, 1758 bp, Oryza sativa
atggcgggcggcggcgggaagaaggagaagggggaagggctggggcgggcgctgatccggcagcggaacaaggcggcggcggccgtcaaggagagaggggacgcgctcgcccaagcgcgccgccgcgcgcagccgctggagtccgtcatcgaggtcagcgacatcgacgccgtcctcgagcgcgccgccgaggccgaccgcctccactccgcgctcgccgactccgtctcctcctccgacctcgtcatcgacctggatgcgacgggggagacggatgaggagaggcggcggatgcagaaggagcaggaggctctgcacgccggcagcctcagggtcccgaggcggccaccatggaattctcggatgactgtggaggagctcgatgagaacgagaggcgggccttcctggtttggcggaggaatctcgcaagatgggaagaaaatgacaagcttgtgcttacaccctttgagaagaacattgacatctggagacagctttggagagtccttgaacgtagtgatctgctggtgatggtagtcgatgctcgagatcccttattctaccgctgtcctgatctcgaggtatatgcaaaggaaattgatgaacccaagaggacaatgattcttgtcaacaaggctgatctgttaccaatgaatatcaggaaaaaatgggcagactattttaaggcacatgatattctctatgttttctggtccgctaaagctgctactgccacattagaaggcaaaatattaagtggatactctgaacaagattctgcttcacttgatttggacaccaagatatatggcagggatgaactcttaaagaaattgcaaactgaagcagaattcattgtagcacaaaggagggccgcagccatcaaagaggacagcagagccacttcctctgattctgtttcatcagtggctaagcatgttgttgttggatttgttggttatccaaatgttggaaagagttcaacaatcaatgctttagttggtgagaagaagactggtgttactcacacacctggcaaaacaaagcatttccagacgctgataatctcagaggagctcactctatgtgattgtcctggtctggtcttcccttccttctcaagctcaaggcatgagatggtgtcatgtggtgtcttgccaatcgataggatgactaagcaccgggaagctattcaggtggtggcagatcgtgtcccaagaagtgtccttgaacagatttacaagataactctgccaaagccaaagccatatgaatcgcagtcgagaccaccaactgctgctgagctgttgcgagcctactgtgcatccagggggcatgttagccatgctggacttcctgacgagactagggctgctcgacagatactgaaagattatatcgatgatactgaaaatgaacacgaagaaacctccggattagaaggtccaactacctcagcatacaatgaatcaggtggttccgattccgatgaacgggatgatacagttgatccagcacaaccagatatgaggcatgtccttagcgacctcgaatcgtttgacctggccactgaagggtctaaacctgctgggaagaagaagaaagaggcatcccacaagcagcacaagaagccccagaggaagaaggaccggtcatggagggtcggcaacgatggcggcgatggaactgcggtcttaagggtgtaccagaaaccagctgttaacctctctgccgtcagtgcaagcgacaagacctag

SEQ ID NO: 4292 - DNA, 2433 bp, Oryza sativa
atggcgtcgccggacctgttcccgaacgtctccttctcccatgtctccgtccccgccgccgcgggcgcgtcgacggaggtcaccggcggcgccacggccgtgttcggcggggacgcgtccaccggggccccgcgcctcagcctcgtctggtccggggagacccaggcgaagcacacgctcgagatcgatctctctgacgcgcagatatttaagctggggccgacggagtggctgtgcgtgagcggcgagtcggaggctaaggacggtgtggaggagcacatattaaatggcttcatgttaactctcaattctttgaggcagaagtcatattcaagagcaattaaggttgttcttaggacagaagctgagagcaaagccttctatttagcttttcaacaatggaaacaccgagtgattagtggaaaagctggtgaacctttggaaaatggattaataattggttctaaaagcaaatttgatacaaaaattgaggcctcatcagcaaagatgtatttccactactatggccagttattacatcagcaaaatatgttgcaagactttgtcaggacaggaacatactatgctgctgtaatggaaaatcgatccgattttgagggtcgagttgtggttgatgttggagctggtagtggcattctttcattatttgctgcacaggctggtgccagacatgtatatgcagttgaggcatctgaaatggctgaacatgctcagcgtcttatttctggaaacccatctcttggacaaagaataacggtcatcaaaggcaaagttgaggaagttgaacttccagagaaagctgacatacttatttcggagcctatgggaaccctcttggtgaatgaaaggatgctggagtcctatgttatagctagagacagattccttgtgccaggtggtaaaatgtttccaacaactggaaggattcatatggctccattttccgatgaatacctctatgttgaaatggcaaacaaggctctcttctggcagcagcataacttttttggtgttgatcttacacctttgcatggttcagcattccaggggtatttttcacagcctgtggtggatgcattcgatccaagattattggtttctccgcctacgtttcatacgcttgatttcactaccatgaaggaagaggagctttacgagattgacattcccctaaattttgtggcctctgttggcactagggtgcatgggctagcttgttggtttgatgtattgttcaatgggagcactgtccagaggtggcttaccactgctccaggctcccctacgactcactggtatcaactacgatgcatactttcacagccattatatgtcatggcaggacaagaaataacaggacgacttcatctggtagcccacagtgcacaaagctacacgatatacttgacgatgtcaggttgggcattttctatttcgtttgttatcagtttttttccctctattgcacttgaagctgatggttcttgctcttttggttattttctggaagctaaaatgtggggtgagggggcagaacaaggtggcatcctgcagacatccacagccaaacttgaactcaaggagccatactacaggctgtctcaaccacaaccatatgtgatgcaacaagaccagcagcagcagcagttaccatctttgcagccacaggagagggaggtggaggtggaggaggtgaggaggccgaagctgaggtacttggagttcgtgcaggtggcggcagcgcaggcgacgatctgcctcgcggggctctacgcgcttgccaaggaccacgccggcccgctccgccccggcktcaacgccgtcgagtccgccgtcaagggcgtcgtcggccccgtctacggccgcttccatggcgtccccctcgacgtcctcgccttcgtcgaccgcaaggtggatgacacggtgcaagagctggaccgacacctcccgccgacgctgaaggccgcctccgccaaggcttgcgcggtggcccgcggcgtgccggacgtggcgagggagctcaccgcggargtgcagcagtcgggcgtyaccggcgccgcgcgcgtcgcgtacgccaaggtcgagcccgtggccaagggcgtgtacggcaggatccagccggcggccaaggacctctacgtgcgctacgagccggcggcggagcacctcgccgtctccacctggcgctcgctcaacaacctgccgctgttcccgcaggtggcgcagatcgccgtgcccaccgccgcctactgggccgagaagtacaacaaggtgatcgccgccgcggccgacaagggttacaccggagcacagtacctccccgccatccccaccgagcgcatcgccaaggttttcggcgagttatcgccggaggcccagccgtcgaagagcgagtcggcgaagacccagtag

SEQ ID NO: 4293 - DNA, 1812 bp, Oryza sativa
atggatgatcataacttagactacaagggaagtggtgctcttgaagagcttgagatgttaacagtgaatgccaaagaagcccaagagctcatattgacgaaaatccttgagaggaatcaggctaccgagtacctgagcaaattcatgaatgggtcaacaaatatttctgccttcaagagacatgttcctgtagtaacatatgataaggtacatccatacattctcaggattgcaactggtgaggaatcttcaattttatgtggagaatatatcttggagctgcttagaaggctagaaatgactggtcatactaagctacttgccttctcggggacttctcgaggtgagccaagattgatgccgtccatcttaaaggatcttgaccgtcgaacctacctctatagtctgatcatgcctatcatgaacaagtatatatcaggccttggtgaggggaaagctatgtaccttctctttgtgaaagctgaaacactgacagattctggaattccagttcgatcagtcctcactagctactataagagccctcatttccttcaccgcaaacacgatttatacaacaactataccagtcctgatgaggtcattctttgccctgatagccagcagagcatgtactgccagctgctctgtggcctggtagaacgccagcatgttcttcgtatcggggcagtctttgcctcagcattccttcgatctatcagcttccttgagcagcattggcgtgaccttgtcaatgacatacgaattggtcagctcaactccagtatcaccagtccagcatgccgtttggccatgctgaacttccttgcattgcccaacccagagctagctgatcaggttgaggcaatatgcagctgcggttcatggaaggggattctgggaaggctatggcctaatgttaaatatatcgaagctgttcttacgggcacaatggcacaatatatccccatgctggaattctatggtggtggtgcgattcctttcgtctgcacgatgtatgcttcctcagaaagctatttcggtgtcaatctgagtccactatgtagcccagctgatgtgtcttacaccatcctcccaaacatggcttactttgagttcataccattagaggacggcctcaggttgactgatcacgaggaggtgatagagaatgacaagcttgtcagcctggtagatgtcaaggttggatgttactatgagcttgtagttaccacattttcaggtctttacaggtacagggttggtgatgtgcttcaagtgacaggcttctacaaccgagctccgcagttcaaattcatttgccggagaaatgttatcctcagcatcgattctgacaagaccaacgaggaggatctccacaacagtgtcaccactgctaagaaaatcctggagaaccaaaattacctcctcctggagtacactagctacactgatatttccactgtccctggccactacgtgctgttctgggagatcaagtccacccacgatgaaaggccggcccctcttgacgctcagctcctcgagagctgctgtgctgctgtcgaggagtcactggactacgtctaccgtcgttgcagagcccatgacaggtccatagggcctctggagatacggcttgttgaagctggtgcatttgatgctctgatggatctattggttagccatggcagctccattaaccagtacaagacacccagatgcatcgaatctagccttgcactgaagctgctgaactccaaggtcattgcctgctttttcagtccacaggatcctgaatgcggcatgtaa

SEQ ID NO: 4294 - DNA, 1340 bp, Oryza sativa
atggcgctcctgctgctgcgtatgggcgtctccgtcgcgctgctcgtcgccttcttctcctctctgattccgtcgtcagaggcatacgatccgcttgatccaaatgggaacataacaatcaagtgggatgtgctgcaatggactccagatggatatgttgctgttgtttcactatacaactatcagcagtatcgacacattcaatcacccggatggaaactcggatgggtgtgggcaaagaaggagataatctgggcgatgaacggcggccaagcgacggagcaaggcgactgctcaaagttcaaatcaaatatcccacattgctgcaagaaagatcctgagatcgtggacctgctcccgggaaccccttacaacatgcagattgccaactgctgcaagggaggagtgctcaactcgtgggcacaggaccctgcaaatgccatagcatcattccaagtcagtgttggtcaggcagggacgacgaacaagacggtgcgggtgccgagaaatttcaccctgaaatctccaggtccagggtatacctgtggcagtgccaaggttgtgagacctaccaagtttttttcgcaggatggaaggagaacaactcaggctcacatgacatggaatgtgacttgcacatattcacagattgtcgcgcaaagatctccgacgtgctgcgtttcgctctcgtctttttacaatgataccatagttaactgcccaacatgctcatgtggctgccagaataataaaccaggaagctgtgtagagggaaattctccttatttggcttctgttgtgaacacccataacaaggacagcttgacacctctagtccagtgcacttctcatatgtgcccaataagagttcattggcatgtgaaggttaactacaaggagtactggagggtcaagatcacagtgacaaacttcaattacaggatgaactactctcagtggaacctagtcactcagcaccccagttttgacaatctgacaaccattttcagcttcaactacaaatctttgaacccatatggagtaataaatgataccgcgatgttatggggaatcaagtactacaatgacttgctcatgacggcgggtccagatggaaatgttcagtctgagcttctgttcaagaaggaccccaagagtttcacctttgagaaaggctgggccttcccaagacgtgtatacttcaatggtgacaactgtgtgatgccaccaccagatgcatatccatggctgccaaatgcttcaacaagagtgatgtcttcaattctccttccattcattaccatttggacagcactgacattcttgatggtttacgcata

SEQ ID NO: 4295 - DNA, 3804 bp, Oryza sativa
atgggggttgaggaggaggaggagagaggtcgtcgagccccgcggcggcggcsgcggggaatascgackttgggcccsttgcggttccgcggattttcgcgttygccgacggggcggacccggcgctkaatggcggttggggcsgcggcggcggtkgcgaacgggattgsgcagccgctcatgacgttcatcttcggcgacgtcatyaacgccttyggctcmacctcytcgccggacgtcytcgccaaggtcaccaaggtgattttgaattttgtctaccttggcattggagcaggatttgtttcaactcttcaggtatcatgttggacaatcactggagaaaggcaggctgcacgaatcagggcattgtatctcaaggcaatacttagacaggacattgccttttttgacaaggaaatgagcactggacaagtggttgagaggatgtcaggggacacattcctcattcaagatgccattggagaaaagagtggcaagtgtatacaactcctttctaccttctttggaggcttcattattgcatttgtgagaggatggctcttggcacttgtgctgctctcatgcattcctccaattgcggtggccggtgcttttgtgtcaaggttgatgacaagaatctcaacccgcatgcaagaaaagtatggtgatgctggaaacattgctgaacagactattggggccattagaaccgttgcttcattcaatggcgagaagcaagctataaacacatataacaaattcataagaaaagcttatgaatctactctacaagaaggtgttgttaatggccttggattaggtaccgtaatggcaatcttgttttgcagttatggtttggcagtttggtatggatcgaaactgatagtcaaccgtggatacaatggtggcatagttataaatgttctaatgtctgtcatgatgggtgcaatgtccttaggtcaggcaacaccatcaataacagcttttgcagaaggtcaaggagcagcatatagaatgtttaagacaatcaaaagacagccagatattgatgtatgtgataccaaaggtatcatattggaagacatcacgggtgatgttgaactgaaggatgtgtacttcagctatcctaccaggccggaatatttggtattcaatggattctccttgcaaataccaagtggcagaacaatggccctagttggagagagtggcagtggaaagtcaactgtgatcagcttggtggagagattttatgatccacagtctggggaagtcttgattgatggaattgacattagaagaatgaatctgggatggatacgaggaaaaatcagtcttgttagccaagaaccagtgttgttctcaagtacaatcagggaaaacatcgcctatgggaaggaggatcaaactcttgaagagatcaagagagcagtagagcttgcaaatgcagcaaaatttgttgataagttgccaaatggtcttgagacgatggttggggaacgtggaattcaattgtccggagggcagaagcaaagaatagcaattgctagagcaattataaaaaatcctaggatcttgttacttgatgaagcaactagtgcattggatatggaatctgagagggtagttcaagatgctttgaatagggtaatgcttgaaaggactacaattattgttgcacatcgcctaagtacagtgaagaatgctgacgtgatttctgttctacagcagggaaagatggttgaacaagataaatcaaagctgcttctgactactaatcaacagatagacaacaacctatttactttgggttctcatgtagaactgatgaagaaacctgaaggtgcttatgctcagctgatccagctccaaggggcacagcaggatgctgaaatccataatgacgacactgacatgataataagaagcgattcaggctctaggtctataaatgtaaaaccaagaagccaaagcacctcatttaggagatcaattactaaaggctcctcttttgggcatagtggcaggcatcctatccctgctccccttgactttccagatcccatggaattcaaggatgatctgggcatggaggagactacagacaaagtgcctcgtggccagaagaaagcttcaatcagtcgactgttctatctgaacaaaccagaagcttttgttcttgtacttggttctgtaaccgcggcaatgcatggactcatgtttccaatatttggcatactgatctcaagtgcaataaagatgttttatgagccaccatcagaactcctgaaggactccaggttctgggcaagcatgtttgttgtggtgggagcttctgcatttgttctgattccaaccgagtacttcctgtttggattagcaggtggaaagcttgtggagcgtatacgttcactgacattccgaagtgtcatgcaccaggaaatcaactggtttgacaaacctgaacactctagtggatcgattggtgcaaggctgtctgttgatgctctgaatgtgaagcgccttgttggagacaatttggcacttaatgtccagactgtatcaactgtcatatcaggttttacaatagcaatggtggcaaactggaagctggcattgattataacagtggtagttcctttggttggtttccaagcctatgctcaaatgaagtttttgaaaggtttcaacaaaaacgcaaagctgaagtatgaagaagcaagtcaagtagcaactgatgcagttggaggcatcagaactgtggcatcattttgtgctgagcagaaagtgatagaagcatatgagaaaaaatgtgaatctccagtaaggcaaggaataagggaaggtgtagttggtggcttgggttttggcttctccttccttgtgttctactttacttatgctctctgcttctatgttggagcaaagtttgttcaccaaggagtggcaacgtttcctgaagtgtttagggtcttctttgttttagttttggctaccagtggaatctcacgaacaagtgcaataggcgcagacagcaccaaggctaatgaatcagctgtttctatcttcgaaatccttgaccggaaatccaagattgattccagcagcgaggagggtgtggtcattgcaagtgtgaggggtgacattgagttccataatactgttgcactggttggagagagcggaagcgggaagtccacggcgattgcgctgcttgaaaggttctacgacccggataccggcaagatccttcttgatggggtggatctcaagacattcaaggtcagctggcttcgtattcagatcgggctcgtggcacaagaaccggtattgttcaatgacaccatccacgccaacatagcttatgggaagcaagaacaggcatctcaggaggagatcatggccgctgccgaagcagcaaacgcgcaccagttcatctcggctctgcctgacgggtacagcaccgtcgtcggcgagagagggatccaactgtcaggcgggcagaagcagcgcgtcgccatcgcgagggccatcatgaaggaccccaaggtgctcctgctcgacgaggcgacgagcgcgctggacgcagagtcggagcgcgtggtgcaggaggcgctggaccgggtgatggtggggaggacgaccgtggtggtggcgcatcggctgtcgacgataaaaggcgcggacatcatcggcgtcctcaagaacggggcgatagtggaaaaaggggggcatgatgaactgatgcggataaaggatggaacctatgcttcgcttgtcgagcttagttcaagttcaaggtaa

SEQ ID NO: 4296 - DNA, 1572 bp, Oryza sativa
atgggcktcgtggtggggttgcagcttgctcgcctcgcccttcgcccttgccgtcgccgtcgcccccgggttgctcagcttctccgccgccgccaccgcagcctgaagcgcgcgggcgtcgaaacgaggatkagggagtacgggcccgcggcggcgccgcggctgctggtgtccgactccggccgcgtccatgagatggagaggttctcgcattacgtcgctaggcaaattgggtttgaccatgtggatgaatgcccccacctatgtacgctggcctatgattatctgaggaagaacaagggttacgaagaaaacatattcgcgttcttccaaaacagccaggatcccgagactctgattgtaaagttcatcgaggaactcgacaaatgtatacttggctacttctcattccattggaactatgcaacctatataatttcccaggttttgactgtagaaggtgctcctaaaagaaagctcaggaacatggtattagaggccactaggaaacagagatttgaaagggttacaagaaacttgaaggtgaccagactattctccacattggtggaggagctgaaggccataggactatcttcccatgttgaagcaccacggagtgatgtgatggtcccagcagcacattgtgatcgcagcccagttctactcttgatgggtggtgggatgggagctggcaagagcaccgtgcttaaggatatactcaaggaagcattctggtccggagcagctgcaaatgcagtagttgtagaggcagatgcattcaaggaaactgatgtaatctatcgagctatcagctcaagaggccaccacaatgacatgctgcagacggcagaactggtacatcagtcatcgatggacgcagcctcgtcgctcctggtgactgccctcaacgaagggagggatgtgatcatggacggcaccatgtcgtgggagccgtttgtccagcagacgatcaccatggccagggctgtgcaccggcaacggtaccgcatgggtgttggctacaaggtcacggaggacgggtcaatcactgaggagtactgggagccagttgaggactccagtacagatgaagaaggcgagacgagaaacaggaagccatatcgcatcgagctcgtaggtgtggtctgtgatgcctatcttgcggttgtcaggggaatcaggagagctgtgatcaccgggagagcagtgagggtgaagtcccagctgaagtcccacaagcggttcgccaccgcgttccacagctactgcaacctcgtcgacaatgcgaggctctactgcaccaactccacgggcgccgccaagctgataggatggaaggacggcgagagcaaccttctagtggaccctgaagaaatcggctgcttggagagggtgagccacctcaacgacgaggccgactgcgtccacgagatctatccggacggctcggcggcggcggcctgggaggccctggtcacgtcgccgtcgagggcgccggcgcagcgggagatcatggcggcggtccagaggagcgaggcgcgcttccggaccacgtccacgccctcgtag

SEQ ID NO: 4297 - DNA, 1356 bp, Oryza sativa
atggggaaggcggcggcgatggaggtgtcggcgtcggcggcggcggaggcggggatgatggtgggtcatggggagtggcgcgacgacgacgggcgggcgcggcggatggggacggtgtggacggcgagcgcgcacatcatcacggcggtgatcggctccggcgtgctgtcgctggcgtgggcgatcgcgcagctcggctgggtggccggccccgccgtcatgctgctcttcgccttcgtcatctactacacctccacgctgctcgccgagtgctaccgctccggcgacccgtgcaccggcaagcgcaactacacctacatggacgccgtccgcgccaacctcggcggctccaaggtccgcctctgcggcgtcatccagtacgccaacctcttcggtgtcgccatcggctacaccatcgccgcctccatcagcatgctggcgatcaagagggcggattgcttccacgagaaggggcacaagaacccgtgcaggagctcgagcaacccgtacatgatcctgttcggcgtcgtgcagatcgtgttctcacagatcccggatttcgatcagatatggtggctgtccatcgtcgccgccatcatgtccttcacctattcgacgattggcctctcgctcggcatcgcgcagaccgtcgccaacggcgggttcatgggcagcctcaccggcattagcgtcggcaccggcgtcacctccatgcagaaggacacgatcaaggcgccgccgccatcggaggcgaaggtgatgaagcgcgcgacgatggtgagcgtggcgacgacgacggtgttctacatgctgtgcgggtgcatggggtacgcggcgttcggggacaagtcgccggacaacctgctcaccgggttcggcttctacgagccgttctggctgctcgacgtcgccaacgctgccatcgtcgtgcacctcgtcggcgcctaccaggtgttcgtccagccgatcttcgcgttcgtcgagcggtgggcggcggcgaggtggccggacggcggcttcatctcccgggagctccgcgtgggccccttttcgctcagcgtgttccgcctgacatggcgcacggcgttcgtctgcgccaccaccgtcgtgtccatgctcctcccgttcttcggcgacgtggtggggctcctcggcgccgtctcgttctggccgctcaccgtctacttccccgtcgagatgtacatcgcgcagcgcggcgtgcggcgagggagcgcgcggtggctctgcctcaaggtcctcagcgccgcctgcctcgtcgtctccgtcgccgccgccgccggctccatcgccgacgtggtcgacgcgctcaaggtgtaccggccgttcagcgggtag

SEQ ID NO: 4298 - DNA, 666 bp, Oryza sativa
atgccgtcgtctcgcgctggacctcgccacgtcgtactcgtcatgctcttcttcgccgccgccgttgccgcacgaggagccgacgcggcttcgccggtgacgacgaagccgttcggttccgccgccgcggcgtcgttcctctgctcgcgctgcgccaccacggtgtacccggccgtctgctacgactccctcctcccgtacgccggggcgttccaggacagccgcgtcaggctcgcgcgcgcggcggcggacgtcgccgcggcgaggctacgggacttctcggccagcctcgacgaactcgtccacggatccggggacgtcggggcggtgacgacgccgccgcgggtggcggcggctgtgcgagactgcgtgggcacggtatcgtccgccgccgggctggcgaggcggtcgtccgccgcgctcgaccgcctggacgccggcgccgcggcggggggcggagggagcaggctggccaggtgggaggtgtccaacgcgaagacgtggctgagcgccgccatggcgaacgtcgcgacctgcgccgacgggttcgccgacgcggattcgtggtcggcggcggggatcgaggaggtggtggccggcgaggcggcgaacgtgagcaagtacaccagcaacgccctcgccctcgtcaacggcataccgttgtaa

SEQ ID NO: 4299 - DNA, 1659 bp, Oryza sativa
atggatgctgaaattatttggttgagatctaaagcaaaacttgagttatgccaaacagtcctgacattggcggctaggacacgacccacgcaatttcgaccctacagcaggggcagggccgtaaaagcacacctccacatcgaagacagcatctcgttgacccttgtccttgacactgttgaccctcacggagaacggtttcccagccgcccatcttcacaatccaacgccccaggttcctccacgtcaccctccttcccaacccgagtaggtaactttttcgcgcaggcccctcggaatcctcaaaattcccccttttatacctcccaagtcccaagccgagctccaaagctacgatctgaagagctgcgagaatccgaggcttctcttgctggtttagctccggcggcggcggcggcggcggcgatggaggaggagcagcaggaccctgcgttgctcaggagcatagcttcagagacaggagasgcctgtgccaagttcaggaaggtggtctccctcctcggcaatggcggcggcggcggcggcggcggcggcggtggtggacatgctagaggcaggatggccgggagaagcaggccttcggcggtgctgagagagaagggattcttggagagcagcagcggcggcggccagctggggatgatgatgtccggtgctgccactccgtctactagctccgccgcgcatttgcgcaaccggattggcggaggcagcggcgtgccaccggattcgttgcgggggctcgatttggtcagctcgagcagcaagggtggtgctcatcagttcgatcctccgaagctggtgcagccgttgtcggttcagttccagttcggcgctaccgcgcataggtacccgttccagcagcatcagcatcagcagaagttgcaggctgagatgttcaagaggagcaacagcgggatcagccttaagtttgatagccctagtgccaccgggacgatgtcgtcggcgttcatgtcgtcgcttagcatggacggcagcgtggctagcttggaagggaagccgccgttccatttgatcagcggcccggtcgcgagcgacccggtgaacgctcaccatgtgcccaaacggcggtkcacggggagagggaggatggaagtggcaagtgtgccacaaccggaaggtgccattgctcaaagaggaggtaaactgaagttgcgaattaagaggtcaattaaagtgcccgccattagcaacaaaatagcagacatacctccagatgaatactcatggcgaaagtatggtcagaagccgattaagggttcgcctcatccaaggggttactacaaatgtagcagcgtccggggctgcccagcgaggaagcacgtcgagcgattaagagagaatggaggaagaacatgtgattggatagtgaccggcaagatttgctcaaagaagggagggattaggtttgaagatttcaaaggaagattgacaaaaggaagtgaacaactgaaacatcgtgtaagcctggaaaaggataagcaggatttggcttttagcgtgcacaagtttacttgcaatgacttgcctctgtatgttgcttttgctttattgaaagatcaaaattttcttttggcagaagaatcattcagcattaaagctgtttctacttgctaa

SEQ ID NO: 4300 - DNA, 1203 bp, Oryza sativa
atgttcgccgccatctgccgccgccggctcgccgccctattcccccaaatccgcggtggcggcggcggcgcatatcatgtccagtccaacccccaggccgccctcctcttccacagctactcctcaaccgccgtcaccggcggctccgaccccgagccatgccccgacaccgtctcttacctggtctcctgcggcctccccccggccgttgcccgtcacacggccgccaacacccgcggcctccggatccgatccaccgagaaggcggacgccgtccgcaccctcctccgcagctacggcttctccgacgcggacgtcgcccggattgcccgcagcgccccgctgctcctcaccgtcgatcccgaccgcatcatccgccccaagctcgagttcttcgccacgatggggttccagcccagcaagctgtccaccgcgccgctcctcctcgcgcgcagcctcgagaagcacctcgtccccaccatccagttcctccgcagcatcatcggcagcgacgacgggatccgccgcgggttcttcccgcatccctcgcgcactycctggtcagcctggacaactgcatgcgccccggcggtggaagccctccacaggcacggcctcaccggccgcgaggacgtgtccaaagtcctcgtcctccagatgggcgtgctcatgctgtcgccggtccgcatcggcgaaatcttcgaggatctcaaggctatgggtatgtccatcacggacggccgctttgccaactcgttccgcgcgatgtgcagcatgaggagggcgacctggctgcggaaggtggcgctgtaccggagctttggcttgtccgagagtgaggtgttcgaggccttcaagaagcagcccacggcactgcttggcgctgacgagaccataaaaaagaatgcgtcgttcttccgcgacgcgctaaagcttgaaatgcgcgaggtaatggtgcatcctgttgttatggcatatagctttgagaagaccatcctgccaaggtgtgccgtgttgagcgtgttgatgagagaggggaagattaatccagatatccagttgcttcatgcattgcttggcagtgccaagacattctcagggaggtatgtagataggtttgctgctgatgtgccagacgttgttgaagcatatgagggtaagatcaaattcaaaggattcaagggtcagggtcagggtgtttaa

SEQ ID NO: 4301 - DNA, 1077 bp, Oryza sativa
atgttccccacagccggcggccgccggctcctcgtcctcatccgccgcgcctccgccgccgccgcggccggcgcaaaccctaaccaccaccaccaccacgccacgcttttcacccatcgctactcttcgtcccccctagcaagaacccctgaggcggaatccgccgccgcggcctcctacctcgtcgcctccgtcggcctctccccggccgccgccgccaggatctcccgcaaggcacgcttccgttccaacgccgacgccgaagccgtcgtctccctcctccgcggccacggcttctccgacgccaacatcgcgcaggtgctcccaaaaatcccgggcctcctcatcctcaacccggacaagatcctccggccaaagctcgagtacttcgcctccctcggggtggtcccctcggcactgtcccgcgcacccctcctcgcgcgcagcctggagaagcacctcgtcccgtgcgtcgagttcatccgcggcgtcgttggcaccgacgccaacctctgcgcggccatctcccggaacccctgggcactctggtgcgacattaacagcagcatgcgccccgccgtggaatcccttcgccgccacggcctcgctgaggcgaacatctccaggctcgtcgtcatcaatctcagcgctctcacgatgtcacccgaccgcattgacgggatctttggggacctggaggcgctcgagctgcccatctcgcattcgcgcttcgtgtacggcttctgggcactgtccagactcaagaggggggcatgggaggaacggatgtccgtgttcatgagatttggggtttccaggagcgagttgctcaaggcattcagggagcagcccggtatactagtgttcacagctaaaactatccagcggaagctcagtttctaccaggaaaagctgaaggttgcaccggcagatgtgattgcacatcctcttctcttgacgttcagcttggagaagaacatcatacctaaatgtgccgtgctgaatgtgctattgagggaggggaagattaagagatatgggagagagatggacttgttgagacccyttgcagcgtag

SEQ ID NO: 4302 - DNA, 1290 bp, Oryza sativa
atggcacgcttgcctcctcttgctgtggcttccggcgctctcctcctgctgttcgtctcggtctcgccgtgccgcgcggcggcaggcggcgggccgagctccgtggtgctgccggtgagcaaggacgacgcgacgcagcagtacgtgacgatgttccggcagcggacgccgcaggtgcccgtgaaggccgtgctggacctcgcgggcaccatgctctgggtggactgcgacgccgggtacgtgtcctcgtcgtacgccggcgtgcggtgcggtgccaagccctgccgcctcctgaagaacgccggctgcgccatcacctgcctcgacgcggtatccgcaggctgcctcaacgacacctgcagcgagttcccgaagaacaccgccacgagcgtcagcaccgccggcaacatcatcaccgacgtgctgtcgctgcccaccaccttccgccccgcgccggggccgctygccaccgcgccggcgttcttgttcacctgcggccacacctcgccgaaaactttgggcttctcccgcaagttcgcgctctgcctccccccggcctccgcggccggcgtcgtcgtcttcggcgacgcgccctacacgttccagccaggggtggacctctccaagtctctcatctacaccccgctgctcgtcaacccggtgagcacggcgccgtacggcaggaaggacaagacgaccaagtacttcatcggcgagacgaccatccaactgaaaggccgcgtctggagagaaaagtcaaccgattacttcatcggcttgacgggcatcaaggttaacggccacaccgtgccggtaaacgcgacgctgctggccatcgacaagaaaggagtgggcggcaccaagctaagcacggtgtccccctacaccgtgctggagagatccatccaccaggcggtgaccgacgcgttcgcgaaggagatggccgcgatcccgcgagcaccggcagtggagccgttcaagctgtgctacgacacgggagaagtggggagcacgcgcgtggggccggccgtgccgaccatcgagctggtgctgcaaagcacgggtgcctcgtgggttgtgttcggggcgaactcgatggtggccaccaagggaggcgcgctctgcctcggcgtggtggacgccggcacggagccgcagacgtcggttgtgatcggtgggcacatgatggaggacaacctgctggagtttgacctggaggcatcgcggctggggttcagttcatacctcccgtctcggcagacgacctgcaataattttcgcctcggctag

SEQ ID NO: 4303 - DNA, 1248 bp, Oryza sativa
atggcatgcctacctcctcgtctcgttctcgcttccaccgcgccagtgctagtgctactgctcttcgtcccgctctcgccgtgccgcgcggcttcaggcagtagcccgagcgccgtgctgctgccggtggacaaggacggcgcaacgcagcagtacgtgacgatgttctggcagcggacgccgagtgtgcccgtgaaggccgtggttgacctcgcgggcgccatgctctgggtgractgcgagtccgggtacgagtcgtcgtcgtatgcgcgcgtgccgtgcgggtccaagccttgccgcctcgcgaagagcgccgcctgtgccaccggctgctccggtgcggcgtccccgggctgcctcaacgacacctgcaccgggttcccggagtacactatcacgcgcgtcagcaccggcggcaacatcatcacagacaagctgtcgctgtacaccacctgccgccccatgccggttccgcgcgccaccgcgccggggtttctgttcacctgcggtgcaacgtccctgaccaaaggcctcggcgccgcggccacgggcatgatgtcccttagccgcgcccgcttcgcgctccccacgcaagtcgcctccatcttccgcttctcccgcaagttcgcgctctgcctcgcgccggctgagtcatctggcgtcgtcgttttcggcgacgcgccctacgagttccagcccgtcatggacctctccaagtcactaatctacaccccgctactcgtcaatccggtgaacggccgcgccgtgcccctgaacgcgacgctgctggccatcgccaagagcggaktgggcggcaccaagctgagcatgttgtccccttacaccgtgctggagacctccatctacaaggcggtcaccgacgcgttcgccgccgagacggctatgattccccgtgtgccggccgtggcgccgttcaagctttgctacgacgggaccatggtggggagcacccgcgcggggccggccgtgccgaccgtcgagctggtgctgcagagcaaagccgtgtcgtgggtggtgttcggggcgaactctatggtggccaccaaggacggcgcgctctgcttcggcgttgtggatggaggcgtagccccggagacgtcggtggtgatcggcggacacatgatggaggacaacctgctggagttcgacctggaggggtcacggctgggtttcacctcctacctcccgttgctgcagacgacctgcaacagctttcaccttggctag

SEQ ID NO: 4304 - DNA, 1236 bp, Oryza sativa
atggcacgctttcctcctcctctcgcttccggcgctctcctcctcctgctcttcgtcttggtctcgccgtgccgctcggcggcaggaggccggccgagagccgtggtgctgccggtgagcaaggacgacgcgacgcagcagtacgcgacggtgttccggcagcggacgccgcaggtgcccgtgaaggccgtgctggacctcgcgggcgccacgctctgggtggactgcgataccgggtacgtgtcgtcgtcctacgcgcgtgtcccgtgcgggtccaagccgtgccgcctcaccaagaccggcggctgcttcaacagctgcttcggcgcgccatccccggcctgcctcaacggcacctgcagcgggttcccggataacacggtcacgcgcgtcacggctggcggcaacatcatcaccgacgtgctctcgctgcccaccaccttccgcaccgcgccggggccgttcgccaccgtgccggagttcttgttcacctgtggccacacgttcttgaccgagggcctcgctaacggcgccaccggcatggtgtccctcagccgcgcccgcttcgcgttccccacgcagctcgcccgaaccttcggcttctyccgcaggttcgcgctctgtctcccgccggcctccgcagctggcgtcgtcgtatttggcgacgcgccttacgtgttccagcccggcgtggacctctccaagtcgtcgctcatctacacgcctctgctcgtcaacgcggtgagaacggcggggaagtacacaacgggggagacgtcgatcgagtacctcatcggcttgacgggcatcaaggtgaacggccgcgacgtgccactgaacgcgacgctcttggcaatcgacaagaatggcgtaggcggcaccacgctgagcacggcgtctccttacaccgtgctggagacctccatctacaaggcggtcatcgacgcgttcgcggccgagacggccacgatcccccgtgtgccggccgtggcaccgttcgagctgtgctacgacgggcgcaaagtagggagcacccgcgcggggccagcggtgccgacgattgagctggtgctgcagagggaggccgtgtcgtggatcatgtacggggcaaactcgatggtgcccgccaagggcggcgcgctctgccttggcgtggttggacggcggccccgcgctgtatccgtcatcggtggtgatcggcgggcacatgatggaggacaacctgctggagtttga

SEQ ID NO: 4305 - DNA, 1113 bp, Oryza sativa
atggcacgcatgcctcctcctctcgctgtcgcttgcacggctctcctgctcctcctcttcgtctcggtctcgccgtgccgcgcggcgtcaggtggcgacccgtccgccgtgctgctgccggtgagcaaggacgacgcgacgcagcagtacgtgacgatgttccggcagcggacgccgcaggcgcccttgaaggccgtgctggacctcgccggcgccacgctgtgggtggactgcgaggccgggtacgtgtcgtcgtcgtacgcgcgcgtgccgtgcgggtccaagcagtgccgcctcgccaagaccaacgcgtgcgccaccagctgcgacggcgcgccgtcgccggcctgcctcaacgacacctgcggcgggttcccggagaacacgctcgccgccaccttccgcttctcccgcaagttcgcgctctgcctcccgccggccgccgcggccggcgtcgtcatcttcggcgacgcgccctacgtgttccagcctggtgttgacctctccaagtcgctcatctacacaccactcctcgtcaacccggtgagcacggggggcgtgtccaccaagggagacaaatcaaccgaatacttcgtcggcttgacgcgcatcaaggtgaacggccgcgccgtgccgctgaacacgacgctgcttgccatcaacaagaagggagtgggtggcaccaagctgagcacggtgaccccctacaccgtgctggagacctccatccacaaggcggtcaccgacgcgttcgcggccgagacgtccatgatcccgcgagtgccggccgtggctccgttcaagctgtgctacgacgggagcaaggtggcgggcacacgcgtggggccggccgtgccgacggtcgagctggtgttccagagcgaggccacgtcgtgggtggtgttcggggcgaactcgatggtggccaccaagggcggcgctctctgcctcggtgtggtggacggcggcgtggcgtcggaaacgtcggtggtgatcggcggtcacatgatggaggacaacctgctggagtttgacctggtgggatcgcggctggggttcagctcctccctcctgttccggcaaacgacctgcaacaactttcgcctcggctag

SEQ ID NO: 4306 - DNA, 1190 bp, Oryza sativa
atggccaccttctccggcaccgaccgcctccgcgacctccacgccttcgacgacaccaaggccggcgtcaagggcctcgtcgacgccggcgtcaccaccgtcccctacttcttccgccaccaccccgacccactccccgtcgccgcgccgtcggaggccgccgcggccatccctctcatcgacctcgccaaggccgacgtcgaccgtggccacgtcgtctcccaggtgaggtccgccgccgagtcggccgggcttttccaggtggtgaaccacggcgtcgccggggagctcatggacgcgatgctcgcggcggcgcggcggttcaacgagcagcccgcggaggcgaaggcgccctactacaccagggacctcggcagcaaggtccggttcttctgcaacttcgacctgttccagtcgccggcggcgcattggcgcgacacgctgtacgtggagatggtgcccgacgcgccctcgccggaggagatcccgccgccgctcaggggcttcgcggaggagttcgccgcggcggtttggcggctcggcgarcgggtgaccgagctgctctcggaggcgctgggccttccccccgggtacctcgccgagcacgccgggtgcatggacggcatgagcatggtggcgcagtactacccgccgtgcccggagccggagaagacgatgggcacgacgcggcactccgacccgagcttcctcaccgtgctgctgcaggacgagtccggcgggctccaggcggtgctcccgcggcccccggaggagcggtgggtggacgtgcccccggtggccggcgcgctggtggtgaacgtcggcgacctcctccagctggtgtcgaacggccggctccggagcatggagcaccgggtgctgcccaccgccgccagcgcggcgcgggcccgcgtggcggtggcgtgcttcttccggctcgagtactcggcgtcgttgacgaggccgaggtcgtacggcccgatcgtggattccggcgaaggcggcgcgcggcgggcggcggcggtgtacaggagcacgacgccgagggatttcctggcgtacttcaacggcaaggggctcgacgggcggtcggcgctggagcatttcaggattccggaggcggctgcggcttcttccgccgtcgacgtcgtctcctcctccaccaccgccgccgcatccattccacggta

SEQ ID NO: 4307 - DNA, 1194 bp, Oryza sativa
atggcggggtacccggaggagaaccagcacgggatgaacgggtacgaggaggaggaggaggtggaggaggtggaggggttcgacgaggagggtcgacccggtagacggggcggcggcggtcgggatgggggcgatggcggcgcgtatggcgacgccagcggggacgacgggagggcgcccggcggggactcgtcggggaagattttcgtcggaggcgttgcttgggagacaaccgaagaatcattctccaagcattttgagaagtatggggctataactgattctgtaattatgaaggacaagcatactaagatgcctcgtggatttggatttgttacattttccgatccatctgttatagacaaggttttggaggatgagcacgttatagatggaagaacggttgaagttaaaaggacagtcccaagggaagaaatgtcatcaaaagatggtccaaagacaaggaaaatctttgttggtggattaccttcatcactaactgaagatgagttgagggagcacttctccccatatggtaagattgttgaacatcaaataatgcttgatcatagcactgggcgttctagaggatttggttttgtcacttttgaaagtgaggattctgtggaaagggttatatcagagggaagaatgcgtgaccttggtggaaagcaggttgaaataaagaaggctgagccaaagaaacatggtggtgatcacagtagtaatgggagatctagtcatgggagcgggggtggttaccgcagttcataccgtagtggtggagctgctgcttctggtggtggaggcggaggtggtggtggcggcagtggcagcagtggtggctatgggtatggtgctggttaccgatcagctggaggaggttattatgatagtactgcatatggttatggcagaggagggtatggctatggaggtaatgctggatttggatcaggatatggtggtggttatggtggctccttgtatggaggtgcctatggtgcttatggggcatatggtggtggtgcctatggagggggtgcctatggcggaggtgcttatggtggtggtgcctatggtggcgctccgggtgcctatggtggtgctggaggatatggcagttatggtggagctggagcaggaggtgctggtgggcggggttccagcaggtaccatccatatgggaaatga

SEQ ID NO: 4308 - DNA, 930 bp, Oryza sativa
atggagcaagaagctgccatggtcgtcttctcctgcaactccggctccggtgggtcgtcgtcgacgaccgattcaaagcaagaggaggaggaggaggaggagttggccgcaatggaggaagacgagttgatccacgtcgtccaggcggcggagctgcggctgccgtcgtcgacgacggcgacgcggccgtcgtcgcggtacaagggggtggtgccgcagccgaacgggcggtggggggcgcagatctacgagcggcacgcgcgggtgtggctcgggacgttccccgacgaggaggcggcggcgcgcgcctacgacgtggcggcgctccgcttccgggggcgcgacgccgtcaccaaccgcgccccggcggcggagggcgcgtccgccggcgagctcgcgttcctggccgcgcactccaaggcggaggtcgtggacatgctgcggaagcacacctacgacgacgagctccagcagggcctccgccgcggctcgcgcgcgcagccgacgccgcggtgggcgcgcgagccgctgttcgagaaggccgtgacgccgagcgacgtcggcaagctcaaccgcctcgtggtgcccaagcagcaggccgagaggcatttcccgttcccgctccgccgccacagctccgacgccgccggcaagggcgtgctcctcaacttcgaggacggcgacggcaaggtgtggcgattccggtactcgtactggaacagcagccagagttacgtgctcaccaaggggtggagccgattcgtgagggagaagggcctccgaccaggcgacaccgtggccttctcccggtcggcggcggcgtgggggacggagaagcacctcctcatcgactgcaagaagatggagaggaacaacctggcaaccgtcgacgacgatgccccgtgtcgtcgtcaagctgttcggcgttga

SEQ ID NO: 4309 - DNA, 1515 bp, Oryza sativa
atgcagcctcccatcctcctcccgcttctcctcctcctcctcctcctcgccgccgcctcgccacggccggttctctcccgccgccacgcctcgccgccgctcgccaccgagacgctcgacgtcgccgcgtcgctgtcccgggcgcgggccgcggtatccgcggaggccgtgccgctccaccagtccgccgccgccgccgtgtccacggaggtcgtcggggaggagcacgaggaggggcgcctggccctgcggctccactcccgggacttcttgccggaggagcaggggcggcagcggcacgccagctacaggtcactcgtgctggctcgcctccgccgcgactccgcccgcgccgccgcggtgtcggcccgcgcggcgatggcggcggacggggtgagtcggttcgacctggtgccggccaacgtcacggcgttcgaggcgtcggcggcggagatacagggccccgtggtgtccggggttgggctcggcagcggcgagtacttctcccgcgtcggcgtcggcagccccgcgcggcagctgtacatggtgctcgacaccggcagcgacgtcacctgggtgcaatgccagccgtgcgccgactgctaccagcagtccgacccggtgttcgacccttccctctccacctcctacgcctccgtcgcctgcgacaacccgcgctgccacgacctcgacgccgccgcctgccgcaactccaccggcgcctgcctctacgaggtcgcgtacggcgacggctcctacaccgtcggcgacttcgccaccgagacgctcacgctcggcgactccgccccggtctccagcgtcgccataggctgcggccacgacaacgaggggctgttcgtcggcgcggcggggctgcttgccctcggcggcgggccactctccttcccgtcccagatctccgccaccaccttctcctactgcctcgtcgaccgtgactccccctcctcgtcaaccctccagttcggcgacgccgccgacgcggaggtgacggcgccgctgatccgcagcccgcggacgagcacgttctactacgtgggcctctcgggcctctccgtcggtggccagatcctctccatcccaccctcggcgttcgccatggacagcacgggcgccggcggcgtcatcgtggactccggcacggcggtkacgcggctgcagtcgtcggcgtacgcggcgctgcgcgacgcgttcgtccggggcacccagtcgctgccgcgcacctccggcgtgtcgctgttcgacacgtgctacgacctgtcggaccggacgagcgtggaggtccccgcggtgtcgctgcggttcgccggcggcggcgagctccggctgccggcgaagaactacctgatcccggtggacggcgcggggacgtactgcctggcgttcgcgccgacgaacgcggcggtgtccatcatcgggaacgtgcagcagcaggggacccgcgtcagcttcgacacggccaagtccaccgtcggcttcaccaccaacaagtgctaa

SEQ ID NO: 4310 - DNA, 2688 bp, Oryza sativa
atggccttgtttatatacttcgactataagaagcagattaacatcttcttgaggtacaagcaggcagttcagaagagagttaaatgggttggcgctggtaaaaaggatgctatatggacaaaaacacacgagcgaaatgctcgtcgtgttctcaacctgatgatagagttagaaggtttatgggtgaaaatgggacaatatttatccacaagagcagatgtgcttcctgaaccctacataaatgtcctcaagcagttgcaggactcgcttcctcctcgccctcttgaagaggttcgtggaaccatagagaaagaacttgggaaacccatgaatgatctgtttgctaattttgtgctggatcctctagcaactgcatcaatagcacaggttcatcgtgcaactcttgtagatggcagagaagtagttgtgaaaatccaacatgatggtatcaaagatatcatattagaggatttgaagaatgcaaaatcattagttgaatggattgcatgggcagagcctcaatataattttaacccgatgatagatgaatggtgcaaggaggcaccaaaggaacttgatttcaaccatgaggcagagaacacaaaggctgtctccagtaatcttagtcgaaaaaccaattgcgagagtggtgctgtctctagtgctgttgacgtactgattccagaagttattcagtcaactgataaggttctaattttgcaatatatggatggaattcgtttgaatgacaatgattcgttagaagcatatggtgttgataagcaaagacttgtggaggagataacccgtgcatatgctcatcaaatatacgttgatggcttctttaacggcgatcctcaccctggcaattttcttgttagcaaggaacctccacacaagccgattctccttgattttgggcttactaaacgcatatctcaatcaatgaggcaggcactagcaaagatgtttttgtcatgcgctgagggagaccatgtggcactgctgtcagcctttgcggagatggggcttaagctgcgggttgacatgcctgagcaggctatggagatcgctacagtattttttcggcagtccactacagcaaatgaagcaaaggagaacataaagacattgaatgaccaaagagaacgaaatgtcaaggcacttcaagaaaagatgaaaatgaataaaaaggaggttcaacgtttcaatccagttgatgctttccctggtgatgcaattatattcatgagggttttgaatcttcttagagggctatcagcatcactaaatgttaggatagtttatctagacatcatgaggccatttgctgaatcaactttgctagggagtatgacacgtgggcccacagctaacagtcagtggatttatgactcacctgttaactcagaggtggagtctaaactgcggaaccttctgcttgagttgggaagcaacaaaattttaggaatacaagtttgtgcttataaagatggaaaggtcataatagataccgctgctgttttttcagtgacaaagggtatcactgctggcatggtgcattggcttgttgacaaagggaagttgaagtatgaggagactgttgccaatatatggccaaaattcggaactaacaaaaaagagctaataaagactctgatttgcaattttctactaaaggttcatcatcttctgaatcatacatctggtttacataatgcattgggagatgtgatgaagagtgatccgttgttgcatgcgtccggaaagaagcttcaagaggtcctagaagaggccattgttcatcctcttcacattaacggggagctatatattggcattcctccaggtgtcgaatctcgccttgcggcactgacagtcgacatggaggagctcgagaagctgtcaggattcagagcaggaccagacgtcccacaggagctgctcagcaatgtcgcccagatggccaccggcctacctgtcctcttcaacacgctcaacatccgccgcgccatcctccccgctgccaatggccactgctcggcgcgcgctctggctcgatactacgccgcgctgggggcaggcggcgccattcctccgccgcactccggtggtggctccaagccgccactcggcagccatgtccacacccccaagttccccaccatgccgtccaagaagaagaagaagggaggttcgaagaatgatgtcggcgtcgctgacaaggacgggtacacccagctccgcaccagcgacggcagcgacgaggggtcgacggtgtcagcggtggtggccgggaacggcagtggcagcggcagcagcatgttcgtcgacggcggcaccaagatgctcgacgcgttcatgggcgtcggcgacttctccggcatgatccacccgaacggcaagttcgggctcgggttcaggaggtacggctatggcgccggcgctggcgagaaggtggcgacgacgacgttcgggcactccgggatgggcgggtcgacggggttctgcgacgtggagcacgggctggccatggccgtgacggtgaacaagatgtcgctgggcggcgtgacgcggcgcgtggtccggctggtgtgcgaggagctgggcgtgccggtgcccgacgagttctccgtcgccggcgacaagggccccgacatggtgctcaacctcgcgccgccggagtag

SEQ ID NO: 4311 - DNA, 1020 bp, Oryza sativa
atggagtaccactaccgaacagtagtttcccagcagcaaaacttcacgaggccttgctttggctggtctcgacggatcgcacaacaattaactgccagatcgatggcattcctcgtggagaggtgcggcggcgagatggtggtgtccatggagcgttcgcacggccgttcgacgactacggcggcggcggtgacggcggcgccggcgccgttcctgagcaagacgtaccagctggtggacgacccgtcgaccgacgacgtggtgtcgtggggggaggacgaggccaccttcgtggtgtggcggccgccggagttcgccagggacctcctcccaaactacttcaagcacaacaacttctccagcttcgtcaggcagctcaacacctatggtttcaggaagatagtggctgacaggtgggagttcgccaacgagttcttcaggaagggcgccaagcacctcctctcggagatccaccggaggaagtcgtcgtcttgctcacagccacagccgccgccgccattcccgatgcaccagcattaccccctcagcctcttctcgccgccgacgacgccgaggtctcctccggttggagcagcagcagcagcagcctaccatttccaggaagagtactgctcctctccggcggactacgccggcggcggaggcgacttgctggcggcgctgtcggaggmcmaccggcagctgcggcggcgcaactcgctgctgctgtcggagctggcgcacatgaggaagctctacaacgacatcatctacttcctgcagaaccacgtggagccagtggcgccgccgccgctggcggccgccaccagctgcaggctggtggagctcggcccgtcgacgaccgaacgccgccgttgcgccgcctcgccgtccggtgacaacgacgacgacgcggcggtgcggctgttcggcgtccggctggacgacgaccatggcaagaagaggagggtgcagctggtgcaggaagacgaaggagacgagcagggaagcgaggggtag

SEQ ID NO: 4312 - DNA, 1326 bp, Oryza sativa
  misc_feature (1)...(1326): n = A,T,C or G
atggcgatccgcgcgaggtcctcctcctnacgccgccgcggcggtcgcgctggcgctcgcgctggcgtccgtcgccgctgtcgccggcgaggtcttcttccaggagaagttcgaagattgtgggaaaaaaaacgtggttgggttgattcggatcgaaaaatgttagatggatgggaaagtcggtgggtcaagtcagaatggaagaaggatgagaacatggctggtgaatggaaccacacatctgggaagtggaatggagatcctgaggacaaaggtatccaaacctctgaggactacaggttctacgctatttcagcggagtacccagaattcagcaacaaggataaaaccctggtgctgcagttctctgtaaagcatgagcaaaagcttgactgtggtggtggatatgtcaagttgcttggtggtgatgttgaccagaagaaatttggtggggacacaccgtacagcattatgtttggaccagacatctgtgggtacagcaccaagaaggtccatactatctttactaagaatgacaagaaccatttgatcaagaaggatgtcccctgcgagactgatcagctgtcccatgtgtacactttgatcatccatcctgatgctacatacaccatacttattgacaatgttgagaagcaatctggcagcatctacgagcactgggatattctgcctccgaagcaaatcaaggacccagaagctaagaagccagaggactgggatgacaaggagtacattcctgaccctgaggacaagaagcctgagggatacgatgatattcccaaggaaatccctgaccctgatgctaagaagcctgaggactgggatgatgaggaagatggtgagtggactgcaccaaccattcctaaccctgagtacaagggaccatggaagcaaaagaaaatcaagaaccctaactaccaaggcaaatggaaggcaccgatgatcgacaacccagacttcaaggatgatccatacatctatgcttttgacagcctgaagtacattggcattgagttgtggcaggtcaaatcaggtactctgtttgacaacttccttattactgacgaccctgagttggccaagacattcgcagaggagacatggggcaagcacaaggatgctgagaaggctgcttttgacgaggcagagaaaaagaaggaagaggaggaagctgccaaggccggtgaggacgatgatgatttggatgacgaggatgctgaggatgaggacaaggccgatgagaaggctgactctgatgcagaggatggcaaggattctgatgatgagaagcatctctctctgtag

SEQ ID NO: 4313 - DNA, 1386 bp, Oryza sativa
atggtcggcccgtctggcgccgccgcggcgtcctcgtcgtcgtcgtccacctcctcgacgacgtcgtcctcgtcgcagtcgtcgtcgactcgtggaggctacatgctgagcgaccggttctacagcccgcctcacgtccgccgccagcagatgctgctgctgcaacagcagcagctgctgcaggggcaacggccgccttcgctctccccctcgccggcgacggcgcccagggcggcgaggcagaagccgctgccgtcgccgtcgccgccgccgccgcctcccgcaccggcggaggcggcgaggcagaaggaggtagagaggcgggtggacgcggttgttcagtcaaagccgtcggtgtcgccgttgccgtcctccgcggacgtgaagaggccgccggcggcggaatcggcgccggagccagcgcgggcggcggaggaggaggcggcggggaatctggagaggttcctcagctccactacgccatccgtgcccgtccagtacttgcccaagacaagcatgagagggtggaggagtggtgatgctatgaattcatcaccatatttctgccttggagatctctgggaagctttcaatgagtggagtttttatggggccggcgtccccgttgtgttaaatggcaaagattccgtcatacagtattatgtgccgtatctctctgccatacaactctatgcagacccatcaaagcattcaacaagaatcaggcatccttgggaggaaagtgatgaggaatctatggatactagcagcgaaagtagcagtgggactgatgctgaccaattaagaggtttggagaatggtggctttcaaagggaggacagtgaatcgcattttccatctactcgtccattattcgagtatcttgagaaggatcctccttatggtagagaacctttgacagacaaggcaaggcccctccctcctcatttgacaaaagaaaatttgccatatgtatcaattcttgcaagtaaatttccggagttaatgtcaatcagaagctgtgatcttctgccaactagctggatgtctgttgcatggtatatctcttatacttcagattcatataatttacagcgtcattttatcagtagcatctgtggtcttgatgctgaccccagtacaccagcctgccccccttctgggggctttaacagctgcatgaatgcagctggtaagctaacattgcccgtctttggactggcaccgtacaagttgcggagttctgtttggtcgtcgaatgggcctcatgagcagcagctcgcagcctcattgatgcaggcagcggacgactggctccgggaccgtcaagtgcatcatccagacttccggttcttccttacgcactacaacaccgtatggagataa

SEQ ID NO: 4314 - DNA, 795 bp, Oryza sativa
atggcggacggcaaggtagcttgcaagcacctcgtcctggtccacggcgcgtgcatcggcggctggacctatttcaaggtggcgacgcggctccggtcggccgggtaccgcgtcaccgcgccggacctcggcgcgtcgggcgtcgacccgcggccgctgcgcgaggtgccgacgttccgcgactacaccgcgccgctgctgggcctcctcggctccctccctccaggggagaaggtggtcctcgtcggccacagcctcggcggcatcaacgtcgcgctggccgccgagctgttcccgggacaagatcgccgccgccgtgtttcctctgcgccttcatgccggaccacacgtcccgggccgtcgcacgtgctcgaaaagttcatcgaggggaagtggctggactggatggacacggagtttaagccgcaggatgcagagggcaagctccccacttccatgttgttcgggccgcagatcgcccaagaaaggctgatgcagctgtgctcgccagaggacgtcactctcgcgggatctctgctgagggtgagctcgatgttcgtggaggacctgcaaaagcagcagccgttcaccgaggggcgctacggctcggtgcggaaggtgtacgtggtcgtaaaccaggacctcgccataccggaggggttccagcggtggatgatcgggaacagcccggtggatgaggtgaaggagatcgatgcggcggaccacctcgtgatgctctcgaggcccgacgagctggcgcggtgcctcgccgacatcgccgaaagctacgcttga

SEQ ID NO: 4315 - DNA, 1458 bp, Oryza sativa
atggcgaagccgacggtggtgttgctgcccgtgtggggcgccggccacttcatgcccatgatcgaggccggcaagcggctgctccgcggcagcggcggcgcgctgtcggtcaccgtgctcctcatgccggcgccgacgccggatgcggcggtcgacatcgcggcccaggtgaagcgcgaggaggcctccggcgccgacgacatcagcttccggcacctccccgccgtcgacatgccgaccgtccacaccggcatcgaggagtgggtctccctcatactgcggagccacgggccccacgtgagggccgccatcgccgggctcgattgccccgtggccgcgctcgtcaccgacatcttctgcacgccggcgctcgacgtggccgccgagctcggcgtgccgtcctacgtgtacttcacctccggcgccgtcatgctggagctgctgctgtactcgccggtgctcgacgaggaggtgcccggcgaattctcggagatggatggcgcgctgaacattcccgggctgccgccggtgccgccgtccgtgctcccggcgacgatgcttcacaagaagaagatgtcgacatacaggtggttcctcgaaaccgggaggtgctacatgaaggccaccggcttcatcgtcaacacggcggcggagctcgagcagagcgtcatcgacgccatcgccgacggccggtgcacgcgcggggtgcccgcgccgacggtgtacgcgatcggcccggtgatcgcgctcaccccgccgccggagcagccgcacgagtgcgtgcggtggctggacgcgcagcccccggcgtccgtgctgctcgtctgcttcggcagcaagggcctcctgccgccgcccaaggtgcgggagatagccgccgcgctggagcggagcgagcaccgcttcctgtgggtgctgcgcggcccgcccaaggacagccggccggggcaacgggtgcccacggacgccatgctcgacgagctcctccccgaggggttcttggacaagaccaaggggagggggctcgtgtggccgacgcgggcgccgcagaaggacatcctcgcccacgccgccgtgggcgggttcgtgacgcactgcgggtggaactccatcctcgagagcctctggttcggcgtgccgatgctgccatggccgctcgacaacgagcagcacgcgaacgcgttcctgctggtgtccgtcctgggcgtcgccgtgccgctgcggctggaccgggagcgggacaacttcgtggaggcggcggagctggagcgtgcggtgagcaccctgctgggcggcggggacggcgaggcggggaggaaggcgagggagaaggccgtggccgtgaaggcggcgtgccggaaggccgtcgagaagggcgggtcgtctgacgccgcgttccagaggctcgccgaggaaatccggcgaggtgccgttaatgtcccgaagaagcgaaactga

SEQ ID NO: 4316 - DNA, 1545 bp, Oryza sativa
atggccggcggcgtaagcgacggcggcgcggcccacggcgcktcggggaggctggagagcatcctgtcggactcgtcgatgccgctcgcccgccgcgcgtgggcggcgacgaccatcgagctcggcctcctgacgcggattgcggcgccggcggtggtgatgtacatgatcaactacctcatgtccatgtccacgcagatcttctccggccacctcggcaacctcgagctcgccgccgcctccctcggcaataacggcatccagatgttcgcctacggcctcatgtgccaaattttggcaagttttgccatgattaattttggtaagctcggaatgggtagcgccgtggagacgctgtgcgggcaggcgttcggtgcacacaagtacgacatgctgggagtctacctgcagcgctccgccgtgctcctgaccatcaccggcgtcccgctcgcggtcatctacggcttctccgagccgatcctcgtcttcatggggcagtcgccggagatcgcccgcgccgcggccatcttcgtctacggcctgatcccgcagatcttcgcgtacgccatcaacttccccatccagaagtacatgcaggcgcagagcatcgtgctgcccagcgcctacatctccgccgccacgctcgcgctgcacgtgctgctgagctgggtcgtcgtctacaaggtcggcctcggcctgctcggcgcctcgctggtgctcagcatcagctggtgggtcatcgtcgcggcgcagttcgcctacatcgtcaccagcccgacgtgccggcacacctggacgggcttcacctggcaggcgttcgccggcctctgggacttcctcaagctctcggcggcgtccgccgtgatgctctgcctcgagtcgtggtacttccaggtgctcgtgctcatcgccggcctactcccgaaccctgaacttgcattggatgccctatctgtgtgcatgacgatttcaggctgggtgttcatgatctcagtaggattcaatgccgcagcaagtgtgagagtgagcaatgagcttggtgcgggcaacccgaaggctgcatatttttcagtgtgggtcgtgactatctcctgtgcgataatctctgccatccttgcggttgtgatcctctgcctccgcaactacattagctacttgttcacggagggagaagttgtgtcaaatgcggtggcagatctctgcccgctcctcgccatcacgctcattctcaatggaatccaaccagttctgtccggagtggctgttggatgtggatggcaacaatttgtagcttacgtcaacattggctgctactatatcgtcggtgttccccttggtgttcttcttgggttcgtcttcaagcttggtgtaaagggcatctggggtgggatgcttggaggaacatgcatgcagacggccattcttgtctgggtcaccttgagaactgattggaacaatgaggtcgaggaagcacagaaaaggttgaacaagtgggaggacaagaaaaaggagccacttcttacagggattagggacaacaactaa

SEQ ID NO: 4317 - DNA, 1020 bp, Oryza sativa
atggcgctcctctccaactcgaggaggacacgcacgttgccaccacaggctacgcaaaattctctcccttcctcctccaccacctccactccgacgatcctcctcctgatcctgtgccggccggcgatggcgtaccggttgctggagctcacgctggtctccgcgagcgacctcaagaaggtcactctcttctcgcgcatgcatgtctacgccgtcgcctccatctccgggagcaacgtccccatgcccatgcacggcacccacgccgaccgcaacggcggcagcaaccccgcgtggaacaccgtgctccacttccccgtccccgcccgcttcgacacccgcggcctcgccctccacgtccagctccgcgcccggcgctccttcggcggccaccgcgacgtcggggacgtgttcgtgcccctcgacgacctcctcgccggcgcgcacgacggcggcgagccgaggccggctagctaccaggtgcgccgccccatgtccgcccgcgcgcacggcacgctctacttctgctacaggttcaccgacgtcaagcatcccgccctcgaagccatcgaggccgcgaccgcgaccgcgacgagcagcgccaccaaacaagggcagtacgtgcccatgtacgcgcaggactctgatgagaaggcgacggagaagagcgtgtcgtcgccggtcaccgcctacccgccgccgtcgaacgccgtggtagcgcacccgccggtcgtgccgtacggcgcgccgtacggaggagggtacccaccgcatcagcagcagtacggttacgcgggtcagccgccgtacgcgtacaacgccggcccaccgccgccggcgacgtacagctacgcggcggcacaacagccggcggcgaggaaaggtggacgaatgggcatgggcctcggactcgggctcctcggcggcgcggtcggcgggatgatgctcggggaaatggtcggcgacatggaggctgacgccgcctacgacgccgggttcaacgacgcactggaattttag

SEQ ID NO: 4318 - DNA, 3189 bp, Oryza sativa
atgggcaagggcgggcaggaggagggcaagcggcgggacggatccgacgcatccgggtcggagccggccgcagcggccttcccggcgtgggcgcgcacgccgagcgagtgcctcgcggagctgggcgtcgcggcggaccgcgggctgtcctccgaggaggcggcggcgcggctgcggcggtacgggcccaacgagctggagcggcacgcggcgccgtcggtgtggaagctggtgctcgagcagttcgacgacacgctcgtgcgcatcctcctcgccgccgccgtggtgtcgttcgtgctcgcgctctacgacggtgcggagggcggcgaggtcggggcgaccgccttcgtggagcccctcgtcatcttcctcatcctgatagtgaacgccgtcgtcggagtctggcaggagagcaacgccgagaaggcgctcgaggcgctgaaggagatccagtccgagcacgcaaccgtcaagcgcgacggccggtggtcccatgggcttccggcgcgcgacctcgtccccggagacatcgtggagctccgtgttggcgacaaggtcccggcagacatgcgtgtgctccagcttatcagctccaccctccgtgtcgagcagggttccctcactggtgagactgcttcggttaacaagaccagccataaaatcgagctggaggacacagacatccagggaaaggagtgtatggtttttgctggcactacaattgtcaacggcagcgctgtctgtgttgtgacgggcactggaatggacactgaaataggcaagatccatgcccagatccaggaagcctcacaagaggaagatgacacgccactgaaaaagaagctcaatgagtttggggaggcactgacagccataattggggtgatctgtgccttggtttggcttatcaacgttaagtatttcctcacctgggagtatgtggatgggtggcccaggaattttaagttctcatttgagaagtgcacgtattactttgagattgcagtggcactggctgttgcagcaattccagagggcctgcctgctgttatcaccacatgcttggcgctcggcaccaggaagatggcacaaaagaatgcacttgtgaggaagttgccaagtgttgagacactgggttgcactacagtgatttgctccgataagacaggaacattgaccaccaaccagatgtcagcggtgaagcttgtggcaattgggaggtggcctgatacacttaggagctttaaggttgatggaaccacttatgatccaagtgacgggaagataaacgagtggccaagtttgagcatggatgaaaatctccagatgattgctaagattgctgcagtttgcaatgatgcaagtattgctcactctgagcatcagtatgttgccactgggatgcccacagaggctgctttgaaggttttggttgagaaaatgggccttcctggtggatatactccatccctggattcatctgatttgctaaggtgctgtcaatggtggaacaatgctgctaagagagtagctactctggagttcgatcggactagaaaatcaatgggagttattgtaaaaaaagcagactctggaaagaatttgctgcttgtcaagggagctgtagaaaatttgctagaaaggagtggctatattcagttgcttgatggatctgttgtgctcctggatgaaggtgccaaggcgctcatattatcaacacttcgtgaaatgtctgctagtgcattgcgatgtttgggttttgcgtacaaggaggatttggcggaatttgcaacatatgatggtgaagagcatgcagctcacaaatatctacttgatccttcatactactcttccatagagagtaatttgatattctgtggttttgttggtctaagggatcctccccgagaagaagtccacaaagcaattgaagactgtagagctgctggaatacgtgttatggtgattactggtgataacaaagaaacagcagaggcgatatgccgtgagattggagtttttggttccacggaagatattagttcaaagagcttcacagggaaggaattcatgtctctttcagataagaagaaactcttaaggcaaacaggtggccttctcttctctagggctgagccgaaacataagcaggagatagttagattgctcaaagaagatggtgaagtggttgctatgactggtgatggagtgaatgatgcaccagctctgaagttggctgacattggagttgctatgggcattacagggactgaggttgcaaaagaagcttcagatatggttcttgcagatgataacttcagtacaatagtcgcagctgttggtgaagggaggtcaatctacgacaatatgaaggcatttataagatatatgatctcttcaaacatcggggaagttgcttccatatttctaacgtcagctttaggtattcctgaaggtctcatccctgtgcaacttctgtgggtcaatcttgttacagatggtcctcctgcaacggctttggggttcaacccacctgataaagatatcatgaagaaacctccacgaaggagtgatgactcgttgatcactccatggatcctattccgttatatggtcattgggatgtacgttgggattgccacagtgggagtgtttatcatttggtacacacatggctctttcctgggaattgacctggctggtgatggtcactctcttgtctcgtactcccagctctcaaactggggccagtgctcctcatgggagggtttcaaggtgtcaccattcacagcaggtgcccgtacattcaacttcgatgtgaacccatgtgattacttccagggcggcaaaattaaagcgacaaccctctccctgtctgtcttggtggccattgagatgttcaactcgctgaatgcgctgtcggaggatggtagccttctgagcatgcctccgtgggttaacccttggcttcttctggcaatgtcggtttcattcgggctgcatttcttgatcctctacgtgccattccttgcccaagtctttggtattgtgcccctaagcttcaatgaatggcttttggtgatagcagttgctttcccagtggttctcatcgacgaggtccttaaatttgtggggcggtgcttgacagcccgtgccagaaaacaatcaggaaagcagaaggaagattag

SEQ ID NO: 4319 - DNA, 1725 bp, Oryza sativa
atggctccgaccgcatctcttctcctctccccgaggccgctgccggcgagccgccgggtcccctcgctcccggcgctctcggcttccggtcgcctgcgcctccgccgcgcccgcgccgacacacggctccgcgtggcggcgccgccgtccgtccccggggaggcggaccaggcgcccggggagaccgagccgagcacgtcgtcggccgacgagaagttcgtgtggagggaccactggtaccccgtgtccctcgtcgaggacctcgaccccagcgtgcccaccccgttccagctcctcaaccgcgacctcgtcatctggaaggacccaaaatccggcgagtgggtcgccctcgacgaccgttgcccccatcgcctcgcgcccctctcggaggggcggatcgatgagacggggtgcttgcagtgctcataccacggctggtcattcgatggctccggcgcgtgcacccggatcccgcaggcggcgcccgaggggccggaggccaaggctgtgaggtcgccgaaggcgtgcgcgatcaagttccccaccctcgtctcgcaagggctgctcttcgtgtggcccgacgagaatgggtgggagaaggccacggctaccaagcctccgatgttaccgaaggagtttgaggatcctgcgttctccacggtcactggtcgaagagatcgagccaggcctttgccattcaagatggaatcaagtggtgcatggggatattcagggtcaaattctggaaaccctcgcatcagtgcaacttttgtggccccttgctatgcactgaacaaaattgagatagacacaaagttacccatttttggagatcagaaatgggtcatatggatttgctctttcaacattccaatggccccagggaagactcgttctatagtttgtagtgctcggaactttttccagtttagcatgccaggaaaagcatggtggcagcttgtccctcgatggtatgagcattggacttcaaatttggtctatgatggtgatatgatagttctgcaagggcaagagaagattttcttgtctgcatcgaaggagtcttctgcagatattaatcagcagtacacaaagatcacgtttacacccacgcaggctgaccgttttgttttggcattccgggcatggctaaggaaatttggtaacagccaacctgactggtttggaaatcctagccaagaagtgttgccttccactgtcctttcaaagcgtgagatgctagatagatatgagcagcacacactgaaatgctcatcttgcaaaggggcatacaacgccttccagactctgcaaaaggtcttcatgggagcgacagtggcgttctgtgcaactgctgggattcctgcggatgttcagttcagattattgcttgccgctgctgctttgctcgagggatcaccgcttgtggaggctcaaaatgacaagttttcagcttccatggtgaataaggtgttctgcaacagtagtatgagtgattcaacatctcaacagcttacatcggatactacaatcgaggttacaattgatataccatttccatttcgagcattacctgttgaagccattgaatcaagtggcaagcaagttcttgagcaactactccgagtcatgcttccacgatttttgaagcagcttgttaaagactaccaagcatgggcttcgggtgattcttcaaggaaaccacttggcactggtgaaatatga

SEQ ID NO: 4320 - DNA, 783 bp, Oryza sativa
atgacgacgacgacggcgacgaacacggcgacgaacacggcggcagccatggaggtccttgcctggtcctcctgggccggcggcggcggcggccgctaccgcaggctcggcccgccgccgcagggcgtcgccgccggtgccgtcctctccccgctccccagggacgccgacgacgacgctgccgccgccgaccgcgacgcggccgatgtcgaggacgtcgtcagcctcaaggtcagcctgctcggcgattgccagatcggcaagaccagcttcatggttaagtatgttggggacgacgaggagcagaacggcttgcagatgacgggcctgaatctgatggacaagaccttggcagttcggggagctcgaattgccttcagcatttgggatgtggcaggagacagccagttcctcgaccacgtcccgatcgcgtgtaaggacgccgtggcgatcttgtacatgttcgatctcacgagccggtgcacgcttactaatgttatagattggtatgagagggcaaggaaatggaataagacggctattccaatcctaattgggacgaagtttgatgacttcgctcagcttcctcttgagatgcaatggaccatcgttaacgaggccagggcatacgcgagagcgatgaaggcgaccctcttcttctccagctcgacgcacaacatcaacgtgaacaagatcttcaagttcatcacggccaagctcttcaacctgccgtggacggtggagcgcaacctcaccgtcggcgagcccatcatagacttctga

SEQ ID NO: 4321 - DNA, 867 bp, Oryza sativa
atggcgctgagccttctcttcgccgctgcaccacgagctgttgcctcgttccgcgcctcttcggcgtcctccccggcactcgacagcggccgccgcccgcagaacgtccccggcgacttcttcgtcgatcaccgatgcatcgactgccagacctgccgctggatggcgccggaggtgttcaagagggtggacggaaaagccgccgtggccgcgcatcccatctccgacgaccacaggaccaaggccctgcagggtgtttatcattgtggttatcattctgaagactcgtttggagcaacttcttatcttataacccatccagatggaaacatactagtcgacagcccaaggtatacaacgaaactggcaaataacatcgaagaacttggtggagcacgctacatgtttttgacccacagggatgatgtagcagatcataggaagtgggctgagcggctaaaatgtgagaggattatccattcgggcgatgtagagcgtgctaccgtagatgttgagcggaaacttactggcaatggtccttggaacattggagctgatttcgaacttatccatacccctggccatacccaaggttcggtctgcttgttctacaaaccagtaaaggcgcttttcactggagatcacgttgcaaaatcagaagaatctgatgatttatatctctttcttatgtacagcaggcaaccagtgagcttgcaactggacagcatgagaaaattgttgaagttagacttcgagtggtttttacctggacatggctatcgaatccattataaagatgtacacgctaaggattcagcaatcgagtccctcatagctataactacacaagctaggggcatcttataa

SEQ ID NO: 4322 - DNA, 1230 bp, Oryza sativa
atggcggcggcgtcgatcaagctctcctcctccgccaagcccctcgcccccgcgccggtctcccacctcctccccctccgcgcgcaccacgcgcggccgctccccgcgcgcctcccgccgccgccccgcgtcgccgtgcaacacaccgccgcgcgggcctccgatgcctccccccgcaccgcctccttcgacaaggtgctggagacgctgatcggcggtgaccacttctcggaggaggaggcggaggcgacgctgcggctgctgctggaggaggagaacgaggcgcgcatcgccgccttcctcgtgctcctcagggccaagggcgagacctacgaagagatcgtggggttggcgaaggcgatgataggctgctgcgtccgggtcgacgggctcgatgacgccgtcgacattgtcggcaccggcggggacggcgcggacaccgtcaacatctccaccggctccaccatcctcgccgccgcggcgggtgccaaagtcgccaagcaagggagcagagctagctcgtcggcctgcggcagcgccgatgtgctggaggcgtttggtgtcaacatcgagttgggacccgagggtattaaacgatgtgtcaatgaggtgggtgttggattcatgatgtctgcaaactatcatccagcaatgaaaatcgtgaaacctgtgaggaagaagctgaaaataaagacagttttcaatatccttggtcctctcttaaatccagcaagggtgccttatgctgttattggtgtttaccacgagaacatagttaccaagatggctaaggcagctcagaaatttggaatgaagagagcattggttgtccattcgaagggtttggatgaaataagcccacttgggcctggatatatccttgatgtcacaccaagaaagattgaaaaaatgctcttcgatccattggattttggtataccccgctgcacgctggaagatctaaaaggaggtgatccagcgttcaacgcaaaagttctccaggatgttcttgctggtcaaagaggttcaattgctgatgctctcgtgctgaatgctgcagcatctcttcttgtcagtggtaaagtaaatactttgcatgatggtgtagcgttagcacaggaaacacaacgctccggggaggccatcaacacacttgaatcctggataaagatttccaatctaaatatgaatctgacgccctccggaaaattgttgatacagagttgctga

SEQ ID NO: 4323 - DNA, 2034 bp, Oryza sativa
atggagtgcgagactggctacgtcgccgcggccgccgatggtggtctctgcatggaggtgccccgcgccgacccgctcaactgggggaaggcggcggaggagatggccgggagccacctcgacgaggtgaagaggatggtggcggagtaccggcagcccgtggtgcggatcgagggcgccagcctgaggatcgcgcaggtggcggcggttgccggcgccggcgacggcgaggccgccatggtcgagctcgacgagtcggcgcgggagcgcgtcaaggccagcagcgactgggtgatgaacagcatggcgaacggcaccgacagctacggcgtcaccaccgggttcggcgccamgtygcaccggcggaccaaggagggcsgcgcgctgcagcgggagctcatcaggttcctcaacgccggcgccttcggcaccggcgccgacggccacgtcctccccgcgggtgccacgcgcgcggcgatgctcgtccggatcaacaccctgctgcaaggctactccggcatccggttcgagatcctcgaggcggtcgccaagctgctcaacgccaacgtcacgccgaaggtgaacgccgccgaggcgttcaagatcgccggcatccagggcggcttcttcgagctgcagcccaaggaaggcctcgccatggtgaacgggacggccgtgggctccggcytcgcytccaccgtgctgttcgaggccaacgtcctcgccatcctcgccgaggtgctctccgccgtgttctgcgaggtgatgaacggcaagccggagtacaccgaccacctcacccacaagctgaagcaccacccggggcagatcgaggcggccgccatcatggagcacatcttggaaggcagctcgtacatgaaggaggcgaagaggctcggcgagctcgacccgctgatgaagccgaagcaggacaggtacgcgctccggacgtcgccgcagtggctcggcccccagatcgaggtcatccgcgccgccaccaagtcgatcgagcgcgagatcaactccgtcaacgacaacccgctcatcgacgtctcccgcgggaaggcgctgcacggcggcaacttccagggcacccccatcggcgtgtccatggacaacacccgcctcgccatcgccgccatcgggaagctcatgttcgcgcagttctccgagctggtgaacgacttctacaacaacggcctgccctccaacctctccggcggccgcaacccgagcttggactacggcttcaagggcgccgagatcgccatggcgtcctactgctccgagctgcagttcttgggcaacccggtgaccaaccacgtccagagcgccgagcagcacaaccaggacgtgaactcgctgggcctcatctcctccaggaagacggcggaggccatcgacatcctcaagctcatgtcctccaccttcctcgtcgcgctctgccaggcgatcgacctgcgccacatcgaggagaacgtcaagggcgccgtcaagacctgcgtcatgacggtcgccaagaagacgctgagcaccaactccaccggcggcctccacgtcgcccgcttctgcgagaaggacctgctcagcgagatcgaccgggaggccgtgttcgcgtacgccgacgacccgtgcagcgccaactacccgctgatgaagaagctccgcagcacctccgkgctcgccaagktcgcgcggttcgaggaggagctccgcgcggcgctgccccgggccgtcgaggccgcgcgcgccgccgtggagagcggcacggcggcggcgcccaacaggatcgccgagtgccgctcgtacccgctctaccggttcgtgcgcgaggagctcggcaccgcctacctcaccggcgagaagacgcggtcgcccggcgaggagctcaacaaggtgctcktcgcgatcaaccagggcagcacatcgacccgctgctcgagtgcctcaggagtggaacggcgcgccactgccaatctgctgaacattggattcatcaatggcagcagaawtttttgggtgaagcgatggtag

SEQ ID NO: 4324 - DNA, 1392 bp, Oryza sativa
atgagcgccgccgcggaggggaggccgccggcggcggcggcggcgggtgagatggtgcgggaggccaccgcgtggtgcgcgctgcacgggctcgtcgtcggcgaccgcgccgaccctcgatctggaacagtccccggcgttggtttggttcatgctcctttctctctgctcccaacgcatcttccagaatctcattggaggcaggcgtgcgagttggctcctatttttaacgagcttgtggatcgtgttagcttggacggggacttcttgcaagattctttgtctaaaatatccggttggggttgcatcggtcgagactatatgcttgattcagagaccaattctcttcttcaaatagagctcaacactatttcagcatctttccctgggcttggttccttagtaagtgagcttcacaggaccttaattgatcagtatggacacttattttgtctagactccmagagggttcctggaaatgaggcaagcagtcaatttgctaaagcattggccagagcatgggatgagtttaatgttgacagtgctgtaattatgatgattgttcagcccgaagaaagaaatatgtatgaccagtactggctcgccaaacatttgaaggaatcatatccttttatgctctttttatcttctacctggtccaaacataaaatttacactcccttaacaattcattacacatggcataacgactatcaggaaaactttgtcagagatggcaagacagtttctgtggtgtacttcagagctggctatacaccaaatgattatccttcagaagcagaatgggctgcaaggctattgctggaacaatcatctgctgtaaagtgcccttcgatatcataccatttagtggggaccaagaagattcaacaagaattagcaagacctaatgttcttgaaaggtttcttgaaaacaaggaggaaatcacaaagatccgtaaatgctttgcaggactatggagcttggatgatgaagagattgtgaaatccgcaatccaaaaacccgagttgtttgtcttgaagccccaacgtgaaggcggagggaacaacatatacggtattgatgtacgagagactttgatcagactccagaaggaaggaggggatgcgcttgcagcctacatactgatgcaaagaatcttcccaaaagcctctctctctaatctggttcgtggtggtgtttgccatgaggccctcacaatatctgagcttggaatttatggtgcttacttgcggaacaatgataaggtggttatgaatgaacagagtggttacttgatgcggacaaaagtttcatcgtcagatgaaggtggcgttgctgcaggatttgctgttttggatagtttgtacttaaccgacaaggcgatgtag

SEQ ID NO: 4325 - DNA, 2313 bp, Oryza sativa
atggcagccacgcccaccacgtccgcctccgcggcggccaccactcgcctcttcctacctactcgccgccacctccatgaaaccgcttccgtgcctgccccttcgcgcaccatcgcccgccgctactccggcggcgtccgctctctcgggccaccgcgcgccgccgcgggcgagcttggcggcggggccggcggaaccatcaccgggaagggcgccgtccgcatagtctccatagtaggcgacgggagcatcagcccgctgaaggacacgccatgggaggaggttatgcgccacacggctaataggatgaagtgggttgacgaaggatttgaaatgcttgtcttcacagacaagtcaattggccatgatgaacttaggaaagagctggcacagtgtgatatgctagtcaatgttgcaataacgagtcaggagactgttcagtggcttataaataacagtgaggacattcccaatataatctgctttcaatcatctccaaccttagaaaacaagttaggtggcaggtatgttcaatacactggacgtcaggacatgttttgcaagctaacaaatattggagaaacaggtggcatgaaggaatctgctgaagtccttaaggctgtatctaatgcctgggaaaggcataattcagatgacattagattttgcttacttgttgtggttaatgcgtacataagacctgttgatatgctgcaaaaccttagggcaaaaggtctgtctaccctaagctgtatgataagaaattgtggtcctcagatactgaattgtctgttcgatcccaactgtaggaaagcccttcagtgtttaaattcatgttctccaactgatcaagtttgcaactatcgctgcattgcgtcgtatgagagtccgcatctggaggccttttctttatgtgttttgcagaagaacaattgtcttgatctcaatgccgagatccccagggaaaagctaaaggttcattttggtatgagccaatttttcaagtcagaaccctggaaggggaactggtttggaggcgcagaaagtaccgatgtgctggataatggtgtggtttcaaaggagttttggacaatcgttgatgtttcagatgatttcagctggggtctgttccattatcacggagccgctcaggccgctggactagcatacactggagcagtgctcgttagcccagatggctcttgtccagatttggatgacccaagactggcatctgctttagataagtgtgggatcaagaagtgggagctttatatggttgataactgttcctgcactggtgcacctttgggaactcctggagatgcaaagctgcattatcagattgctcctgggaaaagaatcaggtattttgcagacagggtgatgtgttctaacggcacagaaggttcccaggatgacttgcacggttgcacctctaagtcaggcagtgtggactgtgatccaccccaacaattcgcgctcttcacagtccaggactggagctgtggtccggtggaggttatagagaagaagcagagagcaagaatggctgggctgtatgagagaccgtcggagacgtacaccaagaagcggcctcggtaccctgacgcttggttctccaagctcgccgccctcacagccggccaccaccgcgcctgggacgccggctgcggcaccggccaggcctccatcagcatcgcggagcactacgacagcgtggtcgcgacggacgcgagcgaggggcagatccgccacgccgtcgcgcaccccaaggtgcggtacctgcacaccccggtggacctctccgaggacgacctcgtcgccatggtcggcggcgagggctcgctggacctcgtcgtggtggcgacctccatccactggttcgacatcccgctcttctacgccgtggccaaccgcgtcctcaagaggcccggcggcgtcctcgcggtgttggggctacaactacgagatccacccgttcgaggacaagctgcacggccagctgtacccggccatgcgcccgtatatggacccgaggacgaggctggccatggacagcccgtcggcgtgggccgcgagggcgagccggccgacgtcgacatagaggtggacatgacgctggacgacctcgtcgggttcctgaagaccggctccgtcgtgacgacggcgagggagaagggagtagacctggaggcggtgaccaaggacgtgatgaagggggtggaggcggagtggggagacccggcggtggcgaggaagctcgtgttcaaggccttcatgctcgccgggaagcccaaagtgctgaactga

SEQ ID NO: 4326 - DNA, 1122 bp, Oryza sativa
atggcgcagctgcttaatagagaagaggaggaaagattgatggagaagaagggtggccggcgtcaagggcctcgtcgacgccggcgtcaccaccgtcccctacttcttccgccaccaccccgaccccytccccgtcgccgcgccaaggccgacgtcgacctcgccaaggccgacgtcgaccggggacgggtggtcgccgaggtcagggcggccgcggagacggtcggcttcttccaggtggtcaaccatggcgtcgccggggagctgatggaggagatgctcgcggcggtgcggcgcttccacgaggagcccctggaggcgaaggtgccgtactacaccagggacgtcgccagcaaggtctggttcaactccaacttcggcctcttccgtaacgggttccgttcgccggaggccaactggcgcgacacgatgttcgttgagatgttcccggaggcgccctcgccggaagagatcccgccgccgtgcaggggcgtgctggaggtgtacgccgcggcggtgcggcggctcggggaacggctgttcgagctgctgtcggaggcgctgggcctccccgtggggtaccttggccgcgacgccgggtgcatggacgggctgagcctgagcgtggcggcgcactactacccggcgtgcccggagccggaggcgacgatgggcgcgaccaagcactccgaccccagcttcctcacagtgctgctgcaggacacctccggcggcctgcaggcggtgctcccgcggcctccggaggagcggtgggtggacgtgcccccggtggccggcgcgctggtggtgaacgtcggcgacctcctccagctggtgtcgaacgacaggctccggagcgtggagcaccgggtgctgcccaccggcgccgcggggccggcccgcgtgtcggtggcgtgcttcttccgccacgcgtacgcgtcgacgaggccgtgtgtcccggtcgtcgtcggcggcggcggggcacgggcggcggcggtgtacaggagcacgacggcgggggagttcctggcgcactacaacggcaaggggctcgacgggcggtcggcgctggaccacttcaggcttccggcggcggcgtcgtctcctcctcctccgctgtag

SEQ ID NO: 4327 - DNA, 1074 bp, Oryza sativa
atgggggcgtacgaccggcctccgccagttggcatgtggagtcacgagcagttcaaggttgacaacggccaggccacgagtgcatccacgatcatggaggcagagatgaaatttgagaataggctagaagaaattccccaagtagttctggaggaagggagaaatgttgatcaggaggcaagcaagccgccagacaaggtcctcagaagacttgcacaaaacagagaggctgcacggaaaagccgcctgcggaaaaaggcttatatccaacagctggagacaagccggttgaaactagcgcagttagagcaagagcttcaacgggccaggcagcaggctgtgtatgcaaatgggagccttcgagaaccaaatcttggatttacaggaccgatcgatccaggtgccttaggttttgagattaagtacagccattgggtggacgagcagaatcgcaacactggtgagctgaggaatgcgctgctgcaggggcagacgacggaccaggacctggagctcaagttgctcgtcgaggctgggctcgacaactacaaccgcctcttcgagatgaaagaggaagccgccaactccgacgtgttctacatcatgtcgggcatgtggaagacccccaccgagcggttcttcctgtggatcggtgggttccggccatcggaggttctcaagaatttgagaccgcagctggagcctctgacggacaagcaggtcgtggaagtgggcggcctgcagcaaacctcgatgcaggtcgaggacgccctctcgcagggcatggacaagctgaagcagacgatcgcggactccctgacggcggccgacccgttcgactcccccgaggcctacatggtgcacatggccaacgccgtggagcagctcagatccctcgtccagttcgttacccaggcagatcatctccggcagcagacgctgcaggagatgcacaggatcctgacgacgcggcaggcggcgagggggctcctcgcgctgggggactacttccagcgcttccgagcgctgagctcgctatgggcagctcgcccgcgcgattcagggataagctaa

SEQ ID NO: 4328 - DNA, 756 bp, Oryza sativa
atggggaggtcaccgtgctgcgagaaggcacacaccaacaagggagcatggaccaaggaggaagatgaccggctcattgcctacatcaaggcgcacggcgaaggttgctggcgatcgctgcccaaggccgccggcctcctccgctgtggcaagagctgccgcctccggtggatcaactacctccggcctgacctcaagcgcggcaacttcaccgaggaggaggatgagctgatcatcaagcttcacagccttttaggcaacaaatggtctctgatagccgggaggttgccaggaagaacggacaacgagatcaagaactactggaacacgcacatcaggaggaagctgctgagccgtggcatcgacccggtgacacaccggccgatcaacgacagcgcgtccaacatcaccatatcattcgaggcggccgcggcggcggcgagggacgacaaggccgccgtgttccggcgagaggaccatcctcatcagccgaaggcggtgacagtggcacaggagcagcaggcagccgccgattggggccatgggaagccactcaagtgccctgacctcaatctggacctctgcatcagcctcccttcccaagaagagcccatgatgatgaagccggtgaagagggagaccggcgtctgcttcagctgcagcctggggctccccaagagcacagactgcaagtgcagcagcttcctgggactcaggacagccatgctcgacttcagaagcttggaaatgaaatga

SEQ ID NO: 4329 - DNA, 1377 bp, Oryza sativa
atggggtggaaggcgacgatgggtggtgtcaaggtggccggcggtggcggcggcgtggagaagctcacggccgtcgggragagttggggcccgcgcgtcctcaaggggtggccgtcgtgccggacggcgcaggaggggcctccgccgsgttgccgccacgcggctcccaatgccggtacccgtcgtggagaaggccccattgccgccgaaaagaacaacggttatctgatggtttcatgcaatggtggactcaaccaaatgcgagcagctatatgtgatatggttgtcattgcaagatacttgaatgtgactctaatagtgcccgagttggataagacatcattttggaatgatccaagtgagttccaagatatatttgatgttgaacactttataacatctctgagagatgaggttcgtattcttagagagttgccaccaagggtaaagcgaagagtggaacttggaatgttccactcaatgccacctattagctggtctgatatctcttattaccgtaacaagatacttcctttaattcggaagcacaaggttcttcatctgaacagaactgatgctaggctagcaaataacggactaccgctcgatgtccaaaagttgcgttgccgagttaacttcggttcactgaagttcacttccgatattgaagagttaggcaggagagtgattagattgcttcgccaaaatggcccctttttggtccttcatttacgatatgaaatggatatgctggctttctctggctgtactgaaggctgcactcgtgaagaggcagatgagctcacaagaatgagatatgcttatccatggtggaaagagaaagtaataaactcctatgcaaaaagaaaagatggcctttgccctttgacaccagaggagattgctcttgtcctcagagccttggacattgacagaagtatgcagatatacattgcagctggagaaatatatggtggaaagcgtagaatggctgctcttacttcagcgtatcccaacgtggtgagaaaggagacacttttgcaaccttccgatctcatgttcttccagaaccattcgtcacaaatggcagctctggattacttggtatcactggaaagtgatatatttgttccaacatatgatggtaatatggctaaagttgttgagggacaccgcaggttcatgggttttaagaaaacaatcttattggatcgaaaactcattgttgagctggtcgaccagtataatagtggttctatgctgtgggatgaattctcttcactaatcaagtctgtccacgcaaaccgaatgggagcagcttcaaaaaggacagtgattcatgaccaaaccgaaggaagaggactacttctatgctaa

SEQ ID NO: 4330 - DNA, 2877 bp, Oryza sativa
atggctttgcattcagcagatggagctggacagctcagcacagcggtggcagaggctggcggcggttttggatttggattggaaccagttcagacgatggcgtgtttggtaattttggatacagcatttatgtgcaggatatgcttagctgtggcgagtgaattgtttcctatgtttgcaatccttcctggaatggacctggtttggggggttcaacagctgaaccccatgccccatgctagatccgccactggggagacaaccgctcttaaaaatggttcttttcggcatgatatccattattggcttggtaaagataccagtcaggatgaagctggtacagctgcaatcaagactgtggaattggatgctgctcttggtggacgtgctgttcaataccgtgaagtacaggggaatgagacagagagatttctttcatattttaaaccttgtattataccagaggaaggtggaattgcatctggtttcaggcatactgaaatcaatgaacgggagcatgtgacaaggttatttgtctgcagaggaaagcatacagtccatgtcaaagaggttccgtttgcaagatcatcgctgaaccatgatgatatatttattttagatacaaagtccaaaatattccagttcaatggatcgaattcaagtattcaggagagggctaaagcccttgaggttgtgcaatatttgaaagacagcaaccatgagggcaaatgtgacgtaggttcagttgaggacggcaagctgatggcagatgctgacgccggtgaattctggggtctctttggtggatttgcacctcttccaagaaaaaccttttctgatcttaatggaaaagattctgctttctcttcgaagttgatctgtctaaataagggtcagacagtaccagttgattttgatgttctaacaagagagttgctagattcaacaaagtgctatctgctagactgtggatctgaaatttatgtctggatgggtagagagacaccactcgaagagaggaaacgggcaggatctgctgcagaggaattacttcgtgaagtaaacaggccaaaatctcatattgttcgtctcatggaaggatttgagactgtcatattccgatcaaaattcagtaaatggcctaagaaagctgatgctgttgtgtctgatgagagcagaggaaaagttgcagctcttcttaagcggcaaggatttaatgttaagggtcttgcaaaagctgctcctgtgaaggaagagcctcaacctcaaattgattgcacaggcaacctgcaggtttggcgtgtaaatggcactgaaaagacattcctttcattctctgagcaatgcaaattctacagtggggactgttatatctttcaatatagctatcctggtgaggaaggcgaggagtgtctcattggtacttggttcgggaaaaagagtgttcaggttcgcctttatgaaggaaaggaaccagctgagtttttctcaatatttcagaacctggttatcttcaagggtggtgttagtactgggtataagaaatttgtctcagaaaacggtattgaggatgacacatattcagaaaatggggttgcccttttccgggttcaaggctctggaccagaaaatatgcaagccattcaagttgatacggctgctacctcgctgaactcttcttattgttatgtactacatgatggagatacactatttacatggattgggaatttaagctcgtcaatggatcaagagcttgctgagaggcagctggatgtgatcaagccaaatcttcagtccagaatgctcaaggaagggtcagaatatgatcagttttggaagctacttggagtcaagtcagagtaccccagccagaagattgcaaaagatcaagaaagtgatcctcatttgttctcttgtactttttcaaagggagtgcttaaggttagagaaatattcaactttactcaagatgatttgatgacagaggacgtttttattttggactgtcattcatgtgtcttcgtatgggttggacaacgtgtggacacaaaaatgcgagcacaagctttgagcgttggagagaaatttttagaacttgacattttgatggagaactcatcacaagaaacaccagtttatgtcatcactgaagggagtgagccccaatttttcaccaggttcttcacttgggactctgcaaaatcagccatgcatggaaactcatttgaaaggaggttatctatagtgaaggatggagtaaaaccaaaattagatcgctccagaagtatgtcgttcagtcctgaccgtgtaagagtcagaggaagatccccagcattcaatgcattagctgctaactttgagaacccaaatgctcggaatctatcaacacctccaccagctatcagaaaaccatctccgaagtccccctcttcagatcctacaaagccacctcaacgagctgcttcaattgctgcaatttctgcttctttcgagcgacctaggccaactctgataccaaagtcaatcaaagcgagtcctgatgtaaacaagccccaagttgaagcaagcaagcctaaaccagaggcaaatggcaaggatagtaccccttcaaaggatagcccaacagtaactccaacgatacaggaagatctgaaggagggacagccagaaaacgaggaagggctcccagtgtatccatacgaacgcttgaggacatcttccatcaatcctgtgacagacattgatgtgactaagcgtgagacatatctatctgcggcggagttcagggaaaggtttgggatgacaaaggaagcttttgcgaagctaccaaagtggaagcagaataggttaaagattgcccttcagctgttttaa

SEQ ID NO: 4331 - DNA, 1713 bp, Oryza sativa
atggggaatcagtgccagaacgggactcttgggagtgattaccacaatcggttcccaagggagcatgccgttgggtacgttcagggggatagctacttggacttgaagaagttcgatgatacttggcctgaggtgaacaacttcaagcctactgctgctagtattctcaggcgggggttggatcctacatctatcaatgtccttgggcggaagacagcggacctaagggagcattatatcattggtcggaagcttggtcagggccagtttggcacaacttacctctgtaccgagatcaatacagggtgtgagtatgcttgcaagaccatcccaaagcgcaagctcatcaccaaggaggatgtagaagatgtgcgccgtgagattcagataatgcaccatttgtcgggccacaagaatgttgttgcaatcaaggatgtctatgaggatgggcaagcggtgcacattgtgatggagctctgcgctggtggggagctctttgacaggattcaggagaaggggcattacagcgagcggaaggctgcagagcttataagaataattgtcagcattgtggctatgtgccattcgctcggggtgatgcaccgtgatcttaagccagaaaatttcctccttttggataaagatgatgatctgtcaataaaggcaatagattttggtctatccgtgttcttcaaaccaggtcaggttttcactgagctggttgggagtccatattatgttgctcctgaggtattgcacaaacgttatggaccagaatctgatgtgtggtcagctggagtgatactttacgttttgctgagtggagtgccaccattttgggcagagacacaacaaggaatatttgatgcagttctgaagggtcacattgattttcaatctgatccatggccaaagatatctgacagtgcaaaggatcttataagaaaaatgctctctcattgcccttcggagcgtttgaaggcccatgaagtgctaaggcatccttggatctgtgaaaatggagttgccactgatcaagctctggatcccagtgttatctctcggctcaaacaattctctgcaatgaacaagttaaagaagttggctctgagagtgatagctgagcgtctttcagaggaggagattgctgggttaagagaaatgttcaaggcagtggacacaaaaaatagaggtgtaatcactttcggtgagcttagagaaggtttaagaagatttggcgctgaatttaaggatacagagattggtgatataatggaagcggcacacaacgacaataatgtaacaatccattatgaagaatttattgctgcaactctacctcttaacaagatagaacgtgaggagcacctgctggcagcttttacatattttgacaaagatgggagtggttatatcacagttgacaagcttcaacgagcttgtggagaacataacatggaggattcactccttgaagagattatttcagaggttgatcaaaacaatgacggccaaattgactacgccgaatttgtagccatgatgcaaggcagcaacgttggactagggtggcaaacaatggaaagcagtttgaatgtagcattaagagacgcacctcaatgtcaggcagctgaagcaacagatgaaccggtgaaggtgaaggtgaaggtgaagtgctcaaaccagattaggaggcggcgacgtcaagtttga

SEQ ID NO: 4332 - DNA, 1788 bp, Oryza sativa
atggsgtcaagggattttccggggctggttcacggggsggccctcgttgcccgcgaggccsccaagggggccttggcccccgaagtcctcaggttcggggttcttggcggcaacgraccttgccgggttaaccagggggaccccggggamcccgaggccaacccctccccttggaccccaacccmaacggcgscgccgccggcggcgaggctcgtgcctccgtcgtgtacttctcccacgacgatgccggatcccccgctggagcagcggccgcctgcgcgtgaatcccccmacccggcccaggcgaaggagatcaccgaagccggcgtagccgcggccgtgggcgcagctgagcctgaacctgtggcggtggccagaccacccgatggcgaagctgctggccgctcacctgcaccctcgccatcgccctcgccggtggtgcgggtggagaagaggcggcggccgcgggagcggagggttccctccaccccattcaccagagccctcgggtcagtatgccacaccatgcatcgatttgaacagggagaaatgcgcattcgtttgtttgtgaaattacgaatcgaacagtgcgtgaatcgtgttgttttttttgcaaaatttgtgctggcaaaattaaggttcgcaggtctgggtgctggcctcgcatggggaacgctacaggaatcagctcggcgggtggtgtatgggagaccagcggacgcagatggcaagcgttctgctatgtccccgttcttatcagatcagaatgctgagcgtatcgccctggcgctgtgccggatgcggggtgcagcgctcaaggtgggacagatgctgagcatccaggacgaatcccttgtgcctccaccggtcttggcagctcttgatattgttcgccaaggtgctgatgttatgccgaggaagcagctcaattcagttcttgatgctgagctaggtcaggactggtcctccaagttaacgagttttgactatgagccactagctgctgcaagtattggacaggtccaccgggcggtcttaaaggatggttcagatgttgtcatgaaaatacaataccctggggtcgcagatagtatagaaagtgatattgagaatgtcaggctacttctgtcttacaccaatctcatccctaaaggtcttttccttgatagagccatgaaggtggcaaagcttgagctggcaagggaatgtgattatgtgttagaagcaactaaccaaaaacggtacaaagagttgctatctgatagtgaaggctattatgtccctaaggtcattgatgagttgtctagcaaaaaagtgttaatgtcagagtttgttccaggatttccaattgacaagactgatccaaattggagcaacttccttttcgatgaacctacaaggaagttcaatctgattgactttggcgcagctcgtgattttccaaaacgttttgtggacgactaccttcgtatggaaccggaagtcatgctggatgctcatgtccaagctgccttcattgttggtgtgccattcgcaaaaccaggtggtcacgatttccgtgcaaacaacatcacacatagtgtttccaacctcggagctaccatgttgaagcacaggctgacgccaccacccgacgaagtttacagcctccacagaaagttgtcaggtgcattcctagcctgcatcaagataggggcagttgtaccctgtagggagatgctgttcaaggtttatgagcaatacaatttcagcgatgatcgtccggaagtattgtccagcaccggatag

SEQ ID NO: 4333 - DNA, 2418 bp, Oryza sativa
atgccacagcaaacgtcccgctttgcagccgctagaaaagggcctgtgacagaagatccaggagtgccaggtaaagaaagggagtacaatgctcaaccaaaggatgatatgtttcccatgatgaagcagccaggcactaatgctagagtggctgaccccatggatgatgtagcacagcatttgattggaaatctgttaccagatgatgaagagctattggctggggtaattgaagattttgatcatgttaaactgagaacccaagttgaggaatcagaagaatatgatgttttccgcaatagtgggggtatggagctggatattgaccctctggaaagcatcacctttggtacagcaaaggctagccttgtcaatggtactggaagtagcactaatcagtacagcatccaaaatggtgctggaacagttactggtgagcatccttatggtgagcacccgtccaggacattgttcgttcggaacattaatagtaatgttgaagactcagaactgcgctcattgtttgagccatttggggatattcggtccatgtacactgcaacgaaacacagaggattcgttatgatatcttactacgatatccgtcatgcaagaaatgcaaagactgcattgcaaagtaaaccattaaggaggaggaaacttgacattcactattcaattcccaaggagaatccgtcagataaagatatgaaccaaggaaccctggtgatctttaatctggaaccagctgtttcaaatgaggaactccttcaaatttttggtgcatttggtgaagttagggagataagagagacaccacataagcgacaccatagatttattgagttctatgatgttagggctgcagaatctgccctccgttcattaaacaagagtgacattgctggaaaacgggtaaagttggaacctagccgtcctggtggagctcgccgaagttttatacagcattttaatcacgaatttgagcaagacgaaacaaagcataattcatttcagattggttcaccttctgccaactctccaccaagtttgtggtcccaacttggcagcccaacagatgaaaataaattaaatgcactcaatgaaactgcatttaatgggggaatgagccctttgggcagtaaccatctttctgggttctcttcaggatatcctcccatgaaatcacccgttgggaagagctcctattggaataaccgtgctgacaacatattccatgggtcaccaactttgcacaattcacattcgtttccagaacatcatggtggaattataagtgccagcccgcttgtgtcatccgcagcttcgtcagcctctactgcatctggttttactgcactgactggaacatcatttctctggggtaataacaataacttaagggatcatggccagccttcatctatccaatctcaagctcttagcaactcactttttcccaataaccagccacaacgccagagtaatctgtatcagaatctgcgtggttcctttggggcatccgagcacttctcccagtttaatgttgggtctgccccatctgttttcccttttgagagtaatttcggctatttctctgattccccagacacatcttacatgagacagggaaagtttggcggcacaggccccacacgtgttagtggaagcctcatgacgaactttggtgcctatccccgcattaatgttgcttccatgcaaaacggttcagttggttttgaaggtctgcttgaccgtggccgaaatcagacagttggaaactctgggtgtcaggaagatagcagagtgcaatatcaattagatttggagaagatcattgctggtaaagacaccagaacaacgttgatgataaagaacataccaaacaagtatgatattcttgaattaattggcgtaatgctctgttattacagtgtcatgcggtctacttttgttgctcatattttactaaattttaggtatacatcaaatatgcttttggaagtaattgatgaaactcatgaagggacttatgatttcttctacttgcctattgatttcaagaataaatgcaatgttggctatgccttcattaatatggcatctcctggttatattgtatctttctttaaggcatttgctggtcggaaatgggaaaaatttaacagtgagaaagtagtctcgttggcatatgctcgaatacaggggaaagccgcacttgtaaatcatttccagaattcaagcttgatgaatgaagacaagcgctgccgccctatgctatttgatcccaagcatactgaaaacaacaatcaggtaaagatcctgttgaacggaatatttatctccatggcccagcaagatgccacacaagaaaggcatgacctccctgaaaacccaagggaagataatttcagttaa

SEQ ID NO: 4334 - DNA, 978 bp, Oryza sativa
atggctcggtcggcgctcgacgaggtcaccgacgccggcgccttcgaccggtcgccgtccaccttccggagctctatctccagggacagctccgcccggttccccgccgtgccggggaggtaccacctctacgtctcctacgcgtgcccctgggcgtcacgctgcctcgcctacctcaagctcaagggcctcgacmacgccatcggcttcacctctgtgaagcccatctttgagaggaccagggagacggacgaccatcttgggtgggtttttccggccaccggagacgaagagcccggcgcagacccggatcctttcaacggagccaagaccatcagggagctatatgagattgccagcccaaattacatcgggaaaccaactgttccggttctgtgggacaagcagctcaagactgtggtgaacaatgagagctcagagatcatccgaatgctcaacactgagttcaacgagatcgcaaagaatcctgacctggatctctatcctgctcatttgcaaacctccgtcaatgagatcaatgagttggtatacgatgcgataaacaacggcgtgtacaaatgtggctttgccaagaaacaggggccatatgatgaggctgtcacgagattatatgaggctctggacaaatgtgaggaaattctaagcaggcaacgttatatatgtggcaaccagttgacagaggctgatgttcgcttgtttgtaactcttataagatttgatgaggtttatgctgtccacttcaaatgcaacaaaaggctcctcagggaataccccaatctgttcaattacaccaaggacatctaccagattcctggcatcagcagcacggttaacatggagcacataagaaagcactactatggaagccatccgtccataaatccctacgggatcatccctgcaggccctaacatcgattacaacgctccacacgacagagagaggtttagtgcctag

SEQ ID NO: 4335 - DNA, 1008 bp, Oryza sativa
atgggttgcctgttgatgctctgcttggtttctcccctcctcctcgccacctctgtccacggcaacccgtggtatgggtatgggtatggcttgttcccgcagttctacgaccactcgtgccccaaggcgaaggagatcgtgcagtccatcgtagcacaggcggtggccagggagaccaggatggcggcatccttggtcaggctgcattttcatgactgctttgtcaaggggtgtgacgcgtctgtgctcctggacaacagcaccaccatcatcagtgagaaggggtcaaaccctaacatgaactccctcaggggtttcgaggtcgtcgacgagatcaaggccgccctcgaagcagcttgccccggcaccgtctcctgcgccgacatactcgccctcgctgcacgcgattccactgtcctcgttggtggcccgtactgggatgtgccacttggccggagggactcactgggtgccagcatccagggctccaacaacgacatcccagctcccaacaacaccctccccaccatcatcaccaagttcaagcgccagggccttaacatcgtcgacgtcgtagccctctcaggtggccacaccattggcatgtctcggtgcaccagcttccgtcagaggctctacaatcagagcggcaatggcatggctgactacacactggatgtgtcctacgcggcacagctgaggcagggatgcccccgttctggtggtgacaacaacctcttcccgctagactttgtcagccccgcaaagttckacaacttctacttcaagaacatcctgtctggcaagggccttctcagctctgatcaggtcctgcttaccaagagcgctgaaacagcggcgctcgtgaaggcgtatgctgatgatgtcaacctcttcttcaagcacttcgcacagtcaatggtgaatatgggcaacatctcgcctctgactggatcacagggggagatcaggaagaactgcaggaggctcaacaactactaccactga

SEQ ID NO: 4336 - DNA, 1095 bp, Oryza sativa
atytcgacttcacgccatcgctccgcatggccgtygccggctacggccgcgagtgcgtccagctctaccatcaccactgccacccacgacgctcccttcgcggaagccgtcaagggcgccgccctgcagctcttcggcttcgccgaggcgatcagcatcggccgccgctcaccggagaagctgttcaagatcattgacctgcacgacgcgatcgccgatctgttgcctgacgtctccgacatctttgctgcatccaaggccggggaatccatatacgtgcaggctgccgagatcaggtcgcgtctcgctgatgccgtgcgtggtatactgtcggaatttgagaacgctgtgcttcgtgacccgtcgaagactccggtgcctggtgctgattgtgtcgcgccattggcttgctcccgaattgctcctgagggcaatgagaatgccccatccttccctgatcttgaccttgccgaccctgacagtcagttaccccttgctgctcatcttatctggattattgtggttcttgagcacaatcttgagagcaaagcatcactctacaaggatgcggcactctctcatttgttcgtcatgaacaatgtacactatattgcacacaagataaaggattcaccggagctccgggggcttattggtgatgagtatttgaagcagctgacaggtaagttccggctcgcagccactcgctatcaacggacagcatggttgaagatcctgaattgtctgagagatgaaggtctgcatgtcagtgggggcttttcatcaggggtatccaaatcagcactccgggagcgtttcaagtctttcaatgctgcattcgaggaggcacatagggttcaatctgcttggtatgtgccagacacgcagctgagagaagagcttaggatatcaatagcagagaaacttcttccagcatatcgatccttccttggtcggttccggcatcacatagagaatggaaggcacccagagttgtacatcaaatactcagttgaggaccttgagacgtccgtcacaaatttctttgagggttgtccaccttcgctacataacaggagaagatcccatggatga

SEQ ID NO: 4337 - DNA, 1383 bp, Oryza sativa
atgggcctcagtactgtcattgtgctcgccgccgtcgtcttcctcctcgccaccattctccgccatggccgacgcgcgtataggctcccaccagggcctaacccgtggccgatcatcggcaacctcaacctcattggcgcgctgccacaccgctccatccacgagctctccaagcgctacggcccgctgatgcagctccggttcgggtcattccccgtcgtcgtcggctcgtcggcggagatggccaggttcttcctcaagtcccacgacattgtgttcaccgaccggccgaggaccgccgccggcaagcacaccacgtacaactacaccgacatcctctggtccccctacggcgcctactggcgccaggcgcgcaagatgtgcgtcaccgagctcttcagcgcgaggcggctcgagtcgttcgagcacatccgcggcgaggaggtgcgcgcgctgctgcgcgacctgcacggcgcggcggcgcccgtgctgctcagggactacctgtccacggcgacgctcggcgtgatatcgcgccatgtgctgggcaagaacggcgtgctcaacatcggcgacttcatcccgtggctagactggctcgacctgcaggggtacatcaggaggatgaagagagtaggcaagaaactggatcggttcatggagcacgtcctggacgagcacgacaagctcgccgatgaccctaacctcgaggtccaactccggcgtgataatgtcaaggcacttactcaggacctgatcgccggcggcacggacacctccgccatcaccgtggagtgggccatttcggagctcctgaggaagccggagatcctcgccaaggcgaccgaggagctggaccgcgtcgtcggccgcggccgcttggtcaccgagacggacatgaccagcctcccctacgtggaggccatcgtgaaggagacgatgcgcgtgcacccggtggcgcccctgctggcgccgcacgtagcccgcgaggacgcctccgtcggcggctacgacatccccgccggaacgcgggtgctcgtcaacgtgtggaccatcgcccgcgacccggcgctgtgggactcgccggaggagttcatgccggagaggttcatcggcagcaagatcgacgtgaagggacaggacttccagctgctgccgttcgggtccggccgccggttgtgccccggccacagcctcgggctgaaggtgatacagctgagcctcgccagcctgctgcacggcttcgagtggaggctccccgacggcgtgtcggccggcgagctgagcatggaggaggtcttcggcctgtccacgccgaggaaggttccgctcgaggtcgtcgttaagcccaagctgccggcccacctctataccgggccctga

SEQ ID NO: 4338 - DNA, 2757 bp, Oryza sativa
atggacatgctcatgctgtcatcagcgctcgatggcctcgacagctacaccgacctcgtcgcgggttcatcggtagccgacagcatcttctcagctcttacctgtttcccaccatcacaagaacgattgctgcacgtctcgactcctgtgggttctaattctaggcaagatgattctgatgtttccatcactaaggagggtacaacaacaagaagaggtgattgcgccgccggattagcttcaggtgagccggtggccgcgggaattggctctgtcccgaagccgttcgacggcgtcacactgacggagaggatgctcagggcgcttgcgatgctcaaagaggcgtcgggtggcgaagcgatccttgtgcaggtctggatgcctgtgaggaatggggagcagcatgtgctgactacctctgaccagccgttcttgctcgatcagaagcttacgggatacagggaagtctccaggcagttcacattctcggctgaagaaggacccggtctgttccccggattgcccggccgggttttcatgtccggcatgccagagtggacgtcgaatgtgatgtactatcatggctcggagtatttgagggttgattatgctaggcgccacgaggtccgtggatcccttgcgatgccggttttcaactcaagtggtgggtcttgctgtgcagtgttagaagtagtaatgacacgagagaaggataacttttgcttagagatggtcaatgtttcgaatgctctgcaggccttcaataacccattattcctcctttgtgctgcccaacgttacgcccaattgcaatgcaatactgctaagtacctcttcaaagaattaagtacttctgttcagttaagcactgtcaatgcatggagacattctcagagctattcaagggaccagaaattagcattgatggaaatattcgatgttctgcaagctgtttgtcaagcacacttgctacctttggcacttgcatggattccagtttgctccaaaagagatgtgcttgtgtcagtagaatatggtgcaaattttggtaaaaggaacaaagaagtgctttgcatagaggaatctgcatgttatgtcaatgacacgagaatgcgtgattttgtccaagtctgtgctgaacacccccttgagaaaggacaaggtgtcgctggaaatgcatatttatcaaataatcccttcttctcatctgatgtgaaggattatgatatgcacgcttatccacttgtcaatcatgcccgtaaatttggtcttcatgctgctgttgcaattaggctgcagagcacatacaccaaaaatgatgactatgtgcttgagttttttcttccagtcttgtgcaaaggtggtggagaacaacagctcttacttgacagcatatctgcgactatgcggagagtatgcaaaagtctgagaactgtttcagatgctgagttgaaggaagatgttacaagaaagccatcaaatgaaaatcgatcaggaacaagatgcccttcacctgttaaccttatttattcaggccgagaaattgatgtatcgaatgaaacaaaaacaaatacgcctttggaatatcagatagagggcattgatgaacaactatcagatacaaaaagtactaacaagttaataaagtgtagcaatgcatccgacggagagaaaagacgcagctcaacagagaagagtgttagcttaagtgtcctccagcagtacttctctggcagcctgaaagatgctgcaaagagtattggtgtttgtcctactacgctgaaaaggatatgcagacaacatggaatatcaaggtggccatctcgtaagataaagaaggtaaaccgatccctaaagaagatccagaacgtcataagttcagtacatggagtcgagggagtgctgaaatatgatccttccactggatgccttgtttcatctgtttccccttccatagagcctgtattgatgaatgttgaacacaaaggttctgatcccctacctattgaatctgaacttccacatttgaacttcgaacctgactgtgatgcatatcgaagagaacatgcaggccaagatgtactccacaaactgcagaataagcaaaatggtgaaattaattttgacatggacgatggagaattatttcgaaactcacattctaccagaacattgagtggggcattctgtgaggatatgccaaatggtttatatgttgcaagggaaatgacttgtgttgcgaaaactggcacgaggacggagagactggagcacaaaccatcatcaagggattctttttctgcgccacaagaatacagaatggagagtgagactgacaagagcaataagaattccaaacaaagcctaccgtcctcttccagcatgacagattgctccacatcaagcggcgaaactttcaagagcatcaagagtcagtcagctaacgaaagcaacaaaaccgtcgtcgtaaaggcgagctacaagaatgacaccataaggttcaaattgctaccatccatgaaatacgagcagctgctcgaggaaatagcgaagaggctgaaactgtcaattggcctatttcagctcaagtacaaagacgatgagggtgactgggtgattttagcgagcgatgcggatctccaggaatgcctcgagatacttgacaccaccaggttgcgtatcttgaagcttcaggtgcaagatgttgtgtgtcctatcggaagttcgtcaggtagctgctccatgttacgtccatag

SEQ ID NO: 4339 - DNA, 948 bp, Oryza sativa
atggccgcctctcggtgcttcttgcttctcctgctgctgctgctatctcccttactggcgtccgctggggaggaggaggaggaggccgtgctggccatggcggccaggctgcggaggccggcggcggcgtcgttccgggaggggtacacgcagctgttcggcgactccaacctcgcgctccatggcgacggcaagcgggtccgcatctccctcgatgagcgcacaggcgccggattcgcgtcgcaggatgcgtatctgcatggcttcttcagcgccagcatcaagctgccgcccgattacgccgccggtgtcgtcgtcgccttctatatgtcgaatggcgatgtgtatgagaagacgcatgatgagctggactttgagttcctagggaacattaaggggagggagtggagagtgcagaccaacgtgtatggcaatggcagtacatcggtcggcagggaggagagattctacattgatgagactccaatccgggaggttcagaggaccaaatccatgggagttcagttcccttccaaaccgatgtcgctgtacgccacaatctgggatggctccagctgggctacctccggtggccggtacaaggtgaactacaagtacgcccctttcgtcgcagagttttcggaactcatgctccatggctgcgctatggacaccttgacccgtgcaccgatgtgcacaccggacattgccaacatccacaatgccgtggccatgtctggtaggcagcgatcggcgatggagaggttcaggacgaagtacatgacttacggctactgctatgatcgtcttcggtatcctacacctccatcagagtgcaatgtcggccctgaggccgagctattcctccccacgggcgaggcgaggtccatcgaccgccatggacgagctaggcgccaccgtcgtggtccagctgattcagcattctga

SEQ ID NO: 4340 - DNA, 1428 bp, Oryza sativa
atgtccatgggtatccatccatctctgctttctctctccctgttgtgttgggctttcttgttcatgtccttggaatatgaagggtatggccctacctgggacagcgacgacgagtacgacaacttcatacgcaagatgaacccgccaaggatcgagatcgataatgattcatgcaacgacgccacgattgtcagggtagacagtgcaaatgagtatgggattctccttgaagtaatccaagttctgattgatctgaatcttgtgataagtaaggcgtacataacctcagatggtggatgggtcatggatgtctttaatataactgacaaagaagggcagaagcttaaagataaggctactattgcgcgaattgaagactacatttgtaagtctttgggtgcagattcaagatacataccttctcgccggagatcagtagatgtcgctgcttcgagtgatcacaatgtcattgagctgacagggactgaccggccaggcctcctctctgaagtcagtgcagttcttgcaagcctcaagtgcaacgttgtcagcgccgagatctggacccataacaccagggctgccgccgtgatgcgagtcaccgatgagggcaccggatcggccgtcacggacgccgacaggctcgagaggatcagggataggctgtcctaccttctccggggaggcaacctctcgcgcggcgcggccatggcggtgtcgacggggacctgcagcacgcacaccgagaggaggctgcaccagatgatgctggatgatggcgaccatgagcagctccatcggcatcctccgaatcagtcccagaggcccaatgtgacggtgagcaattggaatgacaaggactactcggtggtcaccatccgatgcaaggaccggccgaagcttctcttcgacacggtttgcaccttgacagacctgcattatgttgttttccatgcaaatattgatgccaaggataatcaagcttaccaggaattctatgtgaggcatgtaaatggatctccaatgcacactgaagctgacaggttgcgagtcatccagtgccttgaagctgctattgaacggagggtgtctgagggtgtgaagcttgagctctgcacaaatgacaaggtcggcctcctgtcagaggtcacccgaatcttccgcgagaacagcctgactgtcacaagagcggaggtgagcacgagaggaaggatggctgtcaacacattctatgttcgcgattccacaggagggacggttgatcagaagacaatagactccatcaggcaagccataggccagaacattcaggtgaaaggccagcctgagccatcagagccacagaagaaagagtcacccacatggttcctcttcgccaacctgtttcgaccgagatctctctacagtttcgggatgttcatgcgctga

SEQ ID NO: 4341 - DNA, 2796 bp, Oryza sativa
atgacgccggcgccggcggccgcctcctaccgcgctctcgtcgcgctcctgctcgtcgccgtcgccgttgccgatgatgggtcgacgctgctggagatcaagaagtccttccgcaatgtggacaacgtactgtacgattgggccggcggcgactactgctcgtggcgcggcgtcctctgcgacaacgtcaccttcgccgtcgccgcgctcaacctatccgggctcaacctcggaggcgagatctctccggccgtcggcaggttgaagggcatcgtctcgatgtatggaagacgtggtggtgtactttgttgttgtttggaaatgtggcttgctggtgcttggactcgcagtaactttgacttgaagtcgaatgggctgtctgggcagatccctgatgagattggcgattgttcatcactaaaaactctgatattgaagaacaaccaactgatcggagtgatcccatcaacgctctcacagctcccaaatttgaagattttggacttggcacagaacaaactgagtggagagataccaagactgatatattggaacgaggttcttcaatacttgggattacgcggtaataatttagaaggcagcatctccccagatatatgccagttgactgggctttggtacttggatttgtcttacaataaactttctggatcaattcctttcaacattggtttcctacaagttgctacactatctttgcaagggaacatgtttactggtcctattccatcagttattggacttatgcaggctctcgctgtactggatctgagttacaaccaattgtctggtcctattccatcgatactaggcaatttaacatacactgagaagctgtatatgcaaggcaataagttaacaggtccaataccacctgagcttggaaatatgtcaacccttcattacttagaacttaacgataatcaacttagcgggttcattcctccagagttcggaaagctaacagggttatttgacttaaaccttgcaaacaacaactttgaaggtccaatccctgataacataagctcatgtgtgaatctcaatagcttcaatgcttatggcaacagattaaatgggaccattcctccttcattgcataaacttgagagcatgacttatttgaatttgtcatcaaattttctaagtggttctattcctattgagctatcgagaatcaacaatttggacacctttaacttgagcaacaatggtctagtaggattcattcctgcagaaattggcaacttgaggagtatcatggagattgatatgtccaacaatcatcttggcggtttgattcctcaagaactcggaatgctgcaaaatctgatgttgttaaatctcaaaaacaacaacataactggggatgtctcttcactgatgaactgcttcagcctcaatatcttaaatgtatcctataataatttggctggtgttgtacctactgataacaacttctcacggttttcgcctgacagctttttgggtaatccaggactttgtggatattggcttggttcttcgtgccgttcatctggccatcaacagaaaccactaatctcaaaggctgcaatacttggaattgccgtgggtgggcttgttatcctcctgatgatcttagtagcggtctgcaggcctcatagtccacctgttttcaaagatgtctctgttagcaaaccagtgagcaatgttccccccaagctggttatccttcatatgaacctttcccttcttgtatacgaggatataatgacgatgactgaaaacctgagtgagaagtacatcattgggtacggagcatccagcacggtttataaatgtgtttcgaagaaccgcaaaccagtggcagtaaaaaagctatatgcccactatccacagagcttcaaggaatttgaaactgagcttgagactgttggtagcatcaaacaccggaatctagtcagtcttcaaggatattccctatctcctgttggaaatcttctcttctacgattacatggaaaatggaagcctctgggatgttttgcatgaaggtccaactaagaagaaaaaacttgattgggaaactcgtctacgaattgctctaggtgcggcccaaggccttgcttatcttcatcatgactgtagcccacggataatacacagggatgtgaaatcaaaaaatatactccttgataaagattatgaggcacatcttacagactttggcattgctaagagtttgtgtgtttcaaaaactcacacgtccacctatgtcatgggaactattggctatatcgatcctgagtatgctcgcacctcccgtctcaatgaaaagtctgatgtctacagctatggcattgttctgcttgagctgctgaccggaaaaaagccagtggacaacgagtgcaatctccatcacttgatcttgtcaaagacggctaacaatgctgtcatggagacagtcgacccggacattgcagacacttgcaaggatcttggtgaggtcaagaaggtgttccagctggcgctcctttgcaccaagagacaaccatcggatcggccgacaatgcacgaggttgtgcgcgtcctggactgcctagttcgtcccgacccgccaccgaagtccgcacagcagctggccatgccgcagcggcctgctgtcccgagctacatcaacgagtatgtcagcttaagaggcaccagcgtgctctcctgcgccaactcgtcgtgtacttccgatgctgagctgtttctcaagtttggcgaggtcatttctcagaacacagagtag

SEQ ID NO: 4342 - DNA, 1206 bp, Oryza sativa
atgcagaggaacggagtgatggaatgcagtgtatgccactccaaggtggtggctccgagccccaggagtgtgtcgagggcatatgacaagcaccgcagcaagatatcgtccaagtaccgcgcgcttaacttccttcttgtgtcaggggactgcattttggttggcctccagcctattctagtatttatgtccaaggttgatgggaagtttcagttcagtcctatcagtgtcaactttttgacagaggttacaaaagttatatttgctattgtaatgctaataatccagtctagaaaacaaaaggttggggagaagccacttctgtcactttcaacctttgtacaggcagcacgtaataatgcactcttagctgttcctgctctcctatatgccatcaacaactacctaaagttcatcatgcagttatacttcagccctgcaactgtgaagatgctaagcaacctgaaggtactcgtcatagctatcctcctaaaattcataatgrgaaggaaattctctataattcagtgggaagcccttgctctgttgcttattggaatcagtgtcaatcaactaagctccatacctgatggaaccaaatcttttggtcttgcagtcaccactattgcatacatatatacacttatatttgttactgtcccatcacttgcctcagtctacaatgagtatgctttgaaaagccagttcgacacaagcatctatcttcagaatttgtttctatatggttatggtgcaattttcaacttccttggcatcctggggactgtcatatttcaagggccagagagttttgacatccttcgaggtcattcaagggccacaatgtttctcatttgtaacaatgctgcacaaggcattctctcttcattcttctttaagtatgcagacacaattttgaagaagtattcatcaaccgtggccacaatatttaccggtctagcatctgctgcatttttgggacataccttgacagttaactttctcctaggcatctcaatagtgtttatttcgatgcaccagtttttctccccactggcaaaggtcaaagatgacaaaccagctggagcattagaaccggaagatgcacagaatcataggtcatccgactcttcttttgtaaatatgactgctggcgctgctgatgattgtttgttggatgaaaatgtcactttgttacaactgtag

SEQ ID NO: 4343 - DNA, 1970 bp, Oryza sativa
atggtgttgcagaagaggttggactatggatcccatggccatcgtgctcccattaagccacgtgtcgcaacattggcgccggttaaacgctccacaagaataaggaaaaagcagatgtatgcacttgatttgcttgcgacagctgcagaaaaattgttggctgatcaagacaatttatctagtggacctaacataaatgaaacaccagaaggttatgttacaagcatgaaaccagttaaagcagaacagtttgatgaagcgtttccgttgagaagcgtggctgtgaaaaaagatgactgcaaaggttgtacagtaggctgtgcaggcatctgtggctttctcagacaagctaatatgtgcttggctgaaaactcgtcgactcaaaatctagctgattcagtactagagtcactaacagcaaagcctgatgtgttggctaaggactcatttgttagcagtaaaaaatcatgtcgattgggttttggtcttggcacaattccggagtatggatctgttggagtatgccaaccttggtccacaagatcagcagaggttaaacaagtgcatcgggcgagaccaacagcaatcagaagtcaagaagatagtgatgctgcagctctatgtgctttggtcgagaccatggatttggacaccaaacctcttgctgaggctagctctggtagtaactcaggagtgcacatctgcggccctgacagggggcataactcccatccctcgtgtttggctaaagtgcagcatgctgcagacagagatgatgacgaaaattcttctgggtgtgtacatccaagcacctcaggaaataaccstggttatattccacattatataggtgaccgcaggataaggagattgtttgcctccaggttaaggaaggcagctcgcaacaggatatgtggagagatgtcttgtaaaggtaacaagctgagtttgtgtgaaaagaagatgcccactacgcgccgaagagtgcaacaaacaactttgaagaggaaaagacttgctcaactttactccgaaaaatcatctgatgaagtcaagttaaccatcaaatctttcaacatccctgaactactaattgagatccctgaaaatgcaacagttggttcattgaagaaaactgtgtcagatgctgttactactataattgaacgcggtctccgtgtcggtatacttcttcaaggaaaaaatattcaaaatgacaacaagacgcttcgtcaggctgggatttgccgtggtaaaaaactaaatgacataggctttactctggaatgtgaagctgggcaagattctcaccctggtgtaatagtgccagaagaaatggattttgttggtgcatctgttgtggacaagtctgctacggtgaaatgcgaagaacctgctgagaaccagcagcttatgcaagattttccaggctgcagcttgagtgatcctggttctgttgattatcccgtggaatggagcacacaagaaacatcagcaagctcccaagccatcgtcccttttgcagatccaaactcactggcgctggccaatgtgccgctttctaggtcaaagcgaccagattttgggcaaagacggataaggaggcctttcactgttgctgaagtggagttgctggtggaagccgtcgagcaccttggaacaggaaggtggagggacgtcaaattccgcgcatttgaaaatgttcatcataggacctatgttgatctgaaagatctgcctctttctatcaggatcaggatgcactatctgaaaacctgtgaaacaatatttgatgaaccaggacaagtggaagaccctggtgcacacggcgagcatagcgccgcagcaaagaaggggagctccagttccacaggaactcctggaccgtgtgctcgccgcacaggctactggtcggagcagcaggcaaagctccatggcgatccccctgttcctgaaatctgccctacctg

SEQ ID NO: 4344 - DNA, 500 bp, Oryza sativa
atggcggaggtggaggtgagggtgaggcaggagcaggtggcggagttcagggagacgttcgcgttcttcgacaaggacggggacgggtgcatcacgctggaggagctggacacggtggtgcggtcgctggggcagacgccgacgagggaggagctcgccgagatgatccgcgacgtcgacgtcgacggcaacggcaccatcgagttcgccgagttcctcgccctcatggcccgcaaggcctcgcgcggcggcgagaacggcggaggaggagacgactccggcgacgccgccgacgaggagctccgggaggcgttcaaggtgttcgacaaggaccaggacgggctcatctccgccgccgagctccgccacgtgatgatcagcctcggcgagaagctcaccgacgaggaggtggagcagatgatccgggaggccgacctcgacggcgacggccaggtcaacttcgacgagttcgtcaggatgatgatgctctccgaccaata

SEQ ID NO: 4345 - DNA, 837 bp, Oryza sativa
atgggctccgtatggcgccgcgtgggtgcgcaggtcaccgtgctggaaggcctgccgtccttcctgggcgccgtcgaccagcagatcgccaaggaagcgcagaaggccttcaccaagcagggcctggcgatccacctgggcgtcaagatcggcaacatcacgaagggcgacaacaacgtcaccgtggaatacgcggaytcgaccggcgcggcgmaraccgccacgttcgaccgcctgatcgtctcgatcggccgcgtgccgaacaccaacggcctgggcttcgacaaggtcggcctgcagctcgacgarcgcggcttcatcgccgtggacgacgagtgccgcaccggcgtgccgggcatctgggcggtgggcgacgtcgtgcgcggcccgatgctggcgcacaaggcggaagaagagggcgtcgcggttgccgagcgcatcgccggccagcacggccacgtcaacttcaacaccatcccgtgggtgatctacacctcgccggaaatcgcctgggtcggccgcaccgaagagcagctcaagaaggacggcgtggcctataaagccggcaccttcccgttcatggccaacggccgtgcgcgcgcgctgggcgacaccaccggcatggtcaaggtcatcgccgacgccgccacggacgagatcctgggcgtgcacatcgtcggcccggtcgcgtccgagctgatctcggaagccgtggtcgcgatggagttcaaggcgtcggccgaggacatcgcccgcatctgccacgcgcacccgaccctgtcggaagcgaccaaggaagctgcgctcgccgtcgacaagcgttcgctgaacttctaa

SEQ ID NO: 4346 - DNA, 4170 bp, Oryza sativa
atggccgcctcgccgccgttcatggcggccgcggcgttccttacgcttgtggtggtgctgtttcgggcgccggctcccgccattgccgtcggcgaggaggcggcggcgctgctggccttcaggcgcgcgtccgtggcggacgacccggacggcgcgctggcgagctgggtgctgggcgccggcggcgccaaatccaacgcgccgtgctcgtgggacggcgtgtcgtgcgcgccgccgcccgaaggccgcgtcgccgccgtcgacctcagcggcatgagcctcgccggcgagctgcggctcgacgcggtggacatctcgtcgaacgccttgaacgggacgctgccgccgtcgttcctggcgccgtgcggcgtgctgcggtccgtgaacctgtcgaggaacggcctcgccggcggcgggttcccgttcgcgccgtcgctgcggtcgctggacctgtcgcgcaaccgcctcgccgacgccggcctgctcaactactccttcgccggctgccacggcgtcggctacctcaacctctccgccaacctcttcgccgggcggctgccggagctcgccgcgtgcagcgcggtgaccacgctcgacgtgtcgtggaaccacatgtccggcgggctcccgccggggctcgtggccaccgcgccggccaacctgacgtacctcaacatcgccggcaacaacttcaccggcgatgtctccggctacgacttcggcgggtgcgccaacctcacggtgctcgactggtcctacaatggcctaagtagcaccaggttgccaccggggctcatcaactgccgccgcctcgagacgctggagatgtccgggaacaagctcctctctggcgcgctgccgacattcttggtcggcttctcgtcgctgaggcggctggcattggccggcaacgagttcaccggagcgattccggtggagctggggcaattgtgtggcagaattgttgagctggacttatccagcaaccggctggttggtgccttgccggcgagctttgcaaagtgcaagtctcttgaggtgctcgacctcggtggcaaccagctcgccggcgactttgtggccagtgtcgtcagcaccatcgcctcgctgcgtgagctgcggctgtcgttcaacaacatcaccggtgtaaacccgctgccggtgctcgcagcggggtgtccattgctggaggtgattgatcttgggtccaatgagctcgatggggagataatgccggatctttgctcgtcgttgccatcattgcggaagctgctccttccgaacaattacctcaatggcaccgtgccgccttcgcttggcgattgcgccaatctggagtccattgatctcagcttcaatctgctggttggcaagatcccaacagagataatcaggcttccgaagatcgttgatctggtcatgtgggcgaatggcctatccggtgagataccggatgttctctgctccaatggcaccacattggagacattggtgataagctacaacaacttcaccggaagcattccaagatccattacaaagtgtgtgaatctcatctgggtgtcgctttccggtaaccgtcttaccgggagcgtgcccggtggattcggcaagcttcagaagcttgccattctgcaactcaacaagaatctgctatctggacatgttccagcagagcttggcagctgcaacaacctcatctggcttgatctcaacagcaacagcttcaccgggacgataccgccgcagttggcaggccaggcagggcttgttccgggaggtattgtgtcaggaaagcagtttgcatttctccggaatgaggctggcaacatatgccctggtgccggtgttctctttgagttctttggcatcaggccagagcggttggctgagttccctgcagtgcatctgtgcccatccacaaggatttacacgggcacgacggtttatacattcaccaacaatgggagtatgatcttccttgatctctcatacaatggcctcaccggcacaatcccaggaagtcttggaaacatgatgtatcttcaggtccttaacttggggcacaatgagctcaatggtacaataccggatgcatttcagaacctcaagtcgatcggcgcactcgatctctcaaacaatcagctcagtggtggcattcctccaggccttggtggtttgaatttccttgcagattttgatgtctccaacaacaacctgactggtccaatcccttcatccgggcagctcaccacgttcccgccatcccggtacgacaacaacaatggtctctgtggcatccctttgcctccttgtggccacaatcccccatggggaggtaggccacgcggttcgcctgatgggaagaggaaggtgattggggcgagcattcttgtcggggtggcactctccgtgctcatactgctcctgctgctggtcactctctgcaagctcaggatgaaccagaagactgaagaggtgagaactgggtatgttgagagccttccaacatctggaacatcgagttggaagctgtcgggtgtccgtgagccgctaagcatcaatgtggcgacattcgagaagccgctgaggaagctcacatttgcacacctccttgaggccaccaatggattcagtgctgagactctcattggatcagggggatttggtgaggtatacaaggccaagctcaaggatggcagtgttgtggccatcaagaaactgattcacttcactggccaaggtgaccgggaattcactgcagagatggagaccattggaaagatcaagcaccgcaaccttgtcccattgcttggatattgcaagattggtgatgagaggctccttgtctacgagtacatgaaacacggcagcctggatgttgtgctccatgacaaggccaaggctagtgtgaagcttgactggtcagcaagaaagaaaattgcaattggttcagccaggggcctcgcattcctccaccacagctgcatcccacacatcatacaccgggacatgaagtcgagcaatgtgcttcttgacaacaacctcgatgcccgtgtatcggatttcgggatggcaaggctgatgaatgcgcttgatacgcatctgagtgtgagcacacttgcaggtacacctgggtatgtgccacctgagtactaccaaagcttcaggtgcacgaccaaaggcgacgtctacagctatggtgttgtgctcttggagctcctctcaggtaagaagccaattgatccgactgagtttggagacaacaaccttgttggttgggtgaagcagatggttaaagagaacagaagcagtgagatctttgatcctacattgactgatagaaaatcaggggaagcagagctctatcagtacctgaagattgcatgcgagtgcttggatgatcgacccaaccgaaggccaaccatgattcaggtcatggcaatgttcaaagagctgcagcttgactcggacagtgatatcctcgatggcttttcgatcaattcgtcaactatagatgagtcaggagagaaatcaataaaaatgagaagattacatgaattttgctctcattctgtgtttgtgataatattaccagcttgggagatcagttctgtttttgaaactttagtagatgctacatatatatacttgcaacttgctattcttttaaagtcagtttatactgtcaacatggtcatacctgctgaagtttggaagcatctgtgtgcccaaaaagaaaaggaaaggattaggcaggaggattacgactttagggacaacgactaccctttagttttcatcttctttgggggtcccctgtatatatatatgggttcagatcctttgtggttatggtcttgtgttgtgtatccgcataatttcgatgagataatggacatcatcctggcctctacactccaaccggacactgtggtattgtatatggctctacatggtatctatattcacgcacataattattattctaaaaggaatttagtgaggttcttcgatttattgatgcctcaatctcttaaccatgtgttaataggaacactcacagacaaagaggagtgccatggaaggggaatgaattattgctacacaaggagtggctcaactggtgccaatgactgctgctctgcagcctggcaatcccatctgtag

SEQ ID NO: 4347 - DNA, 1455 bp, Oryza sativa
atggaggaggaggcggtggccaacgaggcgcatcacttcctcgtcgtcacgtaccccgcccagggccacatcaacccggcgcgccacctcgcgcggcgcctcgcgcgcgccgcgccgggcgcccgcgtcaccatctccaccgccgtctccgcctgccgcaagatgttcggcgacgccgcggctgcgggccccggcggggagctcgtcgacgaggggggtttscggtacgcgccgtactccgacggctacgacgacggcttcgacagggcggtgcacgacagcgccagctacatgacccaggtcagggtcgtcggcgcgcgcacgctcgccgccgtcatcgaggggttccgcgccgccgggaggcccgtcacccgcgtcgtctacacgctgctgctcacctgggtcgccgacgtcgcccgcgaccatggcgtccccgtcgcgctgtactggatccagccggccgccgtgctcgccgcctacttccactacttccgtggcacgggcggcgtcgacagggacatcgccgcggcggcggcggcgcgggaccggatggcgcccgtgcgcgtcccggggctcccgccgctccggctgcgcgacctcccgtcgttcctcgccatcgccgacgacgacgacccctacgccttcgtgctcgacgcgttccgcgacatcgtcgccgtgctcagccgcggcgacagacccaccgtgctcgccaacacgttcgacgccatggagcccgaggccgtggcgtcgctgcggcagcacggcgtcgacgtcgtccccgtcgggccggtgctctccttcctcgacgccgccaagagcggcggcggcggcggcgccatcaccaccaccaccagcaacgacctcttcaagcagaacgacacgggctacctcgagtggctcgacgcgcggccggccggctcggtggtgtacatctccttcgggagcctgtcgacgatgagccggcggcagatcgccgaggtgtcccgcggcatggcggcgagcggccggccgttcttgtgggtgctgaggaaggacaaccgcggcgaggctgacgacgtcgccatcgacggcggcgtggtggtggagtggtgcgaccaggtgagggtgctcgggcacccggcggtggggtgcttcgtgacgcactgcgggtggaactcgacgctggaggcggtggcgagcggcgtgccggcggtgtgcgtgccgcagtggacggaccagggcaccaacgcgtggctcgtcgccgagcggctcggcgccggcgtcagggccgccgtgagcgaggtcgacggcgtgctggaggccggcgagctgaggcggtgcatcgacgccgccacgtcggaggcggtgcgcgccagcgcggcggcgtggagagagaaggcgcgggcggcggtggccgacggcggctcgtcggagaagaacctgcaggcgtacgttgggaagattcgcgccaattag

SEQ ID NO: 4348 - DNA, 945 bp, Oryza sativa
atgtggggcctgctgaggcggagcagctcctccgggttctcgtcgtcgtccaccgccgaggaggtcaccgccggcatcgacggctcgggcctcgtcgccctcatcaccggtgcctccagtgggattggggctgaaacatgccgagtcctggtgatgcggggtgtgtatgttgttatgggggttaggaatttatctgccggtgcacgcgtgagggatgagatattgaaacaagttccgtctgcaaagatggagattcttaatcttgaccttagctcgatgtcatccgtgaggagatttgcagagattttcaaagctttgaaccttcctttgaacattttgataaataatgcaggggtttgttttgtgcccttcaagctttcagaggatgacattgagctgcattttgcaacgaatcacatcgggcattttctactgactgatcttttaatcgagaagatgaaagttacagctatagaaagtggcaaagaaggaagggttgtgatagttgcttctgtcagctacagtctctcttatccaggggggatttgttttgataagatcaatgatgaatctgggtatwacagattccttgcttacggccagtccaagcttgccaacatattgcattctaatttattatctagccacttgaaggaacaagatgcaaaagtaatagtgaactctcttcatcctggagctgtcgccaccaacattttgcaccactggtgtcccctatatggtgctatccgtgctattggtaaatattttgttaaaggtgttgaacaaggtgcagccacagtgtgctatgtggcattgcatcctcaggttgctggagtcactggcaaatacttttctgactgcaatatcactgaactgaaatctcatgcgctcgacatggacctcgccaaaagattgtgggatttcagtctcagccaaatccgttga

SEQ ID NO: 4349 - DNA, 645 bp, Oryza sativa
atggagtactacgagcaggaggagtacgcgacggtgacgtcggcgccgccgaagcggccggcggggaggaccaagttcagggagacgaggcacccggtgtaccgcggcgtgcggcggcgggggcccgcggggcggtgggtgtgcgaggtcagggagcccaacaagaagtcccgcatctggctcggcaccttcgccaccgccgaggccgccgcgcgcgcccacgacgtcgccgcgctcgccctccgcggccgcggcgcgtgcctcaacttcgccgactcggcccgcctcctccgcgtcgacccggccaccctcgccacccccgacgacatccgccgcgccgccatcgagctcgccgagtcatgcccgcacgacgccgccgccgccgccgcctccagctccgccgccgccgtcgaggcctccgccgccgccgcgcccgccatgatgatgcagtaccaggacgacatggcggcgacgccgtccagctacgactacgcgtactacggcaacatggacttcgaccagccgtcctactactacgacgggatgggcggcggcggcgagtaccagagctggcagatggacggcgacgacgatggtggcgccggcggctacggcggcggcgacgtaacactctggagctactga

SEQ ID NO: 4350 - DNA, 957 bp, Oryza sativa
atggccgccgccgggatccttccggtgagtggtggcggcggcgcctcctcggcgcggccggtgtcgatggcggagcgcgccaggatggcgaagatcccgcagccggagccggggctcaagtgtccgcgctgcgactccaccaacaccaagttctgctacttcaacaactactccctcacccagccccgccacttctgcaaggcttgccgccgctactggacccgcggcggcgccctccgcaacgtccccgtcggcggcggcttccgccgcaacaagcgcggaaccaagccctctaactccaagaagcccgccgccgccgtcgccggcggcgtcatggcgccgccgcatgcgcagctgcagctccctttcgggtttgatggcggcggcggcgttggccatggtagtatcatcggtggtggtggtggtkgttgcgcgtcgaggttagggtttccggagctcagctcgctgcaagcggctgccgccgtcgactaccagctcggcggcggcggcggcggcgacggcctcgggctcgaacggcagcgcctcccggacttcccgttcttagcccgatccaaagccgcagtccatccaccgccgctgatgtccaccgccgccggggtatcgtatccatttggcgacgtcgcggcgggcggccttggcggcgacatgccggcaaaagccgcaagcgtcgccggctccgccgggctcatcacgcagatggcctcggtgaagatggacgacatcgacaaccacccaccaccgtctgcggcaacgacgacggcgagctcgccgattgagttcctcggtctccgtggaagcttgcagttctggggaggcggcggcggccaccgtggcggtggtgatggtgccggcggcagtgctgctcccggcggcggcggcggcgggtggtccgacctgccggcgtttgacttgtcaacgtctggaaatatactgtga

SEQ ID NO: 4351 - DNA, 1130 bp, Oryza sativa
atggcgccctcccgcccgctcatgcgcgggatccgcccgccgcgcgtcttccccacccgcggcggccgcacctcgcccttggccctcgccctcgccgccctcctcctcgcctccgccttgctcctcgccctcatcgccttcggcgtcttctccctcccggtctccgcccccaacgccgccaccaccgactccgccgccgccgggggagacgccgagcccgccgatccacggcccccgcgcacccgcgcccgccgcgaccttagcgagggccttggggaacgaggagcacaatggacggaagtcatatcatgggagcccagggctttcgtctatcacaatttcctgtccaaggaagagtgtgattacttgattggattggccaagcctcacatggtcaaatccacggttgttgatagcactactggtaaaagcaaggacagcagggtacgcacaagttcaggcatgtttctccaaaggggacgagacaaggttattcgggccattgaaaagaggatagcagactacactttcattcctatggaacatggagagggactccaagttctgcactatgaagtcgggcagaagtacgagcctcactttgactattttcttgatgagtacaacaccaagaatggtggtcagagaatggctactcttctgatgtatctatctgatgttgaagaagggggtgagactattttccctgatgcaaatgtgaacagcagttcattaccatggtataatgaactttcagagtgtgccagaaagggccttgctgtcaaaccaaagatgggagatgcgcttcttttttggagcatgaaaccagatgccactctagaccctttaagtttgcatgtccctttacaaatttctttatggtctgagcagggggttgtcctgtcatcaaaggaaacaaatggtcatcaaccaagtggatgcatgtcctctaaccctgaggaaaaggaatctttggtggtgtggaataggcaaaatacgttgggtggcataatgttagatgaagtgattgatacacaggtggttgtagaggtaacgttgagtgatcaagtgcaggcttgctggagcaaaaagaagatgatgcctcactcagtcgttgacggcacaatcta

SEQ ID NO: 4352 - DNA, 1638 bp, Oryza sativa
atggactccgccgccggcggtggcggcctcacggccatccgcctgccctaccgccacctccgcgacgccgagatggagctcgtcagcctcaacggcggcaccccccgcggaggctcccccaaggaccccgacgccacgcaccagcaggggccccccgccgcccgtaccaccaccaccaggaagctcgtcctcgcctgcatggtcgccgccggcgtgcagttcggctgggcgcttcagctctcgctcctcacgccctacatccagaccctaggaatagaccatgccatggcatcattcatttggctttgtggacctattactggttttgtggttcaaccatgtgttggtgtctggagtgacaaatgccgttcaaagtatggaagaaggagaccgttcattttggctggatgcttgatgatatgctttgctggtcctgctcgtgcccttttagctgacctttcaggtcctgatcagtgtaattctgcaaatgcaattttttgcacatggatggctgttggaaacgttcttggtttttcatctggtgctagtgggaattggcacaagtggtttccttttctaatgacaagagcatgctgtgaagcttgtagtaatttgaaagccgcttttctggttgcagttgtattccttttgttttgtatgtctgttaccctgtactttgctgaagagatcccgctggaaccaacagatgcacaacgattatctgattctgcgcctctcctgaatggttctagagatgataacaatgcatcaaatgaacctcgtaatggagcacttcctaatggtcatacagatggaagcaatgtcccagctaactccaacgctgaggactccaattcaaacagagagaatgtcgaagttttcaatgatggaccaggagcagttttggtgaatattttgactagcatgaggcatctacctcctggaatgtactctgttcttctagttatggctctaacatggttgtcgtggtttccctttttcctttttgatactgactggatgggacgtgaggtttaccatggggacccaaatggcaacttgagtgaaaggaaagcttatgacaacggtgtccgagaaggtgcatttggtttgctattgaattcagttgtccttggaattgggtccttccttgttgatccactatgccgactgatgggtgctagactggtttgggcaatcagcaacttcacagtgtttatctgcatgctggctacagcaatattaagttggatctcttttgatttgtactcaagtaaacttcaccacatcattggagcaaataaaacagtgaagaattcagccttgattgttttctccctacttggactgccactctcgatcacatatagcgttcctttttctgtgactgctgagctgactgctggaacaggaggtggacaaggtctggcaacaggagtcctgaaccttgcaatcgttgttccgcagatagtagtgtcactaggagcaggtccatgggatgctctctttgggggagggaacgtccctgctttcgccttggcttccgttttctcactaggagctggtgtcctcgcggtccttaagctacccaagctgccaaactcttacagatctgctgggttccatggatttggctga

SEQ ID NO: 4353 - DNA, 900 bp, Oryza sativa
atggagaagaagaagagtaataccgataacaacctggaggtgttcctccaggccgccactccatgcctgcgctggcgctccgcctccatggaatgtttccaagatcccagcaaagtttggcaactcgacaagaagaaagacgaggtcgattacttcgcgcttgaggatctctgggagcattacgctgagagcagtgcgtatggccttgctgttcctgtccgtcttgaatccggcaacaccatcacccaacattttgttccctacttatctgccattcagatatacacctccaccaagtctctccttgctttctccagaggcagcgcagggagcgagagtgattcttggagtgatgatagtacaggcgacaagttatcaagatcatgggatgctgctatgtctgatgacgacgactcaagccatgatagctctgaatcggtttctgcaaagcaaggtgccggctgcctgaattttcagtacaacgagtggagctcgccctacgagagagtcccgctagcagataaggtggcagagctggctcagcattatccatgcttgacatctctcagcagtgcacaactttcaccttcgagctggatgtctgtagcatggtacccgatttatcatatcccagctcgtggaaacctcaaggggttatctacgtgtttcctaacctatcattccctctcctcagttttccaagataatgttgaggaggggaggagcgttgttggtgtttcgccgtttgggctggcgacgtacagagcggaagggaagctgtggacatcgtcgaggagctctgatctcttctgggcagcgtcttcttggctcaagcagctgcgagcttaccatcctgacttcatcttcttcacgtctcactgccggcaatctgcattctga

SEQ ID NO: 4354 - DNA, 1488 bp, Oryza sativa
atgatggctgccgcatttcctctgtccaccgccgcaccgccgtcgccgccgctcgtcctccgccgttccgccgccgccgcctactcaccttcctctcccttcgagctctaccgcaaccaccgccgccccgcgcgccgggtgcactgtgccgcctccgcctccgccgcggcamggcggcgcgatgcttgctgcgcgctgsggccgccggccgctgctcggggtggcgcagccscrgcscagggscaggccgggggcggcgcccccaacggtggccccgggggaggggtggggtattcggcgccagcgcaagctggaatcgtgaacgactttgggctctccaattcagagtacggcgtatttgggtctgtgttgacaattggagcaatgattggcgctctgactagcggtcgccttgcagacagtcttgggcgcaaaacgaccatggggttggcagcaattattggcattgttggttggtttaccatatattttgccaatgtgcctgtgttcatatctgaaatagccccaaaggatcttcgagggggtcttgcatcttcaaatcagttgttcatctgctcaggatgttcagctgcttacattattggggcacttctttcatggcgctcgttggttctagtaggattagtgccttgtgctttcctccttgttgggcttctgtttattccagaatctcctaggtggctggccaatacagggagagtcaaagaattcaatgcttcactgcaaaagcttagaggggagaatgctgacatatctgaagaggctgctgggattagagaatatatcgaatcacttcgtagcttacctgaggccagggttcaagatttgtttccagagaaagaatttgtttgcagtcattggttttctggaaagcttgggaccaccttgattggaatttttcaggtcggctttatgtcctttctgtcaatgaaaattccactcacattgtttggtgcccttctcatggatagaagtggaagaagagcccttctactggtctctgcgtctggaacatttctgggctgctttctgactggattatcgttctacttcaaggcacaaggagtgtatgcacaactggttccaacattggctctttatggcatatcggtatattacgctgcatactcagttggaatgggacctgttccttgggttatcatgtctgaggtaggaaaaaggaacaccgtcaagttaatattgtactcctattatgctcccgtattcttggagatattctccattgaaataaaagcaatagctggaagcttggtgacgctggttagctggattggttccttcgcaatttcctactcattcaatttcctcatggattggaactctgcaggtaccttctttctgttctctgcggcgagcttggtcacggtgttgttcgtggcaagaacaataatggcgagagagcataataatatgaccatcgcctctaggcatgacttagaaaggtaa

SEQ ID NO: 4355 - DNA, 903 bp, Oryza sativa
atggggcattactccgagcagaggccggggttcgaggtgaccaaggactggaacggcgccgaccaggtcagcctgcacggcgggcaggtcgtctcctggaggaacgaccgcggcgaggagctcctcttcaccagcagcaaggctatcttcaagccaccaaaagcgatgcgaggtggaattcccatatgctttccacagtttggaaattgtggaacattggagcagcatggatttgcaaggaacaggctatgggccatagatgatgaggctccaccactaaatcataatgataacaacggcaaagtttctgttgaccttctgttaaagccatctgaagatgatctcaaatgttggccacactgctttgaattccgtctcagagtttctctttcgacggatggagatctctcgttagtatcacgagtcaggaatgttaatgggaagccattcagtttttcgtttgcttaccatacatatctttcagtctctgacatcagtgaggtgagaatagaaggtctggagacacttgattatcttgacaaccttagccaaagagaacgttttacagaacaaggagatgctataacatttgagtctgaggttgacagagtctacgttggttccccaagcgtaattgctgtgcttgaccatgagaagaaacgcaccttcattgtaaggaaagaagggcttcctgacgtcgttgtttggaacccatgggacaagaagtcgaaaacgatggcggattttggcgacgaggagtacaagcagatgctgtgtgtggacgctgccgcagtcgagcgagccatcacgctgaagccaggcgaggagtggacggggaagctggagctgtccgccgtcgcttccaccaactgcagcgaccatctggactacccttgtagctag

SEQ ID NO: 4356 - DNA, 1130 bp, Oryza sativa
atggccaccgctgccgccgcctcgctgcagtacgcgctgcagggcgccgcttccgcctccgccaagcccagatccgccgcgccaggcaggagcgtkcgcgtggtcgcggcgaggaggtcggcgagtgcggatgcgacggcggaatccaagtccggcggtcatgaggtcctgttgtttgaggcccttcgagaagcattgatagaagagatgaaagaagatcctacagtttgtgtatttggtgaagatgttggtcactatggaggttcatataaggtgaccaagggcttggctgagatgtttggagaccttcgggttcttgatacccctattgctgagaattctttcgctggcatgggagttggagcagcaatgaaggggctaaggccaattgttgaaggcatgaacatgggtttccttctccttgcttacaatcagatctcaaacaattgtggtatgcttcattatacctcaggtggccagttcaagatcccgattgtgattcgaggccctggtggtgttggtcgccagcttggtgctgagcattcacaacgtctcgaatcgtacttccagtccattcctggacttcaaatggttgcttgctctactccttacaatgctaagggcctgatgaaggctgccataaggagtgagaaccctgtggtgctgttcgagcatgtccttctgtacaacctgaaggagaagatccctgatgaggaatacatttgctgcttggaggaggccgagatggtacgtccaggtgagcatgtgaccatcctcacgtactctcgcatgaggtaccatgtgatgcaggcagccaagacactggtgaacaaagggtacgatccggaggtcattgatatcaggtcgctgaaaccattcgatctgcacacgatagggaactccattaagaagacccaccgcgttctgattgtggaggagtgcatgcgaacgggtggtatcggcgccagcctgaggtcggccatcattgataacttctgggactaccttgatgcccccatcatgtgcttgtcatcacaggatgtaccgacgccatatgctgcaactctggaggacgcaaccgtcgtgcagcctgcccaaattgtggccgctgtcgagcagatctgccaata

SEQ ID NO: 4357 - DNA, 1077 bp, Oryza sativa
atgggggagatcaccaatgtcatggagtaccaggccatcgcgaagcagaagcttccgaagatgatctacgactactacgcctctggagctgaggatgagtggactctcaaggagaacagggaggcattctccaggatcttgtttcgtccccgcatcctgatcgatgtctcaaagatcgacatgtccgcaactgttcttgggttcaagatatcaatgcccataatgattgctcccagtgccatgcagaagatggctcaccctgacggagagtatgcaacagccagggcagcttcagcagcaggaactataatggtgtacaaggacaggaatgtggttgagcagcttgtcagaagagccgagagagctgggttcaaggcgatcgcactgaccgtggacactccgcgactgggacgcagggaagctgacatcaagaacaggttcgttctgccaccatacttgacactgaagaatttcgaaggcctggacctcgcagagatggacaagcaatttgaaccatttcgttggcatttgcagagcaacgattccgggctggcctcctacgtcgccgggcagatcgatcgcacgctcagctggaaggatgtgaagtggctgcagagcatcacgtcgctgccgatcctcgtcaagggcgtcatcaccgcggaggatgcgaggctggccgtgcactccggcgcggcggggatcatcgtgtcgaaccacggcgcgcggcagctggactacgtccgcgaccatcagcgccctgagagtggtcacggcgcggcgcgcatcccsgtgtacctcgacggcggcgtccgccgcggcaccgacgtcttcaaggcgctcgccctcggcgccgccggcgtcttcgccggtggtgttcgcgctggcgccggagggggagccggggtgaggaacgtgctgcggatgatgcgggaggagttcgagctcaccatggcgctcagcggatgcacctcgctcgccgacatcacccgcgcccacatctacaccgacgccgaccgcctcgcccgcccttccccaggttgtgaggacctcgccgccgccgccgccggcgaactctag

SEQ ID NO: 4358 - DNA, 777 bp, Oryza sativa
atgttggccatattccagaagcaggtggcgcacgcgccggcggagctgaacagcccgcggagcagcgcggcgaagcccaagaaccccgacgagatcctcagggacttccacgccctccaccccatcgaggccttctccacctccttcggcggcrgcgccgccttcgcctgcgtcgccggccacgcccgcaatggcctctctggctacgagaggatgttctgtgggctggatgacatctactgcgtgttcatggggaggctggacaacctgagcagcctgatccggcagtacgggctgtgcagccgctccaccaacgaggcgctgctcgtcatcgaggcctaccgcaccctccgcgaccgcggcccctaccccgccgaccaggtcgtcaaggatctctccggctccttcgccttcgtcgtcttcgacaacaagtccggcgccgtcttcgccgccctgagtacggatggggaggtgccgttgtattgggggatcgcggcggatgggtcggtggtgatctgcgacgagagggagatcgtgaagggagggtgcggcaagtcgtacgcgccgttcccggtggggtgcatgttccacagcgagggggggctcaagagcttcgagcacccgatgaaccggctgaaggcgatgccgcgggtggacagcgagggcgtcatgtgcggcgccaccttcaaggtcgacaccttcaccaagatcaactccatgccccgcgtcggcagcgccaccaactgggccgccacctgggacgacgctgccgcctga

SEQ ID NO: 4359 - DNA, 1125 bp, Oryza sativa
atggccattggatccagtggaacatctgtgtacaagacagccacaacaactgaggatatgagctggtggtgttgcattccaaaatccaagaaaggagagaatccttactctcatggcgttagcggtattccgcctgagaaaaacataaggcttttctcttattctgagttgagatcagcaacagaaaacttcaaccgcagtaataaaattggccgaggtggctttgggacagtatacaagggaactattagaaatgggcgagatgttgcggtgaaagttctttctgctgaatccaggcagggcgttcgagaatttttgacagaaattgatgttattaccaatgtgaagcatcccaaccttgttgaattaattggctgttgtgttgaaggaaacaatcgaattttggtatacgagtatttagaaaacagcagccttgaccgtgcattgttgggaatcgccaaaggacttgcatacctgcatgaagagattgcgtcaccgattgtgcacagagatatcaaggctagcaatatacttcttgacaagctttacaaccccaagatcggggacttcggtttagccaagttattccctgataatatcacccacatcagtacccgtgttgctggaacgacaggctaccttgcaccggaatatgcatggcatggccaattgacgaagagagccgatatatacagttttggcgtccttgtacttgagatcgtaagtggcaagagtagttcaaggagtctcctggctgacgataagattctcctagagaaggcatgggagctacatgaggtagggaagctcaaggagctggtggattcagaaatgggagattaccctgaagaggaggtcctccggtacatcaagacggccctcttctgcacgcaggcggcggcggcgcggcggccgtcgatgccgcaggtggtgacgatgctgtccaagcccatccgcatcaacgagcgcgagctcacggcgccgggctacatccacgactacaatggcacggtctccaaggccaccaactccagcaactcgaggttcaagcactcggcgtccgacacctccgacatgttcagcacggtggtgccacccacggtgtccgagatcagcccaaggtga

SEQ ID NO: 4360 - DNA, 6123 bp, Oryza sativa
atggctgccacattaaaaattgttcttggctcccatatatggctggaagataaagatttagcttggattgatggtgaggtcttccgaattgagggtcaaaaggcccatatccgcactaccaacggaaatatggttgttgcgagcatatcagacattcatccaaaggacacagaagtgcattctgatggaattgatgatatgataagactatcatacttgcatgagcctggtgttttaaacaatctatctgttcgatatgcaaaaaatataatttacacctatactggtaatatattgattgcaatcaatccattccaaaggttgcctcatcttgctgaaccccatactatggagaagtacaaaggtgcaaatttcggtgagctagaccctcatgtatttgcaattgctgacatttcttacaggcaaatgatgaatgagagaaagagcaactccatattggtgagtggtgaaagtggtgctggcaagactgaaaccacaaagatgcttatgagatatcttgcatttttgggtggacggtctagaacaggagggaggacagttgaacaacaagttttagaagaaattagaaagtataatctgggtgacccttcgtcgtttcactatctcaaccaatctacttgcattaaagttgatgggattagtgacaatgaggagtatcttgcaacaagaagtgctatgaatacagttggcataactgagcaggagcaggaggctatattccgagttgttgctgctgtgcttcaccttgggaacatcaattttgtgaaagggagagaggtagattcatctgtaataaaggatgagaaagctaggttccatcttaatgcagctgcagagcttttgatgtgtgatcatgggaagttagagaatgcactgataaagaggaaaataaatacaccagaaggagtgattaccacaacagttgaccctaattctgccacagttagcagagatggcttagccaaacaaatatattctcgactatttgactggcttgtaagcagactaaacgcatcaataggacaagatgagaactctcaatatttgatcggcgtgcttgatatctatggttttgaaagtttcaagactaatagctttgaacaattatgcatcaatttcaccaacgaaaaactccagcagcattttaaccagaatgtcttcaaaatggagcaggaagagtataaccgtgagcagatcgattggagttacatagaatttgttgacaaccaagacgtgttggacttgattgaaaagtactctggtactggttcacatataggtatctgttctgttgtttgtgaatataatactgtatggttggttacggaaaactgcaaagtgggaagcaccgactgttatgtattggctaggaaacctggtgggattgttgcacttcttgatgaagcttgtatgtttcctaaatgtacacatgagtcattttctcagaagctgtacgagaagttcaagaaccacaaaaggtttagcaaaccaaagctttctcgtactgcatttacaatccaacattatgcaggagaagtaacatatcagtctgatcatttcctggacaaaaacagagattatgtagtcgtagaacatcaagagttgcttaatgcttccacgtgctcctttgtgtcagggttattcccatcagtacaagaggagaacacaaaatcttcaaagtcctcaattgctaatcgttttaaggggcaactccatgacctgatggagactttaagttctacagaacctcattatattagatgtattaagcccaataatcttcttaagcctgctacttttgagaacgccaatgttttacatcaacttcgatgttcgggtgttcttgaagctattcgcatcagttgtgctggataccctacaagaaaattatttcgtgattttcttcaacggtttcgcattattgctcctgattttttcaaagaaagaaatgatgaaaaagtaatctgccaaaagattttggacaaaatgggactccagggttatcagattggaagaactaaggtgtttctgagagccggtcagatggctgaattggatgctagaagaactgaagtgcagaatagagcagctagagctgttcagagtagatttcgcactcatgttgctcgtgaacaatttcttatgctacacaacacatccatatccttccaatcttttgttagagcaattttggcttgtaagctgcatttgctcctgagaaaacaagctgcagctctgaaaatacagaaaaacgtccgctgctattttgcctcaaagtctttttctgaactgcgctcttcagccattacattgcagacaggattaagggcctttggtgcttataacgaatatattcgcagaaaacaaaacaaagcttctactgatatccagactcaatggcgtagccacagggataattcaaattatctcaaactgaagagatcagtgttgatttatcagtgtgcatggagaatacaagttgctaaaggaaaactcagaaagctcaaaatggctgcaagagatacagaagctctcaaggtagagaaagggaaacttgaggagcatatagaagaattatcaagccgtttgtgtttggaaaagaaactgaggagtgacttagagaatagcaaagcaacggaaatttccaaattacagaccactcttcatgagatggagcgtagagtagaagaagccagagcaacacaagaaagagaatcagccaaaaaggttgtggaagaagctctagttctagaaagagagaagatagctttattgactaaagaagttgaggagctgaaggtactactgctaaaagaacaagaagaaaaaaatgcaaccaatagtgccttttctattgctcaagaaagaaacgatgacctaactaagaaagttgaggttgcaaatgaaaacttcaagcagcttaaagatactctgaagagttttgaagagagcacaaaaggacttgagacttctctgatgatggagaggcaacaaaacgaggcaaatagaagggaagttggtgaagcacaacaaagagttgaagaactactgagactggttgcagatgctaatggaaaatccacatcgcttcagactactgtgcagaggttagaacaaagcttaattgagaaagaggccacttggcttacagaaaggcaagaaagtgaaacaaccaataaattgctcatcgaagctcatgggagaaatgaggaattgctcaataaaattgaagttgctgaaaatgacatatctaaatttcgagacaatatccagagatttgaagaaactgcaacaacattggagacttcattgctagctgagaaacagcacagtgctgcaatcatgtcacagttagctgaaacgaaacagggaaatgaagagttgcagaagaagctggcagatgtcaatagaacaaacgatatacttcaagattctttaaagaggtttgaagaaaatgtaaccacaagggacgccctgtatttagctgaaaggcaagagcacgatgaaacaaagcaatcactttctaaatctcaggaaagaaactgggaattgcttcagaaagttgatgaagcggagaaaagaataaataagcttctggagaatgcacaaagacttgagaaacatgcgacagcaagggagtctttgctgctaaagacaaagcaaagtcatgattcgacaacaaaagcactagttgaagctgaaagtagaaaccgagagttaacaaaaagttttgaggattcagacaggaaaatcaatttgcttgaggattcagtgaacagactggaagaacgtatagcagagaaagactctttgttggaaattgaaagacaagaaaacaatgcaaccaaggatgaagtaaccaatgctcaaaacaagatcatggaattagtaaacgagtcccaacaattgcaagatatcagaaaacatctggaagataacatcaagaggcttgaagaagatgctactacaagagaagctttattgatatcagaaaaacagacacatgaggcaactaagagaactctaactgaaactcagttgagaaatgaagagttaatcaataagatccaggattctgataagcatgcccttcagcttgagctaactatcgagaggcttcaagagaatgcatctacaatggaggctttacttttgagagaacgagagcaaagcaatgcaactatgaaggcacattcagaaagtcaagaaagaaattcacagctactaaagaaatttgaagatgttgacaagaaaattggtcttcttcaaggtgccatacaaaggcttggtgaacaaacaacaaaagacactttgttgttatctgagagaaaggagaaggatgaactgaagaaagtgcttagtgagactgaatacagaaatgaagagttagtaatcaaaattgaagaagagracmaaaaagttgagcatcttcaagacaccataactatgcttaaggaaaatatagcggttcaagctgctaatttggaagctgaaagacaagaaaacgacaggattaggaaatctcttgttgaagctcaggagagaaatgacgagttatttaagaaagttagtgacagtgaatacagggcccagcagctccaagatactgtgcaaaagttgagacaagaaagtgatgctgtgagaaaggcacttgcggaatctcatggaagaaatgaagatctaataagacgaaatgatgacctcctcagtaggaatgatgacttgatcaagaaaattgaagattccggtcaagttgttgctgagctccaggcagccttagaaaggatagaagggaaagcggccaacttagaggcagaaaatcaaattcttcgccaacaagcaattgcaacccccccatctacagccaagtctcaagctgcattctctaaaatcaatgcatttcaacagagaagtccagaaaatggacatattttaaatggcaacgtagcatatgctgaaaagtccttgactggtccagcagaaacaagaccctctatggttgttaaccaaggtagcatcctcaatttgattaaccaaaaggattatgaaagtggagataaaatgcaaagagcacataatgaagtatatcagcaccagcagccccaggatgatcagcagttattgcttcagtacattacccagcaccttggattctctggtagtaaacctgtcgctgcgcttcttctataccaatgccttcttcattggaaatcgtttgaaacagcaaaaacaagtgtctttgacagtatcctacaagagataaactcagcaatagaggctcaacatgatacgagaagcctggcctattggttatccaacctgtcaacattgtcagttctcctgcaactctcatttaaaaccaccagggcagcaatctcaaccccacatagacggagattttcctacgagaggatttttcaagctagtcaaacttcaaatagcggacttgcttatttcagtgctcaaccggtggatgggcctagtggattgcaacaaattgatgcaaaatatccagctttgctcttcaagcagcagcttgtggatctgattgagaaggtgtatggaatgataagtgacaaggtgaagaaggagcttaacccgttacttgagttgtgcatacaggatccaaggacttctcactcaaatcaagcaaaggcctcactatcatctgctagtcacttgggccaacaaagccaactcacacactggttgggcatagtgaaaatcctcaacaactgcttgcatctgctaagagcaaatcatgtcccatcaattctgatccacaagttgcttacccaaatattttctatgcttaagtttttagtgtttacacagtttgcagattcagcctgggaagcactgaggcatataagacaagctgttgatttcttgttcacatcaagcmtgagaactatgatgaaggaggaatcmaataatgccaccagcttttctgtcctgttggatgacgattccagcatacctttttcacttgaagacattgcgaagtcgatgccaaccattgaggagacgacagagaatgacctgctaccttttgtccgtgaaaaccaaagctttgcgtttatattgcacaggagagattga

SEQ ID NO: 4361 - DNA, 1125 bp, Oryza sativa
atggcggcggcggcggcggcggcggcgatatgtggggaggatgagacggcggcgcgggtggggtgcacgggggaatgggcsggcgggatcgagagggtggatcttggggagaggaaggaggcggtggcggcggcgggggcsgggaagaggagcgtctacctgatggactgcgcgccggtgtggggctgcgcgtcgacgcgcggccgcagcgcggagatggaggacgcgarcgccgccgtgccgcggttcgcggacgtgccggtgcggctgctcgccagccggcgcgacctcgacgcgctgggcctcgacgccgacgcgctccgcctgccggcgcacctcttsggcgtgttcgacggccagggcggcccccaagcgaggasctkaagcsaacttgscaagaatttgggggaratkggcgaagttgacatgaaagagcactgggatgatgtgttcacgaaatgtttccagagagtggacgatgaggtttcagggagagtgaccagggttgtcaatggtggcggtgaggtccggtcagaaccggtgaccgcagagaacgtcggctcgacggcggtcgttgcgcttgtctgctcatctcatgtggtggttgccaactgtggagattcgcgcatcgtgctctgccgcgggaaggagcccgtagccttgtcaattgatcacaagcctgacaggaaggatgagcgggcaaggattgaagcccagggaggcaaggtcatccaatggaatggttaccgggtgtccggtatacttgctatgtcccgatcaatcggtgatcgctatctgaaaccatttgtcattccaaaaccggaagttatggtcgttccacgggcgaaggatgatgactgtcttattctagcaagcgatgggctgtgggatgttgtgtcaaatgaagaggcatgcaaagtcgcacgccgacagatccttctgtggcacaagaacaatggcgctgcatcaccattgtctgatgagggtgaaggatccaccgaccctgctgcccaagcagctgccgattatctgatgagactcgctctgaagaaaggcagcgaggataacatcactgtcattgttgtcgacttgaaaccgcgaaagaaactcaagaacatttcataa

SEQ ID NO: 4362 - DNA, 1362 bp, Oryza sativa
atggcgatccccagaaggtcggcggccgccgtcgctgccgtggtggcgctcgcgtccgtggccgctgtcgccggcgaggtcttcttccaggagaagttcgacgatggatgggaggatcggtgggtcaaatctgagtggaagaaggatgacaacagggccggcgaatggaaccacacctccggcaagtggtacggcgacgccgacgacaagggcatgtgcgaagttactctgcttctctgtgcaggtatccagacgtcagaggactacagattctacgccatttcggccaagtaccctgagttcagcagcaaggacaagaccctcgtgctgcagttctcggtgaagcacgagcagaagctcgactgcggcggcggctacgtgaaattgctcggtggcgacgttgaccagaagaagtttggtggcgagacgccgtacagcatcatgtttggaccagatatctgcgggtatgccaccaagaaggttcacgctatccttacaaagaacggcaagaaccatctaatcaagaaggacgtgccatgcaagaccgatcaactgacgcacgtctacaccttgatcatccgtcctgacgccaaatacagcattctgatcgataacactgagaagcaaactggaagcatctatgatgattggaacattattcctccaaagaataagagggatcctgaagccaagaagccagaagactgggacgacaatgaatacattcctgatcctgaggacaagaagcctgagggctatgatgatatccctaaggaaattactgacccagaagcaactaagcctgaggactgggatgatgaggaagatggagaatggacagctccaaccattccaaaccctgagtacaagggaccatggaaccaaaagaaacttaagaaccctaattacaagggcaaatggaaggcaccattgatccccaacccagattacaaggatgatccttacatctacgcttttgatagtttgaaccacattggcattgagctgtggcaggttaagtcgggaactttgtttgacaacattcttatcactgatgaccctgagtatgccaagaaatttgcagaagaaacctgggccaagcataaagatgctgagaaagccgcctttgatgaagctgagaagaagaggcttgaggaggaatctgcaaactctaaaatcgacgacagcgacgacgacgctagtgatgatgaggatgaggcggacgatgacaaggctgatgtcgttgctgagcagaccaaggacaagggtgatgagaaaccgcaggacatcaaggtctctgctgatgagaagccaaagagcagcaaggatgattcttccgctgcgaagaaggacgagctttag

SEQ ID NO: 4363 - DNA, 822 bp, Oryza sativa
atggccggcttcggcttggaccagcacctcgacctcatccgcgcccacctcctcgaagacgcccaccaccacgtcctcgcgccatcgccgtcgccctcgccaccgggtactgggcgtgtcaggccggcgcccgtgtcgctgcccccgaggccgccgctcctgtgggccgcggcgtcggcggcgccgcggcagcaggaggagtgcttcgagctcggcggcggctacgcgggggaaggggaaggggaggaggaggacgacttccggcggtaccgcggggtkcggcagcggccctggggcaagtacgcggcggagatccgggacccggcgaggaagggcgcgagggtgtggctcggcacctacgacaccgccgtcgaggccgcgcgcgcctacgaccgcgccgcgttccagctccgcgggtccaaggccatcctcaacttccccaacgaggtcgccgccgacgccgccgtcaagtgggcccctcccgtcgcccctatccccgccgccgccatgtccgccggaagaggcaagagggtgaggtcggaggagcagtactacttgagggaggtgaagaaggagaggctgatcatggcgccgccggagaactcctcctcgtcgtcgtcgtcggcggcggcggcagccggagacatctgggacgagctgaaggggatctgcagcctgccgccgctctcgccgctgtcgccgcacccgcacatggccttcccgcagctgttcgtaatcgatttggctttcggccaaatattgaattctttcgttctattgctgctcagaacacgtgattttgcttttgactatgctatttga

SEQ ID NO: 4364 - DNA, 1245 bp, Oryza sativa
atggcgcgacatcgcgactcgcgtgaggaggagacgaggagggggttagggttttksgcggcgamgcggcaatgtcgctcctygatcgcgtcttctgatctgatcttctctctctttatgttggctttctctgcgcgaggccgaggggccgaggctgcgccggcttactgttggattgggccgatcatagttctaagccttgtgataatagcatcctttcaagtgcttggctctgctgaaggccataagacggctgtaccggcgatcttcgtgttcggggacggcatgctggacgttggcaacaacaactacttgccgtctgacgccccccaggctgactacccctactatggcatcgacttccctggctctgagcccactggaaggttcagtaatggatacaacatggctgacttcattgcaaaggatatgggattcaaaatgagccctccagcttatctatcgcttaacagttcgataaaaatggagaccaatttcaccggagtgaactatgcttcagcaggtgctggcattcagatcatcatgaacgatgaagcaacgattccattcgtgtaccaagtgaagaacttcaatgacacggtaagccagatggaggctaacctaggccaccagaagttgagcaagctgttggccaaatctttattcctgataagcattggtaccatggatctgtctgtaaatatatggagagtattaagatattccagaaagccatcaccattcaacattccatatacactttcctcctacaaggccataatcatgcagttgtatggcctgggtgcaaggaagtttgggatcatcaacatccagcccttagggtgtcagccatggatgaggaagaacttggaaaacaatgtcgactgcaatgactccatgaacagtctcgctagggaattcaacgatggcctcaagcccctcttttccaatctcagctctcagctgagtggtctctcctactccatcgccgacttctacgcattctcaaatgccaccttcatgaaccctcgggcttacgggtttgtgaacatcaacagcacatgctgtattcccccctgcacacctgaacatgaaccaccctgccaaaaccgcaagcagtactggttttgggatctttcttacacgactgagcgggctgctaagctagccgcctctgcattttacgatggccctgcccggttcactgcgccggttaacttcaagcgattgataaagatgaaatga

SEQ ID NO: 4365 - DNA, 525 bp, Oryza sativa
atggccaccgccgcctcctccgccgcatccgtccacgacttcaccgtcaaggatgcaagtggcaaagatgtggacctgagcaccttcaaggggaaagtcctccttatcgtcaatgttgcatctcagtgtggcttgaccaattccaactacacggagctgagccagttgtatgagaagtacaaggaccagggttttgagatccttgctttcccatgcaaccagtttggtggacaggaacctggcactaatgaggagattgtccaatttgcttgcacccgcttcaaggccgagtatccaatttttgataaggttgatgttaatggtgacaacactgcacccatctacaagtttctgaagtccagcaaaggtggtcttttcggtgacaatatcaaatggaacttctccaagttcttggtcgacaaagaggggcgtgttgtggagcgctatgcgccaactacttctccactcagcatggaggtttgcagccaacaatatctgaaccttggcatatttgacaaggtctga

SEQ ID NO: 4366 - DNA, 1203 bp, Oryza sativa
atgggctgcaactgcctcgtcggcaagggcggcaacacgaggccagccgccacgacgagcgcgcggccgtcgtcgtcgcggtgcgcgcactgcggcgcgggcctcgccgtgccgcggccggggccggggggcgctgccgccgtcaccaccgtccggtgcgcgctctgccaccgcatgacgtgcgtcgaccggcgcggcggccgcgacctgggcggcggcggcggtggcggcgcgctcgaggcctcgtcgtcgtcgtgggcgccggcggaggcgtcgttcctcaggcgagacgcgccgtccggctacccgttcgtccccgggaggaagcgcgcgctcctcgtcggcgtcagctacaagggctccagctacgagctcgaggggaccgtcaacgacgtcgactgcatgaggcgcctcctcggcgagagcttcggtttccccgccgattccatcctcgtgctcaccgaggagctgggcgagggcgacccgtcgaggtcgccgacgagggcgaacctgctggcggcgatgcggtggctggtggaagggtgcgacgccggcgactcgctggtgttccacttctccggccacggcgtgcagaagctggacgtgaacggcgacgaggtggacggctacaacgaggcgctctgccccgtggacttcgagcggagcggcaagatcctcgacgacgagatcaacgagaccatcgtccggcccctcgtcgccggcgcgaagctccacgccatcgtggacacgtgccacagcggcaccatcctggacctccccttcctctgccgcctctcccggacgggctactggcagtgggagaaccactgccgccgcccggagctcgccaagggcaccagcggcggcctcgccatctccatcagcggctgcagcgacgatcagaaatccgcagacagcagcggattctcgtcggagcaggcggcggcggcggcggcgatcggggcgatgacgtacagcttcatcagggcggtggagtcggagcccgggacgacgtacgggcggctgctggcggcgatgcgggcgacgatccgggaggggcagcaggggagcagcgtccggcggctcctccccggccgcctcggctccttcgtccgcaagatgatcccgtccggcggcgtgcaggagccgcagctttgcgcgtcggaggtgttcgacatctacaggaaaccgtttctcctgtga

SEQ ID NO: 4367 - DNA, 680 bp, Oryza sativa
atggggagcgatgttatccaggccaagctggtggtttatctgggcatttccaatattttggagtcgacgatcggggcagcgttcttctcgcaggtgctgatcatggacgaggccaccgtgaagcttgacatctgggacaccgccggccaagaacgctaccacagccttgcgcccatgtactaccgcggcgcggccgccgctgtcgtcgtctacgacatctccagcacggattcttacattcgagcaaggaagtgggtcgacgaactccagagacaagggaatccacatttggtgatggcattagtgggcaacaaggtcgacctggaagaaaagaggcaggttggaacgcaggaggcgatggaatacgcagagcgaaacggcctcttcttcatagagacctcggccaagacgtcgcagaacgtcaccgagctcttctacgaactaggcaagcactaccgaaacaactctgtcggattcaactctctgatgcatcgtcgcctgataataacatctacgtgttgttgccagctgataggctggtcaaagtgcgacctcaccgcccttccgggatggttctccacgacggccggcgccgccgcgacgacggcggcggctggccatggcggctctgttgctccggctgatgcgcctctaccgactcccgaaatacgccatcctta

SEQ ID NO: 4368 - DNA, 2274 bp, Oryza sativa
atggagaggagcggcggcggcggggcggacggcgacgaggagcggctgccgctgcaccatgggtttgagacggagagggcggctccctgggctwctgcggagtcgaagccgccgccgccgccgcggggcaggttcgggcgcgcctccgtgcgcgccgcgctggcggtgtgcttcctggccatcccggccgtcctgctcctgcagcggtggcaggccgggtcctcgccggagtggctcttcgaaatcgagcccccggcggacggagaccgagatatgcaagatgatctgcctgatgatctaactgcatctcagtacatcggctatgacaaatttctgggtggtcttctgcaagagggatttgatgaagtatcctgccgaagcaggtatcagtttgcacggtaccacaagaacttcacaagaataccttcttcatacctcttagaaaggttaaggagacaagaagcattgcagaagaagtgtggtccaggcactaaatcatacaagcaagctgtgaagctgctgaggtccagtcagggcgtcaacatgacgacagattgcaactatctgttcttgacagtacatgctgggttagggaacagaatgcttgagattgcttcagcatttctttatgcactccttacaaaccggattttgcttttggaccgttatcaggagatcggtgaccttttctgtgaacctttcccaggaacctcgtggttaatgccttcggatttccctctaaactatggtgaatttactcagagtagcccagagagctatggaaacatgctgcagaataaggttgtcggtgacaatacagatcagtctctggctggttctaggcctccctacgtgttcctctaccttgatggtaactatgaattccatgacaagcttttcttctgcgaagacgaccaacagttcctgcaagatgtgccgtggttgatcatgagaaccgacatgtactttataccatcactatttcttattccaagttaccaagatgagctcagcaggctatttcctgagaaagatgctgtttttcatcacttggcacgctatcttttccatccgacgaatagcatatggtattcagttaaagggtactacaggtcctaccttgccaaagctaataaaactgtgggaattcagatcaggatatttgagaaagagggcatcttgcaaaaaaacgggcgatttccatatgtcttagaacagatcctttcatgcgctcagaatgaaaagctgctgccagaaatcagtatgaaagatgaagcagaagcaccgaccgcgcccaagaataaccagacaattgctgttcttacaacttctctgagctcctggtacagtgatcagatccagaagaagtacagtgagcacccaacagtcgatggaaccagggtagaagtataccagccgagccatgaggagtaccagagatcaaagaacaagaagcacaacatgaaagcactggccgagatctacctactcagcatgacggacgtgctcatcaccagtggcttctccaccttcggctacgccgcgcagggcctctccggcctgacgccgtggatcatgttcaggtcggagaaccacgccatgccggacccgccgtgccgccgcgccatgtcgatcgagccgtgcttccatcaggctcccttctacgactgcaaggcgaagaggaacgctgacctgggcaagatggtgccgttcgtgaggcactgcgaggacgtcagttggggcctgaaggtgctcgctgccaaatcccaaatgggagtatgggaggcggagttggtggggaaaggcagcgagattggattggcgataacgctgttgccgcttcttgcggtgttcttgctcggtgagaatgtgagattggccgtaaacgattttgctaaagctcatcagccggccggcacgtcggacacaaacacgtcggcctttgtgtccagcctaagcacgtgcgatgatggagattggagaagcacagtgacaaggtggcctctgaccggcgagccagtcaccgccactacgtcctatataactaaatttacatttgtaaattctgttgatatgatatttaatatgacatttgatatgacatttgatgtgacatgtaagtgcactgtaattttgtctcaggttcttgggctcaatggaggatatgcgttagcccggcccatctacgtgttcgttcttgctgtcgaccgatatagtgggcctgcccccttctttgtgtttgtggatggaaaaagtccacttagactcccttaa

SEQ ID NO: 4369 - DNA, 3582 bp, Oryza sativa
  misc_feature (1)...(3582): n = A,T,C or G
atgaagaatctgttcaagagtaagatcaagtggcagcaccggtcgaacgaccccgcgtcgtcgcaggggcaggggcaggggctgccgcagcaracgccgccgtcgccatcgccggcragctccccgtcgggggggccgcctgcgctatccgtgtcgacggtatcgtcgtcgtccccttccgccgccgcgacgccgacgggggctgctgcggcgggnccgggaggtgggggtwggggaacgggtggggaggattacatgttgtcggaggaggagttccagatgcagctggcgatggcgctgtcggcgtccaacagcgagtgcgtgggcgacctggacggggagcagatcaggaaggccaagctgataagcctcggcaggggcgaccgcttcgccgccgtccgggacgacgagcaaaccgcggatgcgctctcccgccgctaccggatattttgcttggtagatcactttttyccttccatgatgtgtcaattaagctcaaacatggggatgataagactacaactttctgattaccatgagaaagttattgatggcttctatgacatttttggcccctctatggaatcatcaaagcaagggaagatgccatcactagcagatcttcaaacgggcataggcgacctgggttttgaagtcatcgtaatcaatcgtgccattgataccaccttacaggagatggaacaagttgcacaatgtatcctgcttgactttcctgttgcaaatattgcagccttagttcaaagaatagccgagcttgttacagatcacatgggtggacctgtgaaagatgcaaatgacatgctcactagatggctagagaaaagcactgagctaagaacctcactacacacaagtttgttgcctattggctgcatcaagataggtctgtctcgtcaccgtgccctacttttcaagattctcgctgatagtgttggcattccttgcaagcttgtcaaagggagtaattatactggtgatgatgatgatgctatcaacataataaagatgaatgaaagggagtttttggttgatctcatggctgctcccggtactcttattccatcagatgtcttaagttggaagggcaactcattaaattctaatgcaagactcacccagaatccattggctgggtcatcaagtacaactgattctaatctcagtgccaatgcattaccacccggacataaaggtggccaactgcctttatttagcagtggcgattggatatcggccagtcaatctggatatgaaaaagatggagccaccacatcttcacaggcctcttcaagtggcacaacatctgttgctgctggaagcgcttttgatagttcttggacattagtttctcatggacaatcagatgatccatcaacctctgctggtatgtcagcacagcagaaagttatacttccaggtggagaacatccatggaatgagaatataaatgcgcgaaatgagaatataaaacttgtttcagatttacaagggaattcagagtccatcaacttatttgccgaccttaatccttttgggggtagggagcccaaaaggacttcagtgccattaaatgggccagataatagaaataatgagttgcaaagacgcagagagaatgtagtccctagcacacgaagaccccagcagcgattagttatgaaaaactggtctccttacaatgatgtttccaacaacaagcagtacaattatgttgaggattcatttgcacgtagaaatattggtgataatgctgcatcatcatctcaggtgccacggccatctgcaaaaaatactaatcttaatgttgtagtgcgcactgatacaccatacatggcagctcataattatgataatagtatggctggttcctctgcaatgaagatgacttctacagctgggattgggaaggttcctgataaggttctgtacggtgatttggacaagggccttactaattctagactgggggatcaaccaccgatagaaagacataaatggggcaattctgtagaaggaaggattccaacaggcacagttcacaatcaagcaaaagaacacaaggagaacttcgatggaaagcaagacaataagaagttacatcctgatccaaagaaatccccacttgacagattcatggacacatcaatgccatcaaggaaccctgaatccgtttcaccatcctttgctaggtcacacaagctagacaccatgttcgacgatgtgtctgaatgtgaaattcattgggaagatcttgtgattggtgaaaggattggcttaggttcatatggagaggtgtaccgtgctgattggaatggaacagtgcggattatgcgtcgactgcgtcatccaaatattgttctcttcatgggtgctgttactcgtcctccaaacttatctattgtatctgagtatcttccaaggggaagcttatataagatccttcaccgtcctaattgccaaattgacgagaagcgtagaattaaaatggcccttgatgtggccaaaggaatgaattgcctccatattagtgtaccaacaattgttcatcgggatcttaaatcaccaaacttgctggttgacaacaactggaatgtgaaggtttgtgattttggactttcacgcttgaagcacagtacattcttatcatccaaatccactgctggaactccggagtggatggcacctgaggtcttgcggaatgaacaatcaaatgaaaagtgtgatgtttacagctttggtgtcatcttgtgggaattagcaacacttaggatgccatggagtggaatgaatccaatgcaagttgttggggcagtcggcttccaggacaagcggctcgatattcccaaggaaattgatcctctagttgcaaggatcatatgggaatgctggcagaaatctggaagggcttcgtgggatctgctgctcgagcttcgtgagttgcacaggaaagtcttgggcttttgcgctcagctccaccaccttcacctgttccctcgggccatggctgctctcgtcatctcgaagcagcgcagtcaccagcagcagtcatccgatcgccggaggaagccaatcgtcgaayttsgcgtaaccccagtccatgcgtggcttcaatgctgtcaactgccgagccttccactccagcgtcagcattggcatcctgccatccccgcytccacccccagcgccacctactcctccccggagccgaagacgccmaagtcgcagccacaccacgggaagaagcggagcagggcaatatctataagcccttcaacgtctccgcmatcccggcctgagctctgggctggccccgctttctcaaactctccgcctcccagctcgctgccgatacccaagttctcactccaccagaagcgcagtgtttcactcgagttgccacctgctggccgatcagatgatgtggtggtgcctttgcatgctaagtcagcgccttcgtcgccaaccgcaggctcaggtgtcagcttctttagtgatagtgatactgctatcgcgactgagaatctgaggagaatcctccacctgaaaatcgctgatcactga

SEQ ID NO: 4370 - DNA, 2967 bp, Oryza sativa
atggccaacaaacggtacgcaagcttcttcctgttctttatgatgccattttctctcctgcacaaatcgtacccgcagttggtgaatcaatctagtgatgaacaccaaatcctccttgagatcaagagacactgggggagctcacctgttttaggtagatggagctccaattctgctgctcactgcaattggggaggaatcacatgcacagatggtgtggtgactggcatctctctaccaaatcaaaccttcatcaaaccaattcctccctccatttgcctcctcaagaacctcacccacttggatgtctcctacaacaacatatcctctccattccctacaatgctctacaattgctccaatctcaagtaccttgacctttcgaacaacgcctttgctgggaagctcccaaatgatataaatagtctaccagcgctgctcgagcatctcaacctttcatctaatcacttcactggcagaattccaccatcaattggactgttcccaaggctgaagtcgctgctccttgacaccaatcagtttgatgggaggtacccagctgaggatatcagcaatcttgctgaccttgagaggctgacactagcagtcaatccatttgtcccggctccctttccaatggagtttggtaggttgacacgtctgacttacttgtggctgtcaaatatgaatattaccggtgaaatccctgaaagcctatccagcctcagagagctcaacgtcttggacttatcatcgaacaagatccaaggaaaaattccaaggtggatctggcaacataagaaacttcagattctgtacctgtatgcaaacagattcaccggtgagattgaatccaacatcacagccttgaacttggtggagattgatgtttctgcaaatgagttaacaggaacaataccagatggatttggtaagatgaccaaccttaccttattgtttctctactttaacaagctgagtggatcaataccaccaagcgttgggctgctgccaaagcttactgacattcggttattcaataacatgctctctggatcgctcccatcagagcttggtaagcactcaccactggccaatcttgaggtctccaataataacctctctggggagctaccagaaggcctctgcttcaacaggaagctatatagcattgttgtgttcaataacagcttttctggaaaacttccatcttcattggatggttgctatccgttgcaaaatttgatgttgtacaataataatttttctggagagttccccaggagcctttggtcagtggtgacagatcagctaagtgtagttatgatacagaacaacaatttctctggcacattccccaaacagctcccatggaacttcacacgtcttgacatcagcaacaacagattctcaggtcccattccaacattggcaggcaaaatgaaagtattcagagcagcaaacaacttgctctctggtgaaattccctgggatctgacaggcatttcacaagtcagattggttgatctttctgggaatcaaattagtggctcactacccacgacaattggagtgctgatgaggctaaacacactttacctaagtggaaatcagatatctggtaatatcccagcagggtttgggtttattacagggctgaacgacctagacctctcatcgaataagctatctggtgagatcccgaaggattctaataagctgctgctcagttttctgaatctctctatgaaccaactcactggggaaattccgacatcattgcaaaacaaagcatatgagcagagcttcctattcaacctaggcctctgtgtctcatcgagcaattcactccaaaatttccctatctgcagggcaagagcaaacatcaacaaggatctgttcggaaagcatatagccctcatttctgctgttgccagcattatactcttggtttcggcagtggctggtttcatgctcttaagaaggaaaaagcatctacaagatcacttgtcatggaagttaacacccttccacgtattgcatttcaccgcaaatgacattctttctgggctctgcgagcagaattggattggaagtggcaggtctggcaaggtgtaccgggtttatgctggagatagaacaagtggtggcaggatgatggctgtcaaaaagatatggaacatgcaaaatattgataacaagctggagaaggacttccttgcagaggttcagatattgggagagatcaggcacacaaacattgtcaagcttctatgctgcatctcaagttcagaggcaaagcttctgatctacgagtacatggaaaacggcagcctacatcaatggcttcaccagagggaaagaattggtgtgccaggacctctggattggccaacaagattgcaaattgccatcgactcagcgagaggcctttgctacatgcatcaccattgctcgcctcccatagtgcatcgagatgtcaagtgtgccaacatccttctggatcacaacttcagagcaaagatggcagattttgggcttgcaaagattcttctcaaagctggagacgacgagtcattttctgctatagctggaacttttggctacatggcaccagaatatgacatcggctcaagctttggtgtggtccttctggaaatcataactggtcgagtggcaaatgatggtggagagtactattgcttggcacaatgggcatggaggcagtaccaagaatatggtttgtcagttgatcttctcgatgagggaatcagagacccaacccatgttgaggacgcattggaggtgtttacacttgctgtgatttgtactggggagcatccttcaatgcggccatcaatgaaagacgtactgaatattcttatccaatttgaccgtaaatctacaaggattcagggtagcttgaaacatgctgtctctgatgaaacaacacttcttgaatcctag

SEQ ID NO: 4371 - DNA, 1320 bp, Oryza sativa
atggcgatcgccgtgagcgggcgctggacgcggctgcggacgctgggccgtggcgcgtcgggcgccgtggtgtcgctggcggaggacggcgcgtcgggggagctgttcgcggtcaagaccgcggccgcggcggaggcggcgatgctgaggagggascgggggatgatgtctgggctgtcctcgccacacgtcgtgccctgcatcggcggcggcgatggccccgacgggtcatacaatctcttccttgagttcgcccccgggggatcgctcgccaacgaggttgccagggatgggggacgcctcgaggagcgcgcgatcagggtgtacgcggcggatgtcctgcgcgggctgacgtacctccacgggatgtcgctcgtacacggggatgtcaaggcggacaacatagtgatcggtgtcgacgggctcgccaagctcgccgacttcgggtgtgcgaaaaccatggattcggagcggccggttagcggcaaacctgcgttcatggcgccggaggttgcccgcggggargagcaggggccagcggcagacgtttgggctcttggctgcacggtcatcgagatggccaccgggcgcgcgccgtggagcgacatggacgacgtccttgccgccgtccaccggattgggtacacggacgccgtgccggargcgaaggacttcttggccatgtgttttgcgagaaacgccggcgaccggagcaccgcggcacagctcttggagcatccgttcgtggcattcgcctgccacgaagtcaaggccgcgcagccgaagcccaggtgggtctctccgaagagcacactggacgccgcattctgggagtcggagaccgacgacgaggaggaggtcgacgagataacagagagcctctgcgataggatcaagtcattggcgtgccctgtttcggccttgccggattgggactccgacgaaggctggatcgatctgctcggcgagcagtgcgaggcttgcgattcggaagcggccagggaatcgattgatgtggcgcgtagcgcgccaagcaaagtgtccagcgcggcgacggtgccagctgctgaagtggtgcttgtcggcggcggctgctgtccaagcaatgaagcggacgctttcgatcagtcaattggtggcgatatccaagccgctgatcgttcaatcgagcgtcggaataaagtctgcgctggttcagacaatgatgtacttccatttcgattaaggatgtctggaagtgtgcaagaactccaagtctcttatggtcagctcaatgtcaaagcctgcattgctggcaccaaaatgagctataccgggtag

SEQ ID NO: 4372 - DNA, 3840 bp, Oryza sativa
atggtgttcaaggggaggttcttctcgtcccggcacaagtcgtcggagtcgtcgagccccacggacgggagcaacagcccgcggacgcccacctccgcgccgcccgcggcgggktcsccggcggcggcttcgtcgtcgtcgtcgtccagatccgacaagaagaacccmaattgggaraccccccaggaaagcgcgaaaaagctctttgggcggctccgcktccgggtccgccgcctccaagggcggcccgggggcggcgcctgcgtcrgcctcgtcgagccgtcgrcgacgggaggaaggccgccgcggcgcagcttcgggatgggggcgcgggcggggcgtcggcggcggcgctgtcgcccatcctggcgtcctcgctgggcctcaaccggattaagacgagatccgggcccctgccgcaggaggggcaccgcatcgctgccgcgctcgggagcagtaatctatcgcgtgggcaggcgcaggcggacccgtcggctgcatcggctggcggcggcggcggcggcgggaggaaggctggaagctcatgggcagattcgaccagtggcagccgggggaaagggaaagcggccgaacatccagcgcggggcgccacagcaacgagcctggaaggaaagagctctgcaaaagtgtgcatatgatccctgtgaaacaccaaaggaatcggaatctccacgctttaaggccatcatgcaggctaccagtgctccaaggaagagagtccctgcagatataaaaagtttttcgcatgagttgaactccaagggggtccgaccattccctttttggaagcctcggggcatttacaacttgaaggaggtgttaaaagttattcaggtgagatttgagaaagcaaaggaggaggtaaattcagatttggcagtatttgcaggagacttggttggtgtaatggaaaagtacgcagattctcatcctgagtggaaggaaactttggaagatttgctcatacttgcacgtagctgctgtgtaatgacaccgggggagttttggcttcaatgtgaaggcatagtgcaagatttagatgatcatcgtcaggagctcccaatgggtgtgctgaagaaactgtacactcggatgctttttatccttacgagatgtacaagattgcttcaatttcacaaagagagtggctttgcggaggatgaagttgttatggatcaacgtgataagatcatacaatctgctgataggcagatattggctcaaccaggtgatgacactacaaccagaggcagcaaaagtgatgtacgaaaatcgtacagtcaagagcaacataatttaaaatggaagagaagccaggagataaagcctgttaagtttctttcaccgcttgatacaacagatgttaaaaaggaggttgagtctccaaccagggagcgtatatcttcctggaaaccttttccatcacctgtcccaaaaccccctaaagaccctacccctattaaagaggaatcacctaataagaaaacagatacaccccctgcagttagtagccaggctgaattgaacagtccagtggaatctacatcacatcaatctcttcctcccaagcatcaacacaaaacttcatggggtcactggtctgaccagccaaatatttctgaagaaggttcaataatgtgtcgcatatgtgaagaatatgtccctactcattatgtagaaaatcactcagcaatatgtgcaagtgctgacagatgtgatcaaaaaggtgtaagcgttgatgaacgtctaattagagttgctgaagcacttgaaaagttggtagaatcttatacacaaaaagaccttccaaatgctgttggcagtccagatgttgcaaaagtatcaaattcaagcatcaatgaagaatctgatggcccctctccaaaactctctgattggtctagaagaggctcagctgatatgcttgactacctccaggaggctgatagcactatttcactggatgacataaaaaaccttccttccatgacatgtaagactcgttttgggccaaaatctgatcatggaatggctacatcttcagcaggaagtatgacccctagatctccactaacaactccaagatctaatcacatagacatgcttttagctggccgaagtgcaattaatgagagcgatgatcttcctcagattgttgaacttgctgatattgcgcggtgcattgcaactactcctctagatgaagaaagggcactctccctattggttacctgcatagaagatctgcaagaaattgtcaatcgtaggaagcatgaggctctcacggtgcagacatttggcacacgtatagaaaaactccaccgggagaagtacctactgctttgtgattcggttgatatggacaaagttgattcagcgagtactgtaatggatgaagaagatgatgttgtccgtagcttacgagctagtcctgttcacccagtcaaggatcgtacttcgattgatgacttcgaaatcattaaacctatcagccgtggagcatttggacgtgttttcttggccaagaaaagaactacagggagacctctttgctataaaggcattcttgaccaaaaaccaaaaatattgctatatgactatctttcagacgcaaaccagaattttagcatgcaaaaaaggggaaaggaaattgcttttgatgtattaaggaaggcagatatgattcggaaaaatgctgttgagagtatattggctgaacgtgatatcttgattacagtgaggaatccttttgtggttcgtttcttctattcttttacctcccgggaaaatttgtatctagtcatggagtacctgaatggaggggacctgtattctctactgagaaatttagggtgcttggatgaagatgttgctcgtatataccttgcagaagttgtgctagctttggaatatttgcactctatgcacatagttcatagagatcttaaacctgacaacttattgatagctcatgacgggcatataaagttgacagattttgggttgtccaaggttggtctgatcaacagcacggatgatctatctggtcctgctgttagcgggtcttcgttgtatggagatgatgaacctcagatgagcgaatttgaggaaatggatcaccgagcacggagacaaaagcgctctgctgtcggaactcctgattatttagcaccggaaatccttttggggacaggacatggtactagtgctgattggtggtctgtgggtgttatactttttgaattaattgttggaatacctccattcaacgcagaacacccccagacaattttcgacaacattctgaaccgcaaaataccttggccacatgtcccagaagagatgagttctgaagctcaggatctaattgacaaattattgacagaagaccctcaccaacggctaggtgcaaatggcgcctctgaggttaagcagcatcaattttttaaagacattagctgggatacccttgctaggcaaaaggctgcctttgtcccctcctcagatagtgcatttgacacgagctacttcaccagccgttattcttggaatccatcggacgaaaacatctatgaagcatacgaatttgaggattccagtgataatggaagccttagtggcagcagtagctgtgtgagcaatcaccaagatgatatgggggatgagtctagtggcttcactgagtttgaatctagctcaaatgtcaactattctttcagcaatttctcattcaagaatctatcacaacttgtctctatcaattacgatttgctcaccaaaggattgaaggatgatccaccaacgaaatctgagacgtag

SEQ ID NO: 4373 - DNA, 2649 bp, Oryza sativa
atggtcatggttgtccctccaggagcgcgcggtggagccaaaccccctcttaaccccacggcgcacttgggagctcgaacagtgacagcagcaattacgccargcgcgstactcaaccacccgaattacgcgaggcgccccagatcttgtagtggctgtgtcatgtgccgtggatgctgccgccgccgcggcggggccggcgccggcggcggggktcgcgggaccgcgtcgctggccgtcgcggcgctggcggcggccgcggtggtcgcgttcctggaggggacggcgaggggcgtgtcctacgtgggcgacgggtggttccacgacggcgtcaggtgggacgccgagggcgggcggttcctggtcaccaccatgaccgatggccgcgtcgtggaggtgcccggcggcggcggcgcgggtgcgggggaggggaaggtggaggcgcgggtggtcgtggcggaccccggggcggccgggaggtcggcgacggggctcaccttggacgcgccgagacggcgcctgctcgtggtgtacaccgacttggcgccgtggttcgggtacgccgccgtggccgcctacgagctcggctcctggcgccgccttttcctcgtccgcctcgaccggccaggtgattcaacgctcgccgacgacgtggccgtcgacgaggaaggcaacgcgtacgtgacggacgccaagggcaacaagatctggaaggtgagcccggacggcgagccgctgtccgtcatcaagaacgccaccttcttccagaggccagggtggatcaacaacttcgtcggcctgaacggcatcgtctaccaccccaacggctacctcctcgtcatccacacctccggcggcgacctcttcaaggtctgcccgaagacggggagcgtgcacgtcgtcaaggtgaagggctcgctgaagaccggcgacgggctggcgctgctgtccccgacgaggctggtcgccgccggcctggtgagccggctggtcgagagcgacgacgactgggagaccgccgtcgtcaccggccgttcatgtcctgatgctttgaaaagcttgctttctgtggcaccccttaatgatattctgcatgaaggaagtgctgcaaatgatgcagttgagactatgatcaaaattctcaactcacctaaagaagaaactcaggctaaatcagcatctgctcttgctggactgtttcattgtcgcagggacttgcgagaaactcatattgcagtgaagacactttggtcagtcatgaagctgattgatgggcagacagataaaatactaatggcggcctcatcttgccttgctgccatttttctgtcaatcaagcaaaataaggatgttgctgcaattgggcgggatgcattagctccacttgtctcacttgcaaattctacagttctagaatgccggccaattaaccaacctctttcagatactattaaccggtcaggtgctgtccttgctctagctgggcttttggaagctgcgaatggtgaagctgccgcaacatcagaagttgttgatgcgctggtgctattatcaaaactaccaaaggtgtcaagtgggcataccaaagctccatggacagttcttgcagaaaatccccacaccatacttcctcttgtgtcatgtgtagcggatgcagcaccttcattgcaagacaaggccatagaagttttatcgaggctctgttctgatcaacatgatattgtgggtggtttggtttcagaaatcccaggctgcatatcatcagttgcacggcgagtcattgggtccaacatgcttaaagttaaagttggtggatgttctcttcttgtttgtgcagcgaaagagcattgtcagaagcagatagagattctcagtgactcaagcttatacattcaactaatccattctctagtcagtatgattcatatgacaaacttgccttctgaaaatgggagtggtgaaaacatatcagacattaaaatttctagacactccaaagaaaataacaacagcgatgaaactgtgtgccgcactgctgtaatctcaggtaacatgattccgctatggctgcttgctgtttttgcacgccmtgacagcaaaacaagggctgaaattctagaagctggagcagtcgaaatgcttatggagaagatttctcaaaatgcattcctatatgtgattgaagtctcaaggattaatatagtccttgtgcacaatcatcacctgtgcatttacacacgtgaagaagatagcactgcatgggtctgtgccttacttcttgctttgctatttcaagaaagggagataaatcgatctaatgcagcattgcactcaattcctgtgctctcaaacttgttcaggtcagatgaacaagcatacagatacaggtactttgctgcacaagctttggcaagtctggtttgcaacggtagcagaggaactcttcttgctgttgctaattctggggcggccactggacttattccttggcttggatgtgctgaggttgatatagctgatctttkggaattatcagaggagttcatgtkggtccctaaccctgatcaatttacactggagagactttttagagttgatgatatcagggttggcgmaacttccagaaaatctattcctcatattcagtga

SEQ ID NO: 4374 - DNA, 585 bp, Oryza sativa
atggctgatccgcggctgttctcgtcgggatccggcacccgcgacgaccggacggacgcctccggcaggcggctgtacaacccctaccaggacctgaatatcccctacaagcagctctacgacctccccaacttcccggagttcctcttccaggaggagtcgctcgcccagcgccgctcctggggcgagaacctcacctactacaccggcataggctacctctcgggcgccgtcgccggcgccgccgtcggcctccgcgacgccgcgcgcaacgccgagcccggggacaccgccaagatccgggcgaaccgcgtcctcaactcgtgcggcagcaacggccgccgcatggggaacacgctcggggtcatcggcctgctctacgccgggatcgagagcggcatggtcgccgtccgcgaccgcgacgactggatcaacagcgtcaccgcggggctcggcaccggcgcgcttttccgcgccgccaacgggccgcgctccgccgccgtcgcgggcgccatcggtggggtcctcgccggcgccgccatggcaggcaagcaggcggcgaagagatatgtgcctgccctctga

SEQ ID NO: 4375 - DNA, 2934 bp, Oryza sativa
atgactcccctgctcctcctcctcctcgccctcgccgccggcgccggcgccgcctccttccccgccgacttcgccaacctcttcgccgccaaggccgcgctctccgacccgtcctccgcgctcgccgcgtgggaccctggcctgtccccgtccctctccccgtgccgatggccgcacctcctctgctccaacccgtcgtcctcctcctccgccgccatcgccgccgtgctcctctccaacctctccctcgccggcgagttcccggcgccgctgtgcgagctccggtcgctggcgctgctcgacctgtcgtacaatgacctcaccgggccgttgcccggctgcctcgccgcgatgccgtcgctgaggcaccttgatctcgccgggaatgggttctccggcgaggtcccgaggagctacggcgcggggttcccgtctctcttgacgctcagcctggccgggaacgagctgtccggcgagctcccggcgttcttggcgaacgtgagcgccctcgaggagctcctcctcgcgtacaaccagttcgcgccgtcgccgttgccggagacgttcaccggaatccggaggctacaggtgctgtggctggccgggtgcaacctcgtcggagatatcccgccgtcgatcgggagcctgaagagcctcgtcaacctcgacctctcgacgaacaacctcaccggcgagatcccgagcagcatcggagggttggagagcgtcgtccagctcgagctctactcgaaccagctcaccgggagcttgccggaggggatgtcggcgctcaagaagctgcggttcttcgacgccgccatgaaccagctctccggcgagataccggccgacctgttcctcgcaccgaggctggagagcctccacctgtaccagaacgagcttaccggacgcgtgccggcgacggtggccgacgcggcggcgctcaacgacctcaggctgttcaccaaccggctggtcggggagttgccgccggagttcgggaagaagagcccgcttgagttcttggacttgtcggacaaccgtatctccggcgagattccggcgacgctgtgcagcgccgggaagctggagcagcttctcatgctgaacaacgagctcgtcggcccgattccggcggagctggggcaatgccggacgctgacgcgggtgcggctgccgaacaaccggctctccggcgccgtgccgccggacatgtggggccttccgcacctgtacctgctggagctcgccgggaacgccctgtccggcgccgtcgcgcccgccattgccacggcgaggaacctgtcgcagctgctgatatctgacaaccgcttcgccggcgcgctgccgccggagctaggcagcttgccgaacctgttcgagctgtcggcttccaacaacgtgttctccgggccattgccggcgtcgttgaccgtggtcaccacgctcggccggcttgatttgaggaacaactcgctctccggcgagctgccgcgaggtgttcgacggtggcagaagctgacgcagctcgacctcgccgacaaccgcctcaccggaaacatccccgccgagctcggcgatctgccggtgctcaactcgctcgacctgtcgaacaacgagctcaccggcggcgtgccggtgcaactcgagaaccttaagctgagcctgctcaacctgtcgaacaaccggctcgccggcgtcctgcctcctctgttcgccggcgagatgtacaaggacagcttccttggcaatccggggctgtgcaccggcggttcgtgctcgagcggccgcagagcccgcgccggccgccgcggccttgtcgggagcgtcaccgtcgccgtcgccggcgtcatcctgctgctcggcgccgcgtggttcgcccacaggtacaggagtcaaaggaggtggagcacggaggacgccgccggcgagaagtcgaggtgggtggtcacgtcgttccacaaggcggagttcgacgaggaggacatcctgagctgcctcgacgacgaggacaacgtggtcggcacgggcgcagcgggcaaggtgtacaaggccgtcctcgggaacggcgcccgcggcggcgacgacggcgccgtcgtcgccgtcaagaagctctgggctaacggcggcgcggcgaagaaggcggcggccatggaagccggcggcggcggcggcggcggcggcaaggacacgttcgaggcggaggtggcgacgctggggaggatacggcacaagaacatcgtgaagctgtggtgcagcctcagcagcggcgaccggcggctgctcgtctacgagtacatgcccaacggcagcctcggcgacctcctccacggcggcaagggcggcctcctcgactggccggcgcggcaccgcatcatggtcgacgccgccgagggtctctcctacctccaccacgactgcgcaccgccgatcgtgcaccgcgacgtcaagtccaataacatcctcctcgacgccgacctccgcgccaaggtcgccgacttcggcgtcgccagggccgtctccgccgcgccgcmcaccgccgtgtccgccatcgccggctcctgcggctacattgcccccgagtactcgtacacgctgcgtatcacggagaagagcgacgtgtacagcttcggcgtggtgatgctggagctcctcaccggcaaggcgccggcggggccggagctcggggagaaggacctcgtcaggtgggtgtgcggctgcgtcgagcgcgacggcgtcgaccgcgtgctcgacgcgaggctcgccggcgcgccgcgcgacgagacgcggagggcgctcaacgtcgcgctgctctgcgcgtccagcctcccgatcaaccgcccgtcgatgaggtccgtcgtgaagctgctgctggagctccggccggagagcaaggagaaggccatggcggaggagaagcctctcctcgtttga

SEQ ID NO: 4376 - DNA, 4089 bp, Oryza sativa
atggcgaatgctggtttctcggttttgcaggtgggttccggggcctgcctggtggtggtctcggcgtacgacgcggaggccgacgaagtggcgcaagcggcggtcagctcgtgcctcaagctggcgcgcggcctccaacaccgcgcggtgaccaccaccgaggggctcgggagcagccggcgcggcctccaagcgctgcacgagcggctcgccggcttccargcctcgcagtgcgggttctgcacgcccggcgtgtgcatgtccctcgccggcgcgctcgcggccgccgaggggaacgggaagaaggccgcctccgccgcggaggggttctcgaggctcacggcggccgaggcggagcgcgcggtggccgggaacctgtgccgctgcacggggtaccgaccgatcgccgacgcgtgcaagagcttcgccgccgacgtggacttggaggatttggggctcaactgcttctggaacaagggcgatgccactgccagtgtctccaagttgccgccttacaaggagaggagcatcgccgcgttcccggagttcttgaaggatgaaatcagatcttcattggggattgatcattccatttcgtcagcatctatggtggggagtgtgagctcttggtatcaacctaaaaatgtggaggagtattataagctgataggttctttgtcatcatcatctgataaaagtagaacaaaggtggttgtgggcaacacttcttctggtgtttacagggatgcagagctgtatgataggtacatagacttgagagccattccagaactgaattcggttagcaaggatgtcaagggtgttggcattggggctgcaatgtccatttctcaggtaatcgagattttacgaggagaaggcaacagctacaaggacgtggtgttttgcaagattgctgatcacatggagaaagtggcttctcagtttgtccggaacatggcgagcttgggtggaaatctgataatggctcagagggatgagtttgcctctgacattgcaacggttctgcttgctgctggttcatcactgtgcatccaggtatcatcagaaaggatgaatgtcacactggagcgattcctggacatggccccttgtgattgcaagacgttgctattaagaatttacattcctcactgcactccaagtggcatctcatcaagttctgaatctgtaaataagacaggagataaacctgcaagttccgtgctatttgagacataccgagcttccccacggcctattggaaatgctgtttcataccttaattctgcattcctggctaaattatcttcagatgaaacttcaggaaactgtatattggagaagctatgtttggcttttggtgcatatggaacacaacatgctgtcagggctacaaatgttgagagtctcttagtgggtaaacccatcactgcatcactcttactagaagcgtgcacggttctcaagaaaacaattgttccaggggaaggaactttcaagcctgtagaggcggtccacctgaacggccatataatttctgataacaatggaaatatgaatcgtggacccgacacacatgttgatgtttcacctaaggagatcaataatgtgaaatctgatttacatggtaatgatcgcatacttgaatcatccaaacaggtcatcgagatcagtgaagactatctcccggttggcttaccagccaagaaagttggagcagaactacaagcctctggtgaggctatatatgtggatgacatcccttccccaaaagactgcctgcatggagcatttgtatatagcacaaaacctttagctcatgtgaagagcatagaactgaacccttctctcgagcagctaaaaactgtggcgattgttactgccaaggatattcctaaaggaggcagcaatgttggggccaacactatatttggacctgaacctctgtttggtgatccactcactcagtgggctggggaaccacttggtcataagttttcactgtatgaattaacattgaattgtgactttactgaaggtgcagagacacaaaaaactgccaatatagctgccagtcgagcattggtcgactacagcatggaaaatttagatgctccaattttatcaattgaggaggctgtgagaagtagtagttattttgaaatcctaccatttcttcttccccaaaagattggtgatttctcaaaaggaatggaagaagctgaccagaaaatatattcaactgaggtgaaccttcactcgcagtattacttttacatggaaacacaaactgcgctagccatacctgaggaggataactgtatggtcgtgtatagctcaagccagtgcccggaggtagcacaagaaaccattgcaaaatgcctgggtttaccttgtcataatgtccgtgttattactagaagagttggtggtggctttggaggcaaagctgtcagatcgttaccagtggcaacagcttgtgcactttcagcatttaagttgcagcgtcctgtccgaatatatcttgatcgcaagactgacatgataatgactgggggccggcatcccatgaaaatacgctattctgtaggcttcaaatccgatgggaacatcacagcgctacatatagaattgttggtaaatgccggaataacccaggatgttagtccagtgattcctcacaatttcatagaggctctgaagaaatataattggggtgccttctcctatgatgcaagaatctgcaaaacaaacattgcaaccagatccgcaatgcggggtcctggagaagtgcagggttcttatgttgctgaagctattattgagcatgttgctgctgtgctctctactgatgttaatttggtcaggcagagaaatcttcacacagtggagagcctcagtttgtatcatagtgaatgcatggaagatgccttggggtatacacttccctctatctgcaatcagttgattacatcagcaaattaccagcaccaacttgaaatgattcggtccttcaacaaaagcaacagatggaaaaagcgggggctttctgtcgtgccgatagtgcataaattcgcatctcggccaacgcctggtaaagtgtctattcttaatgatggatccgttgctgttgaagttggaggcattgaacttggccaagggctttggacaaaagtgaagcagatggcagcgttcggtcttggacagctttggactgatagaaggcaagaactgttggagagagtgagaattattcaagcagatacactaagtgtgatacagggagggtggaccacagggagtacaacatcagaatctagctgcgaggcagttcatcgtgcctgcaatatcttggtcgacaggctgaaaccactcaaggagcaattgcaagaaaaacaaggaacagtttcatgggatgagcttatttcacaggcaaaaatggtaggtgtggacttatcagctaaagaactctacgttcccggggcttctggttcctatctaaactatggggcagctgctagtgaggtagagattgatcttctgacaggagcgaccacaattttgcgtagtgatcttatatatgattgtggacggagtttaaatcctgctgttgacttggggcaggttgaaggggcttttgtccagggaattggttatttcatgaacgaggagtacgtgacgaactcagatgggctgcttgtctcagacgggacttggacatacaagattcctacggtggacaccatcccaaaacagttcaacgttaagctactcaacagtggattccacaagaaacgtgtgctctcttcaaaagttaatagtcacccttttgttctcccaactttctgtgtcactaacgcttcctggttgcagcttctggggagccacctttgctacttgctgcctcggtgcattgtgcaacaagggaagccatttggagcagcaagggaggagtatcactgttccaggtctggatcttcacctcccttctttgatcttgaagttcctgccatcatgcccacggtgaaggagctatgcggcttagacaacgtggagaagtatttggagagtatctgctcgaaataa

SEQ ID NO: 4377 - DNA, 1683 bp, Oryza sativa
atggagacgtccaccataagcttctcctcctcgtcgccgccgtcccctccgccgccgcagccggctccgggcgacatcgacgccgtcagcctcggccgcctcagcaggaacctcgagaacctcctcgaccccgcctttctcaactgcgccgacgccgagatcgtcctcgcctccggaggcggcgaccccggcggcggcgccgtcgtgggcgtccaccgctgcatcctcgccgccaggagccgctttttttacgaccaattttccttcggccccggccccgggccccggcaaccgccggcgacaagccgcagctggacctcgacgggctggtccccggcgggcgccamatcggccgagacgccctcgtcgccgttctcagctacctgtacaccggccgcctcagacaaaaataggactcctctaagtcctaactatggggttcttatgtcgcagcgccgattatctgattttgtgaacaaagctttggctgaggacatactgccaattcttgtggttgcctccacctgccatcttccagagctgctaaatcaatgtatccagagggttgccaactcgaacctggacaatcgttacctcgagaagcggcttccggatgatctgtacgccaagctgaaggagtttcgcgtgcctgatgaaccacacagtggcattcttgaccctgagcatgagaagagggtcagaaacatccacaaggccttggattccgatgatgtcgatcttgttggcatgcttctgaaggagtccccggtcaccttggatgatgcattcgccatacactacgctgcggcctactgtgagccaaaagtgttagcagaattgctgaaactggaatctgcaaatgtgaacctgaagaactcaagtggatacacgccgctccacatggcttgcatgaggcgagaaccggatatcattgtttcgcttatagaaaagggggcctctgttctggaaaggacacaggatggacgtgatgctcttaccatctgcaagagattaacaagggagaaagaccgcaacgagaaatcagaaaaatgcaaggagagaagcaaggcttacttgtgcattggcgtcttacagcaagaaataaagaggagaccacaaattttggaggaccagatgtctgcagaggagtcaattgctacacctctgctggttgataattttcacatgaggctactaaacttggagaatagagttgcctttgcaagaatatttttcccttcggaagccaaacttgtgatgcgcatagcacaagctgactcaactcaagagtttgctggtctcacatctgctaatttcagtaaacttaaggaggttgacctaaatgagacccccacaatgcaaaacaggaggttgcgagaacgccttgatgctttgacaaaaacagttgaactcggacgacgatacttcccacattgttcagaagttctcgacaagttcctgaatgaagaatccaccgatttgatcttgcttgaaagtggcacagcagaggaccagcaaaccaagaggatgcgcttttctgaactcagagaggatgtacggaaggcctttaccaaagataaggcagccggcgctgcaatatcttcctcaacatctgcgtcttcatcaccaaggtatgagacaaagttaagacctggcaacaagaaagggaagctatcacggtaa

SEQ ID NO: 4378 - DNA, 759 bp, Oryza sativa
atggcggccgccgcgctgaccagccagctcaacgccctcgtcaacaacatgttcgccatgggtttgctggacgaccagttccagcagctgcagatgctgcaggactccaccgcgccggacttcgtctccgaggtcgtcacgctcttctgcgacgacggcgagcggatcatctgcgagctctccaggcagctrgagaagccaaatgtggattttgacagggtgsactcgtatgtgcatcagctcaaggggagcagcgcaagtgttggtgctcagaaagtgaagaacacttgcattcagttccgtgagttttgccaacagaggagcagagatgggtgcctcaagactttggatttggtgaggactgaattctatgatcttcgtaacaagtttcaggctatgcttcaggtcaagttgaattatttttggattgacatgcaccagaacagtcaagaacacatctacaatccagcctttccatcatctgggtcccgatattccacactgaaggttgaacagctatatgttgatttgccattatttgttggtcggtggttaagatttgatcatttcgttgcaactacatacatacagcattgcaaattgcagcagcagcaggaggaggcaagactgcagtgctcatgtgaatgtggtcctctggcggcattcatggtttcatcttattgcaaaacagtgattttcctgaccaatcagaaattcacaaccaatagaaagaagatacacacaaacaacatattttag

SEQ ID NO: 4379 - DNA, 1383 bp, Oryza sativa
atgggcgtctccgccctgctgctcctcctcctcgccgcggccgccaccgccgcgccgccggagcagcccgcattgtccgctactccctcctccgccgccgccgccaacaacagcagcggtggtggtggtggtgcggcgagcaacggggtgaactcgaactcggtgctggtggcgctgctggactcgcactacacggagctggccgagctggtggagaaggcgctgctgctgcagacgctggaggacgccgtcgggaaggggaacgtcaccatcttcgcgccgcggaacgaggcgctcgagcgcgacctcgacccggagtttcgccgcttcctcctcgagccccgcaacctccgctcgctgcagcggctcctcctcttccacgtcctccccgcccgcctccacgcctccgactcctcctcccccgacttcccctcctcccaccccaccctctccggcgagcgcgtcgacctctccgcctcgccgatgcgggtcggcgccgcggcggtcacgcggcccgacgcggtggtgcgccccgacggcgtcatccacgggatcgagcggctgctggtcccgcgctccgtgcaggaggatttcaaccgccgccgcagcctcgccgcgatctcggcggtgctcccgacgggggcgcccgaggtggatccgaggacgcaccgcctcaagaagcccgcgccgcccgtcccccccggcgcgccgccggtgctgccgatctgggacgcgatggcgccgggcccatccatcgcgccggcccccgcgccggggcccgggtccgggaaacaccacttcgacgggcacagccaggtgaaggacttcatccagacgctcctcctctacggcggctacaacgagctcgccgacatcctcgtcaacctcacctcgctcgccaccgagatgggccgcctcgtctccgaggggtacgtgctcaccgtgctggcgcccaacgacgaggccatggcgcggctcaccaccgaccagctcagcgagccggggtcgccggagaacatcctctactaccacatgatcccggagtaccagacggaggagagcatgtacaacgcggtgcgccgcttcgggaaggtgaggtacgacacgctgcggctgcccaacaaggtgacggcgagggaggccgacgggtcggtcaagttcggccatggcgagggctccgcctacctgttcgacccggacatctacaccgacgggaggatctccgtgcagggcatcgacgccgtgctcttccctcccaaggacaccgccaccggcggcgaaggctcaggctccggctcgtcgggcgccgctcccgccaggaaggcccccgccgtcaccgcccactccaagtccaagctccgacgagtacacttgagagggtaa

SEQ ID NO: 4380 - DNA, 2988 bp, Oryza sativa
atggctaataagatgaaaaagatgagagatcaactgagaaagatcaaagagggtcatgaggcttttagactcacacctgactccacaccatataatgagcatcaccgtcctgatccacgagaaacaacatcgaaggtgattcaatcgtccatcattgggagagacaaagaaagaaaacaagttgtgtctttgctatcagcaagtgacgaggaagacacagtaattttgccaatctatgggtttggaggcattgggaaaacagctttagcccaactggttttcaatgatacccagttcagaggttatgaccacagggtatgggtctatgtgtcccaggtatttgacttgaaaaaaatagggaacaccattatttctcaagtgtcaaatgaaggaaataagaatgaatataccagggagaatataaacggacgcctttgtgatctattagaggataagaatactctgattgttttggatgatctatgggaaacaaatgattttcatttaaatgagttgaatcttatgctaaatacaaaaggcaaaataaaagtcttggtgacaacacgcaatgaagacgttgcaaagaaaatttgcacacataaaccatataggctaaatcccctggactctaccatgtgttggaatataattaagcaacgcagtaatttagaagctagaggtgataaagaccaaatcgagcaagtcggatgggtcattgccaagaaatgtggaggcatagcattagcagcccatgcacttggtttcttgctatctggaatggaccttgtggaatggagagcactgagcaatagtgatatttggactgaagctttttctgataattcagtgttgccatccttgaaactaacttacaagaatatgccaccatatttgagattatgctttgcctactgcgccatcttccctaaaggtcacaatatagctaaagcaagtctggttcaccaatggattgctcttggttttattgagccatctaaaacattttcatccgtacgacttggcgagaagtatatcagacaacttgttgggatgtctttccttcagcgttccatattgcacactgaacaagaagttttcaccatgcacgatatggttcatgatgttgcgagatcggtcatggatgaagagttggttttctttaatgacacaaaaattagcagtaccacagaacaaaaattttgccactatgctttgcttgaaaattatagcaagtcatcaaatctatcaactatattgcctgccacgttaagggcagtacatacttcgaattgcagcaaattggtgctccaaggtgatgaattttcattcacaaagttcttgcgtgttctagatttaactgactgctccataaggatcctcccaagctctattggcaaattgaagcagctgaggtttcttatcgctccaaacataggagataatgtgttcccaaagagtattactctgctcccaaaactaaaataccttgacctccatggatcttttcgaatttcagcattgcaaggatcaattagcaaacatgcttgtctgatacatcttgacctatctggttgctctaatatcagagttatacagccagaagctctatgtggcctcaccaaactgcagtttttgaacttatcgtggtgctccattcttcaaatactgccagaaaatattgcaagtcttactgaactgcaatatttaaacttatcaaactgcttccttctcagccaattaccatctcatattgggagcctcactgaactacaatatttgaacttatcaggttgtcagggccttgtaaaattgccaatgtcgtttcggaatctgaagaatttggtacatcttgacctgtcaggctgctccagggtacaagatttcaaacaagtctttggtgggctcaccaaactgcagtacttaaacttatcaaagatatttggtagaaccagagtgggtgataattgggatggttatcctgaaactatcagtactcttaatgatcttgagtatctaaacctttctcggaatagcaggattgattatctaccaagaagccttggaaacctcaaaaagcttcaaacattggacctttcatactgtcggtctctgagatccctcccacacagcatagaattaattgacagtctggagtttctaatagttgtggggtgctcagatcaacttaaggagtatttgagaaaatctcaattcaagaatattccaatatcattaccacacttcattgttcactctatttctggtgattcccgcagcaaccttcatatgcttgaagatataaatcctgtcagacttgaaataagctgtcttgaaaatgtgaagtccatagaagaagcacgaggaattgagttgtcagagaaacaaaatctttcaacattgacatttcattggacttcaagggctgaccgacttttggaggacaaggatgttttgggagaactaatgccaccaagaggtctgtggaatttaagcatacaagggtatgatagcacaaccttcccaacttggtttgtaggcatctcacatcatcttccaagtcttgttaagattgagttgaaggatttgcacagatgcagacacctgccaccactgggacagttgccaaacctgaatgaagtgcatctccaacagatggacagtctcacaaaaattgatggcggtttctgcggtggcgacaaaggcgcattccgcaaactgaaagtcttcaccttgagggatatgaaacagttggaagagtggagcaccacaacacacagtaaaggtggtgaggatagcatagagttcatgttccctatgctagttacactgtcaatagagctttgtccaatgcttagactgaaactatgcccaccgatgtttcacagctggctcatatcagagagcgacaaggctgtcgacacgggtttaacggaggctctgatgaagattttcgctgaagatttcatgcctaccgactcttcagagtaa

SEQ ID NO: 4381 - DNA, 543 bp, Oryza sativa
atgagcgcggcggaggagagaggagatcggcaggagcgggacgatggggaaggtggagaggaggagcggcgggagcgaggcggggtgggcgggctggtggacagggccaaggggttcgtggcggagaagatcgcgaaaatccccaagcccgacgcgacgctggaccgcgtctccttcaagggcgtcagccgcgagtgcatcacgctccacagccacctcgacgtcaacaacccctactcgcaccgcatccccatctgcgagctcacctacaccttcaagagcggcgacaaggtgatagcgtccggcacgatgcctgacccagggtggatcgcggcgagcgggacgacaaatctggagctgccggtgaaggtgccgtacgacttcatcgtgtcgctgatcaaggacgtgagcggggactgggacatcgactacgtgctggaggtcgggatcaccatcgacctccccgtcgtcggcagcttcaccatcccgctcgccaccgagggtgagatgaagctccccaccttccgggacctcctcttctga

SEQ ID NO: 4382 - DNA, 1188 bp, Oryza sativa
atggggaattgcatggacaccacggcgcgggtggatcacagcatgaacaatggcgcctctgtaaagctgatattggttgcttgggatgttgggttgtttgtcctactagatcgtggatttattgacagaagtgagcttcctactcctcggacggaaggtgaaattttgtcatcttcaaatttgaaggccttctcgttcaatgatctaaggaatgcgacaaagaacttccgaccggacagtcttcttggtgaaggaggatttggacatgtctacaaaggttggattgatgaacacacgcttgctccttcaaaaccaggaagtggtatggttgttgccgtcaagaagcttaaaccagaaggtttccaaggacacaaggaatggctgacagaggttaactaccttggccaacttcaccacaaaaatcttgttaagctgattggctattgctctgatggcgacaaccggacttctggaggtgctgatcctttgtcatgggcaataaggctcaaggtagctataggtgctgctaggggcttgtcgtttttgcatgacgctgagaaccaagttatatatcgtgatttcaaggcatcaaacattctccttgactcggaatttaattccaagctctcagattttggtttagcaaaagcaggtcctactggggataagacccatgtttccacacaggtcatgggtactcacggatatgcagctccggagtacattgcgacaggtcgcctctctgcaaaggcagatgtctacagctttggtgtggtgttgcttgagttgctcacaggaagacgggccctggacaaatcgaaaccaggcatagagcagaacctagttgactgggccaaaccccacttgggcgacaagcgtaggctgtaccgtgtcatggatacaaagctgggaggccaatatccgaagaaaggcgcccacgccattgcgaacatcgccttgcaatgcatctgcaatgatgccaagatgcgcccgcggatgtctgaggtcttggaagagctggagcagctgcaggactccaaatataatatggcttcaccacaggttgacatccggagaacctcaaacgccgtccctaagtcgccgatgagaatccagccatcgccacggcgctcacttggagcagcagcatccccattgccaggatataggactgccaaagtgcactag

SEQ ID NO: 4383 - DNA, 2568 bp, Oryza sativa
atggattggtcatcatctgctttcacctgcatcgccgccttcctcctcttgtcgccggcgttgtgcgccgccgacgaccggattgtctccggcaagccactctcccccggcgccgctgtcatctccgatggcggcgacttcgccttgggcttcttcgccccatctaactcaactccggcgaagctgcacctcggcatatggtacaacaacatcccacggcgcaccgtggtttgggtcgccaaccgggcaactccgatcatcgttaacggcagctctaactcctcgttgccttctcttgccatgaccaacacatctgaccttgtcttgtccgatgccagcggacagattgtttggaccacgaacctcaccgccgtagcgagctcctcctcgttgtcgccgtcaccgtcgacggccgtgctcatgaacacgggcaacctcgtcgttcggtcgcagaacggcaccgtgctgtggcagagctttagccagccgacggacacgctgctccccggcatgaaagtgaggctcagctaccggacgctcgccggcgaccggctggtttcatggaagagccccgaggacccctcgccgggcagcttctcctacggcggcgactcagacacgttcgtccagttcttcatatggaacggttcgcgcccggcgtggcgcgccggcgtctggacggggtacatggtgacgtcgagccagttccaggccaacgccagaacggcggtctacctggcactggtcgacaccgacaacgacctatccattgtgttcaccgtagccgacggcgccccgcccacgcatttcctgttgagcgactccggcaagctacagctccttggctggaacaaggaagcatccgaatggatgatgctcgccacatggccggccatggattgcttcacgtatgagcactgcggcccgggcggctcctgcgacgccacgggcgccgtcccgacgtgcaagtgcctggacgggttcgagccagtgagcgcggaggagtggaacagcggcctgttctcccgtggctgccgacgaaaggaggcgctgcgatgcggcggcgacgggcacttcgtggcgctgccgggcatgaaggtgcctgacaggttcgtgcacgtcgggaacaggagcctcgacgagtgcgcggcggagtgcggcggcgactgcaactgcgtggcgtacgcttacgcgaccctgaacagcagcgctaagtcaaggggtgacgtgacgaggtgcttggtttgggccggcgacggcgagctcgtcgacacgggcaggttgggtcccgggcaggtctggggcaccgtcggtgccggcggcgacagccgtgaaacactctaccttagagtggcaggcatgccaaattcaggtaaaaggaaacagagaaatgcagtgaaaattgcagtgccagtgttagtgattgtcacctgcatttccctttcatggttctgcatcttcagaggtaagaaaaggagcgtgaaagaacacaagaaatcacaagttcagggagtactgacagctactgcccttgaacttgaagaagcaagcacaacccatgaccatgaatttccatttgtaaaatttgatgatattgtggctgcaacaaacaacttctccaaatcattcatggttggacagggcggttttggtaaagtttataaggggatgttacaaggttgtcaagaggttgctgtgaaaaggctaagtagagactctgatcaaggaatagtggagtttagaaatgaagtcactctgattgctaaactacaacaccgaaatttggttcgacttctcggttgctgcgttgagggacatgagaaattgttaatttacgagtacttgccaaataaaagcttggatgtcgccattttcaagagtgaaagaggtgtaacactagactggccagcaaggttcagaataatcaaaggtgttgctaggggccttgtttatctacatcatgattcaaggttgacgattattcatagagatctcaaaactagtaatgctttgctggactcggagatgaggcccaaaatagcagactttggtatggcacgcatatttggtgacaaccaacagaatgccaatactagaagagttgttggaacatatggctacatggctcctgaatatgcaatggagggaatgttttctgtcaagactgacatctatagcttcggtgtcttactcttggaggttatcagtggtgtgaaaataagcaatattgatcgcattatggactttcctaaccttatagtctatgcatggagcctttggatggaarggagggcaaaggagctggtagacctgaatatcaccgagagctgcactctggatgaggccttgctttgcattcatgtagggctcttgtgtgttcaggaaaatcctgatgacaggccactcatgtcttctgttgtgtccatcttggagaatggaagcaccacactgccaaccccaaatcaccctgcatattttgctccaaggaaaaatggggcagatcagagaagagacaatgtcttcaactctgggaatgagatgactcttacagttctggaggggagatag

SEQ ID NO: 4384 - DNA, 6192 bp, Oryza sativa
atggcgagggcggcggcgaactgggagcgcctggtgcgggcggcgctgcggggagagcggttggcaggcgccttcggggtgcccgtcaccggcatcgccgggaatgtgccgtcgtctctcggaaacaacgtccacatcgacgaggtgcttcgcgccgccgacgagatccaggatgaggaccctaccgtcgccaggattctatgtgagcatgcatacacactagcccaaaatctggatccaaatagcgaagggagaggtgtactgcagttcaaaacaggtttaatgtcagttatcaggcaaaagctagcaaaaagggaaggtggtgctatagatcgaagtcaggatgttgctaaactgcaggaattttataagctatacagagaaaagcataaagttgatgaattgtgtgaagatgaaatgaagttgagagaatctgctgtgttcagcggtaaccttggagagttggaacgcaaaactctgaagcgcaagaaagtccttgctactttgaaggtcttatggtcagttatagaggaaataacaagggaaatttcacctgaggatgcagaaaagttgatatctgaagagatgaaaagagtcatgcaaaaagatgcagaaagaacagaggatgttgtggcttataatattattcctctagatgctttgtctacaactaatgacattgtgaattttccagaggtaagggcagctatatcagctttgcagtaccatagggaacttccaaggctccctgccaccttctctgtccctgatgctaggaattccgatatgctggatctcttgcactgtgtatttggttttcagtttgttttaattgtaaatatgctgttcaatatgattgaggaagtgcagaaagacaatgtgactaatcaacgggagcatgttgttcacctgttggcaaatgaacagtcccgactggggaaactaccagggaatgaaccgctagcaagagaactggaggagattatacggagacagactgcagagcctgctgaaagctgcatttcaaatggtggcgtatcatttcttgaccaagtcatttctcctatgtatgaaatcatcgcagctgaagcagccaacaatgacaatgggcgagcgccacattctgcgtggagaaactatgatgatttcaatgagttcttctggttgggattaatgatcattgcttttaaggatcgtaaatttgacaaaaaaacagtattgacactcctcagcctgggtccaacctatgtcatcatgaaatttattgagaataaccataatgctctaactattctttctttatgggctccagtggtatcaatttaccttttggatatccatgtattttacaccgtgatgtctgctatatgtgggtttctccttggtgcacgcgatcgcctgggagagattaggtctgttgaagcagttcacagattctttgagaagttccctgaagcattcatggataaactccatgttgcctgtaccgaaaagcatccagaattaaacaagtttgatgcatctaaatttgctcccttttggaacgaaattgtgaggaatatgagggaagaggattatattaataacactgaactggatttactcttgatgcctaagaataatggatctcttccaattgtgcagtggcctctctttttgcttgctagcaaggttttcttagccaaagatattgcaattgattgtaaagactcacaagaggaactatggctaaggatatcaaaggatgaatacatgcaatatgctgttgtagagtgctatcacagcatttattatattctgacatctatactagataaagaaggacgtctctgggtggagaggatttatgttggtatccgagaaagcatttccaagaggaacattcagagtgatcttcatttcagcagattgcccaatgtcattgccaagttagttgctgtagcaggaattttgaaagaaaccgagtctgctgatctgaggaaaggggcaattaatgctattcaagatctatatgaagttgttcatcatgaagtgctgtctgttgatatgagtggcaatattgatgaatgggaacagattaagcaagcaagagctgaaggccgtctcttcaataatctcaagtggccaactgactctggattgaaggacttgatcaaacgattgtactctcttctgaccatcaaggagtcagctgcaaatgttcctaaaaacctggaagctagacggagattggagttctttacaaactctctgttcatgcaaatgcctgttgcaagacctgtttcagaaatgctttctttcagcgtatttactccatactactccgagactgttctttatagtaaagatgaactccagaagagaaatgaagatggtataagtacactattttatctacagaagatttatccagatgaatggaagaacttccttgctcgcattaacagggatgaaaacacaactgactccgaactttttagtagccctaatgacatgatggaactacgtctgtgggcttcttaccgtggacagaccttagcacgaactgttcgtgggatgatgtactataggaaagcccttatgctgcaaagttatttggagaagttgcaatctgaagatattgaatctgcagttgctacaactggtcttggtctggctgatatacattttgagctgtctcctgaggcacgtgctcaggctgatttgaaatttacatatgtggttacttgccaaatatatggggtacagaaggcagagaggaaaccagaagctgcagacatagctctactaatgcaaagaaatgaagcactcagagttgcttacgttgatattgttgagagcgttaagaatggaaagcctagcaccgagtattactcaaagcttgttaaagctgacattcatggaaaggacaaggaaatttattccattaaattgcctggcaattttaagctgggtgaggggaagccagaaaaccaaaatcatgccataatattcacccgtggaaatgcagtgcaaaccattgatatgaatcaggataactattttgaggaggcactcaaaatgagaaacctgcttgaggaattctatcagaatcatggcaagcacaagccttcaattcttggtgttagagaacacgtgttcacgggaagtgtttcttcgctggcctcgtttatgtccaatcaggaaactagttttgtcacattgggacagcgtgttctggccaatccactgaaagtaagaatgcattatggccatccagatgtttttgatagaatttttcatataacgaggggtggaataagtaaggcctcccgtgtcatcaatatcagtgaggatatttatgcagggttcaactcaactctgcgcttagggaacataactcatcatgaatatattcaggttggaaagggaagagacgttggtcttaatcagattgcactgttcgaaggaaaagttgctggaggaaatggtgagcaagtgctcagccgggatatatacagacttggacagctttttgactttttcaggatgttgtccttctatgtgacaactattgggttctacttctgcaccatgctaactgtttggaccgtgtacatatttctctatgggaaaacctatctggctttgtctggagttggagaatcaattcagaatagggtggatatattgcagaacacagccttgaatgcagctctgaacacacagtttcttttccagattggtgtatttactgctattcctatgattctgggtttcatcctggaatttggtgtcttgacggcttttgtcagcttcatcacgatgcagttccaactttgctctgtattttttactttctccctgggtacaaggacccactattttggccgcacaatactacatggtggtgcaaagtatagagcaaccggtaggggttttgtggtacgacatatcaaatttgctgaaaactacgtctttatccaggagccmttttgtgaaaggtctgtgatgattgcttttgtttttcacaggttggaggttgctcttttgttagtgatctttttagcgtatggttttaacaatggtggagcagttggctacattttgctttccataagtagcyggtttatggcagtttcttggctttttgctccatacatattcaatccatctggatttgaatggcagaagattaaaatacctctctcagggtcgttgaggatttcagagactggacgaattggctgttttaccgaggtggtaattggggttaagggagaagaaagttgggaagcctggtgggatgaagaactggcacatattcacaatgttggtgggaggatactggaaactgtactgggtttaagatttttcatcttccagtatggagttgtttaccatatggatgcaagcgaatcaagtaaagcactattgatatattggatatcatgggctgtgcttggtggcctttttgtcctcttactggtattcggtttgaatcccaaggcgatggtgcatttccagttgttcctccgacttatcaaaagcattgcgctactgatggttttggcgggcttggttgtggcagttgtgtttacaagccttagtgtcaaagatgtgtttgctgccatcttagcatttgtgccaactggctggggagttctttcgatcgctgtggcgtggaaacctattgtgaagaaactaggtctatggaaaacagtgcgctctctagctcgcctgtacgatgctggcacaggaatgatcatttttgtcccgatagccatcttttcctggtttcctttcatatccaccttccagacccgacttctatttaaccaggctttcagcagaggtttggagatctctctcattcttgctggcaacaatccaaatgcgggaagctgcgttcgtgtccactctccactctccttctctatgttccgcctcccgccgctccaccgcgccgccgccgtcttcctccgcctccgcctcgcctctccccgcgcaaccttctcctccaaacccgccaatccccgcaccagcagcgttgcctccgccgccggccccggcgccgccgcggtctcagatgcgatcgttcgcctcgtcgcggccggcggcaggagcctcgaggccgaccttgaccgcctygamcccgccctttcccamcccatcgtgtcggcaccctccgcgcgctyaccgaccgcggcctccccgcggcccgcttcttcgactggctcgcgctccgcaggggcttctccccgagcgcccaaggccaacaacctgctcgtcgagaatgccggcagcctcgcggactatcgggccatgtcccgcgccatggagagcatgtctacgcggcgggttcccctgaccgaacgggcgttcgccttcttgaacacgtcccagggcagcgccagggatacggcgatagcgattctagcgacgctggatgaagtcgggggcccttgccgtgcgtccggcgtgttctcgctcgtcaaggcgctagcttcgatcggtgagttcgacgcggcgatgtctgtgatccaggagacggcgaggggggcacgttactacaacgccctcatcgccgtgaagtgcaaaactggggacttccatggcgcccgcgaggtgttcgacgaaatgaggaggtcgggcttcggcccgaattctaactcctggaactacctcctcgggtgcctgctgaagaacggcagggttgcagaagcttgtgagcttgttgaggccatggagaggtctgaacacaacgacatcccgaactcgctgacctacgagattctagcataccatgcgtgcaaagcggggaggatggattcagccatgcggattcttgatcagatgttcttggagaaattgacaccgaggattacgattcacacagccttcatcaaggggtacttatacgctggaagaatagatgatgcttgcagatatgtcagtgctatgagcaccagggacaggcgctcagtgaacaggaactacagcctgctagccaagctactgtgtaaggcagggatgatcgttgatgcaggaagaattctgtatgaattgatggagaaggaggcactcttgcctgaccattctgcttacattagagtgatcaaagatttgcacaagattggcaagggagatctggctgctgaattgaacttgattttgcagaagctcagtgtacatgcagaatcagcgggatga

SEQ ID NO: 4385 - DNA, 1953 bp, Oryza sativa
atggcgcccgtgagtttgcctccaggtttcaggttccaccccaccgatgaagaactaatcatctactaccttaagcggaagatcaacggaagacagatagaactcgaaatcattccagaggttgatctttacaagtgtgagccttgggatctgcctgaaaaatcctttcttccgagtaaagatctcgaatggtacttcttcagccctagagaccgcaagtacccaaatggatcaaggacgaaccgtgcaacaaaagccggatactggaaggcaactgggaaagatcgaaaagtgaactcacagaggcgtgcagttggtatgaagaagactcttgtgtactaccgtggtcgagctccacatggttctcgcaccgattgggtcatgcacgagtaccgcctcgatgagagggaatgcgagactgacactggcttacaggatgcatatgctttatgccgggtgttcaagaagacagcgcccgggccaaagatcatagagcattatggtgtggtgcaccaccatgtcgagcaacctcaatggatgacgagcagtatcgatcgctccccaacgttggacgtgtcgtgtgatggaagaggtgatgactttgagagcagcagcttctctttcccaacagagacgccaatggactccatgcacggtgggtttggaatgcagatgagtgcacctcacgaggatggcaaatggatgcagtttctgagtgaagatgccttcaacgccaccaatccattcttgacgaacccagtttctgccaacttctcatgccttccatccaaggtggatgttgcactggaatgtgcgaggctgcagcacaggctcaccttgcctcccttggaggtggaggatttcccacaggacgtcagccttgacacgaagattggcatacttcgcagtaaccccaacgaagttgacattctccaagaattcctgtcagttgcgactgcctctcaggagctaattaatggctccaccagtagctaccctgaaatgtggttaggagctagcacaagcagtgctagctacgtcaatgaactgtcctctctagttgagatgggcggcgttggcacttctaaccaccacgaatccgcaaggctacaggtcgagatcgctgacatggaggtgttcaaggacgagaagaagcgggtggagaaccttagaggagtcaagttggtgaacaatgaccttggggagattgttgtagaaggagatgaaagcaatccaacagaagacatcatcgcgcagtaccctataaaagtcactgcagataattcaggagaagccggtcatcgcatgaccgatcccactgacgtaggcggcatcgacactgccccgatcttctcgcaatctcaacctgacgactttgctgctggtttcgacgacgtcaaccctaatgcatctttcgatctgtacgagaaggttgacgtcaaccacaggctattcgtttcaagggtcgctgcggcgaagacattcttccaccgcattgagccatcgaagaaggtcagcttccactcgaacccggcagcaaccgccgtcagtaaggcgaccgagaagttccatttccccgttacgaccaaagttagtggtagggtttccatttttagcaagttcaaggcactcataagggacaagttcttgatgatgaggccatcacattcataccaaaggttgggcagcaaagaaaccacagtgaatgagctgctgcagattgtgtcactccttttagcaccgaagcaaatcaatggctgccctactgagcaagagctggtcaagaagaaggcgaaagaagtgatgaagccgggatggggtcgtgaagggagcaacaaattgtggcttccgctctccaaagggaagggcatttccagcatgtttttgagtgggaaatggacgtttctaacctccgcgttggccatcagcactccagctgagtgcgatcactaa

SEQ ID NO: 4386 - DNA, 1970 bp, Oryza sativa
atggcagcggggagtaccatcagtactagtcgccgcactcaccaccttgtgactctgctgctcctcgttgccgccagcaccaactacgccgccggagccacgctgaacatcaccaaccgatgctccttcaccgtgtggccggccgccgtgccggtgggtggcggcatgcggctcgacccaggcgagtcgtgggcgctcgacgtgcccgccaacagcggcgcagggcgtgtgtgggcgcgcacaggctgctcattcgatgccaatggcaacggatcgtgccagacgggagactgcggcggcgtgctcaagtgcaagaacagcggcaagccacctcagacgctcgctgagttcacggtggaccagaccagcgtacaggatttcttcgacatctccctcaccgacggcttcaacgtgcccatggacttcctccccgtgccggctccggagcagaggcacggagcaccaccgtgcagcaaggggccacgctgcccggccaacatcacgtcgcagtgccccagcgagctcaaggcgcctggaggctgcaacagcgcctgcaatgtgttcaagcaagacaaatactgctgcactggcaccactggcaccaaaacctgcgaacccaccaccttctcactgccattcgtcaggatgtgccctgacgcatatagctacagtttggatgacagctccagcactacattcacttgcccgtcagggacaaactaccagatcatcttctgccctccaactgatctcacgtcttcatctccggttcctcctcctgcacctattgctattgggccttcaggcttggattcctcatccaaaagaggaggaaggcttgttgccactatcgtggtctctgtgatcggctctacttcagtactcaccattatcatcgcttccatcattatcatcaaacgaagaatacgaagacaccaggagatgccagaagaggracaagagtttgaggagctaccccttcaaggaatgccgaggaggttcacatttcagcagctacaagaagcaactgatcaattcagagacaagctcggtcaaggggggtttgggtctgttttcctgggacagattggaggtgaaagagtagcggtgaaacgcttggatcaaagtggtcagggaatgagagaatttatggcagaggttcagacaatcggcagcattcaccatatcaatctagtgaggctgattggcttctgtgcagagaaatcacaaaggcttttggtttatgagcatatgcccaaaggatccttggacaggtggctctatcaccagcaaggttctcctgctcctgctctagattggtggacacgatacaagattattactcaagtagccaagggtctctcttatcttcatgaggagtgcatgatgagaattgctcacttagatgtaaaaccacaaaatatcctcctagacgacaacttcaatgctaaactttctgattttggtctatgcaagcttattgatcgagataagagtcaagtgattaccagaatgagaggcacacctggatatttagctccagaatggctgacatcgcagatcacagaaaaggcagatgtctatagctttggcatagtagtcatggaaatgatcagtgggagaaagaaccttgacacttccaggtctgaacagagtatccatctaattaccttactgcaagaaaaggtgaagggtgatcagttggcagatttgattgacaagcacagcaatgatatgcaaattgattgcaaaagaaggcctcaaatgtctgaggttgtcaaagttttggaaggcaccacaagtattgagactgacatagaccatgacttcgtcgcaacaaatccagtaagctttggtgttgctggaattgtggactccgacccccctgtagcatctaatttatcaggccccagattttcctactatgacttattagtaaccaggtggcttttagttcctctacaaaggtg

SEQ ID NO: 4387 - DNA, 1932 bp, Oryza sativa
atggcggcagtgtctacttgttgcactcaccatctcctacctctactcctcctcgctgccatagtcgccaccaccaccaccaaccacgccgccgccgccgccacgttgaacatcaccaacctatgccccttcaccgtgtggccggccgccgtgccggtgggcggcggcaggcggctcgacccgggcacgtcgtgggcgctcgacgtgcccgccggcgccgccccgggccgcgtktgggcgcgcamgggctgcaccttcgasgcmaccggcgcmaacgggacgtgcctgacgggcgactgcggcggcgcgctgtcgtgcacgggctacggcgagccgccgcagacgctcgccgagttctcgctcggccargccgacggccaggacctcttcgacatctccctcgtcgacggcttcaacgtgcccatggacttcctcccggcgccgccgccggatcagtcaccgccgtgcagcaaggggccacggtgtccggccaacgtcacggcacagtgccccggcgagctcagagctcatggaggctgcaacagcgcgtgcagagtgttcaagcaggacaaatactgctgcactggcaacgggacgaacacctgcgaacccaccacctactcgctgccatttgtgaggatgtgcccggacgcctatagctactccaggaacgatgcatccagcccagggttcacttgcccgtcaggtacaaattaccagatcatcttctgccccccaattgatctcacatcttcatctcctgcatcaattgctgttgctgcaaataacagacaaggaaaaaaggttattgccgggatcatcatagcttctgtaatcggctccacttcagtactcaccatggttatggcttacaccagcatcaagcgaagaacacgacggcgccgggagatacgtgaagaggagcaggagcttgaggagataacccttcaaggaatgccaaggaggttcacatttcagcagctacaggaagcaaccgatcagttcagagataagctcggtgaaggaggatttgggtcggttttcttgggacagattggagacgaaagagttgcggtgaaacgcctggatcgaaatggtcaggggatgagagaattcttggcagaggttcagacgatcggcagcatccaccatatcaatctggtgaggctgattggattctgtgcagagaaatcacagaggctcttggtttatgagcatatgcccaaaggttccttggacaggtggatctatcaccagcaaggtgctgctatttttcctagtgttcctcctctagattggcaaacacgatacaaaattattacccaagtagccaaaggtctctcataccttcatgaggagtgcacaaagagaattgctcacttggatgtaaaaccacaaaatatcctcctggatgacaaattcaatgctaaactctctgattttggactatgcaagctcattgatcgagataagagccaagtgattacaagaatgagaggcacacctggatatttagctcctgaatggctgacatcgcagatcacagaaaaggcagatgtctatagctttggcatagtagtcatggaaatcatcagcggaagaaagaatgttgacacttcccggtctgaacagagcatccatctaattaccttattgcaagaaaaggtgaagagtgatcagttggtagatttgattgacaaagataataatgacatgcaagtacacgagcaagaagtaatagagatgatgaaatttgcaatgtggtgtttgcagatcgattgcaaaaggaggcctcaaatgtctgaggttgtaaaagcattggaaggcaccataagtatcgaaactaacatagttcatgattttgtcgcagtaaatccattgtgggctcagctccacctcttgcctcagatctatccggacccaggtgactga

SEQ ID NO: 4388 - DNA, 1029 bp, Oryza sativa
atggctggtggtggtgtgggagcatcggcggcggcggcggcgacgataccagaggcggcgctgaggtccggcaagccgatgccgctcgtcggcatgggcaccgcgtcgttcccgttggacgcgccccagctgccggccaccgtcagggacgccgtcctgcgagcgatcgacgccggctaccgccacttcgacacggcggcggcgtacggcaccgaggcacccctgggggaggccgtgttggaggccgtgcgcgccggcatggtcgcgtcccgggacgacctctacatcacctctaagctctggatctccgacacccaccccggccgtgtcttgccggcgctcaggaggacgctccggaacctgcagatggtttacatcgacctatacctgattcactggccaataagactgagagtggaacaagaaacgccttcgccggtgtacgacaatgactttgtgatgatggacatggagggagtttggaaggacatggaggagtgccagaggctaggtctcaccaaagccattggtgtcagcaatttcacctgcaagaagcttaacaccctgctctcatttgcaaccatccctcctgcagcaaatcaggttgagataaacccctattgccggcagaacaaactaagggagttttgtaaggagaaagaaatccagctctgtgcctactctcctttaggagcaagtggcactatatggggcagcaatgccgtcttggactgccctgttctcaaacatatcgccgtacagaagggcaaaacggttgcccaggtatgcctgaggtggctgcatgagcaaggcgattgcataatcgtcaagagcttcaatgagagaagaatgagagagaacctcgaaatttttgattgggagctcaccgatgctgatcgccaggagataagcgccctcccggaattcaggggaaaccgtgatttctatgtccacgaatctggcccatacaaaaccactgatgagttttgggatggcgagattactgggccacaactaaaaacctgttaa

SEQ ID NO: 4389 - DNA, 3153 bp, Oryza sativa
atggacattctcatcccacttctcctctcctcgatctacgtgtcgtcgtcggcggcggcggcggaaaccgatgcggcggcgctcctccgcttcaaggcgttcgtccacaaggatcctagaggagtcctctcgtcgtgggtggatcctggtccatgtcgctggcgtggcgtgacgtgcaacggcgacggcagggtgacggagctcgacctcgccgccggcggcctcgccgggcgcgccgagcttgccgccctctctggtctcgacacgttgtgcaggttgaacctctccggcaatggcgagctgcacgttgatgccggtgacctggttaagctcccgcgcgcgctgctgcagctcgacctctccgatggcggcctcgccggccggcttcccgacggctttctggcgtgttaccccaacctcaccgatgtcagcctcgcgaggaacaacctcaccggcgagcttcccgggatgctcctggcgagcaatatccggtcgttcgacgtgtccggcaacaacatgtccggcgacatctccggcgtgtcgctccccgcgacgctggccgtcctcgacctgtccggcaaccgcttcaccggcgccatcccgccgtcgctgtccggctgcgcgggcctcacgacgctcaacctgtcgtacaacggcctcgccggcgcgataccggagggaatcggcgccatcgccgggctcgaagtgctcgacgtgtcgtggaaccacctcaccggcgccatcccgcccggcctcgggaggaacgcgtgcgcgtcgctgcgtgtcctccgcgtctcgagtaacaacatctccggctccatcccggagtcgctgtcgtcgtgccacgcgctccggctgctcgacgtcgccaacaacaacaacctccgcgtcgccgacctgagcagcaacaagatctccggcgcgctcccggccgagctctgctcgcccggcgcggcgctggaggagctccggctgccggacaacctcgtcgccggcacgatcccgccgggcttgtccaactgctcgcggctgcgggtgatcgacttcagcatcaactacctgcgcggcccgatcccgccggagctcggccggctccgcgccctggagaagctggtgatgtggttcaatggcctcgacggccggattccggcggatctcgggcaatgccggaatctccggacgctgatcctgaacaacaacttcatcggcggcgacatccccgtcgagctcttcaactgcaccggcctcgagtgggtgtcgctgacgagcaaccagatcaccggcaccatccggccggagttcgggcggctgtcccgcctcgccgtgctgcagctggcgaacaacagcctcgccggcgagatccccagggagctcggcaactgcagcagcctcatgtggttggacctcaacagcaaccgcctcaccggcgagatccctcgccgcctcggccgccagctcggctccacgccgctcagcggcatcctgtccgggaacacgctggcgttcgtccgcaacgtcggcaactcgtgcaagggagttgggggattgctggagttcgccggaatccggccggagcggctgctgcaggtgcccaccctcaagagctgcgacttcacgcggctctactccggcgccgccgtgagcgggtggacgcggtaccagacgctggagtacctcgacctctcgtacaacagcctcgacggcgagatccccgaggagttgggcgacatggtcgtgctccaggtgctcgacctggcgcggaacaacctcaccggcgagatcccggcgtcgctcggccgcctccgcaacctcggcgtgttcgacatcgacatctccgacaacaacctctccggcgagatcccgcagcggggccagctcagcacgctgccggcgagccagtacgccggcaacccggggctgtgcggcatgccgctggagccctgcggcgaccgcctcccgacggcgaccatgtccgggctcgccgccgcggcgtcgacggatccgcccccacggcgcgccgtggcgacgtgggccaacggcgtgatcctcgccgtgctggtgtcggccgggctggcgtgcgcggcggcgatatgggcggtggcggcgcgggcgcggcggcttaaggtgcgctcggcgatgatgctgagcagcctccaggacgggacgcggacggcgacgacatggaagctcgggaaggcggagaaggaggcgctgagcatcaacgtggcgacgttccagcggcagctccggaagctgaccttcacgcagctgatcgaggccaccaatggcttctccacsgccagcctgatcggctccggcgggttcggcgaggtgttcaaggcgacgctcaaggacgggtcgtgcgtggcgatcaagaagctgatccacctgagctaccagggcgaccgcgagttcatggcggagatggagacgctgggcaagatcaagcacaagaacctcgtccccctcctcggctactgcaagatcggcgaggagcggctgctggtgtacgagttcatgagccacggcagcctggaggacacgctgcacggcgacggcggcagatcggcatcaccggcgatgtcgtgggagcagcggaagaaggtggcgcgcggcgcggcgaggggcctgtgcttcctccactacaactgcatcccccacatcatccaccgcgacatgaagtccagcaacgtgctcctcgacggcgacatggaggcgcgcgtcgccgacttcggcatggcccgcctcatcagcgcgctggacacgcacctgagcgtcagcacgctcgccgggacgccgggctacgtgccgccggagtactaccagagcttccggtgcacggtgaagggggacgtctactccttcggcgtcgtcctcctcgagctgctcaccggccgccgccccaccgacaaggacgacttcggggacaccaacctcgtgggctgggtcaagatgaaggtcggggacggcgccgggaaggaggtgctcgacccggagctcgtcgtcgagggcgccgacgccgacgagatggccaggttcatggacatggcgctgcagtgcgtcgacgacttcccctcaaagcgcccaaacatgctgcaggtggtcgccatgctcagggagctcgacgcgccgccgccggcaactgccatataa

SEQ ID NO: 4390 - DNA, 996 bp, Oryza sativa
atggagcgacgtggtagcctgtacggcgtcgcggcggcggcggcggtggtggtggtggtggcaatggcggcggcggccggcggcgaggcggcgaggctgtcgccggagcactaccggtcgacgtgccccggcgtggagtccgtcgtgcggtcggtggtggcgaggaaggtgaaggagaccttcgtcaccgtcccggccacgctccgcctcttcttccacgactgcttcgtcgaggggtgtgacgcgtcggtcatgatcgcgtcgcggggcaacgacgccgagaaggactcgccggacaacctgtcgctcgccggcgacggcttcgacacggtggtgcgcgccaaggcggcggtcgagaagaagtgccccggcgtggtctcctgcgccgacatcctcgccatcgccgccagggacgtcgtcgccatgtcgtccggcccamgctggaccgtcgagcttggccggctaraacggcctcgttctccaagtccggcggcgttgccggcaactgccaggcccggaaatgcgcgtcaaggaccttgccgccatattcgccaagaacaactcaccgtgctcgacatggtggcgctctccggcgcgcacaccgtcggcttcgcgcactgcacgcgcttcgccggccggctgtacggccgcgtcggcggcggcgtggacccgtcctacgacccggcgtacgcgcggcagctgatggcggcgtgcccgcgcgacgtcgcgccgaccatcgccgtcaacatggaccccatcaccccggccgccttcgacaacgcctactacgccaacctcgccggcggcctcggcctgttcacctccgaccaggagctctacaccgacgccgcgtcgcggccggcggtgaccggcttcgccaagaaccagacgctcttcttcgaggcgttcaaggaggccatggtcaagcttggcagggtcggagtcaagtccgggaagcatggagagatcagaagagactgcacagctttcaactga

SEQ ID NO: 4391 - DNA, 1632 bp, Oryza sativa
atgaggacgtggcggctcgccgtgctggcgtgcctgaagctcgccgtgaccatcaacggcgagtcccccgggccgaccatccgcgccgcccagggcgacaccctcgtcgtcaccgtccacaacatgctcgacaccgagaacaccgccatccactggcacggcatccgccagattggcagcccgtgggctgacggcaccgccggcgtcacgcagtgccccatcctccccggcgagaccttcacctacagattcgtcgttgacaggcctggaacgtacatgtaccacgcgcactacggcatgcagcgcgtggcggggctggacggcatgctcgtcgtgtcggtgcccgacggcgtcgccgagcccttcgcctacgacggcgagcacaccgtcctcctcatggactggtggcaccagagcgtgtacgagcaagccgtcggcctcgcctccgtccccatggtgttcgtcggcgagccccagtcgcttctgatcaacggcagaggcgtgttcaactgctcgccgccggcggccagcaatggcggtggcgcggcgtgcaatgcgtttggcggcgagtgcgggtggccgacgctgttcaccgcctcgccggggaagacgtaccgcctccgcatcggcagcctgacgtcgctggcgtcgctgagcttcgagatcgaggggcacacgatgacggtggtggaggccgacgggtactacgtcacgccggtggtggtcaagaacctcttcatctactccggcgagacctactccgtgctcgtcaccgccgaccaggacccgtcccggagctactgggcggcgtcgcacgtcgtcagccgcgaccccaccaagacggcgccgggcagggccgtcgtcaggtacgcctccgccgccgtggatcacccgcgcacgccgccgccgaccgggccacggtggaacgacacggcgagcagggtggcgcagagcaggtcgttcgccgcgctgccggggcacgtcgagccgccgccggcgaggcccgaccgcgttctcctcctcctcaacacgcagagcaagatcgacaaccacaccaagtgggccatcaacggcgtctccctcagcttcccggcgacgccgtacctcgtcgccatgaagcacggcctccgcggcgagttcgaccagcggccgccgccggacagctacgaccacgggagcctcaacctctcctccccgccggcgagcctcgccgtgcgccacgccgcgtaccgcctcgccctgggctcggtggtcgacgtggtgctgcagaacacggcgatcccgccgccgaacgggcggagcgagacgcacccgtggcacctccacgggcacgacttctgggtgctcggctacggcgagggcaagttcgtgccggaggtggacgggccgggtctgaacgcggcgagcgcgaggggcggcgccgtgatgaagaacacggtggcgctgcacccgatggggtggacggcggtgaggttcagggcgagcaacccgggcgtgtggctgttccactgccacctggaggcccacgtgtacatgggcatgggcgtggtgttcgaggagggcgtcgacgtgctgccgcggctgccggcgtccatcatggggtgcggccgcaccaagggccatcactactaa

SEQ ID NO: 4392 - DNA, 1077 bp, Oryza sativa
atggctcccacggcggcggcggggctggcagcgcgcgaagcgttcgggcaacttttcccggctcaccatctcccgcagtacatggtactacctccatctagatttgggcacatagaattaaatggtggaaggttattattgattaagaagtgcaggagcactggagatgatgatgtggtgataaagattctttactgtgggatctgccactccgacctgcacagcatcaagaacgagtggaagaacgccacctacccacttgttcctgggcacgagatcgccggcgtggtgacggaggccggcaagaacgtgaccaagttcaagggcggcgacaaggtgggcgtcgggtgcatggtgaactcgtgccactcctgcgacagctgcaaccaggggttggagaaccactgcccaggcgtgatcttcacctacaactccgtcgacaaggacggcaccgtcacctacggcggctactcgagcatggtggtggtgcacgagcgcttcgtggtcaggttcccggaggccatgccgctggacaagggcgcgccgctgctctgcgccggcatcaccgtgtacagccccatgaagtaccacggcctgaacgtccccagcaagcacgtcggcgtgcttggcctcggcgggctcggccacgtcgcggtgaagttcgccaaggcgttcgggatgacggtgacggtgatcagctcgtcgccggggaagaggcaggaggcgctggagcggctcggcgccgacgcgttcgtcgtctccaagaatgccgacgagatgaatgccgcgacgggcaccatggacggcatcatcaacacggtgtctgccaacattccgatcgcgccgctgctgggtctgctgaagcccaacgggaagatgatcctcgtcggcctgccggagaagcccatggagatccctcccttcgctctggttgcttcgaagcacggcgtgacggcggagatcgaggtgatcggcgccgactacgtgaacacggccatggagcgcctcgccaaggccgacgtcaggtaccgcttcgtcatcgacatcggcaacaccctcaaggacgccatcgagtga

SEQ ID NO: 4393 - DNA, 666 bp, Oryza sativa
atggcttcttcttccttttccttcctgcttgttgctgctcttcttgggttggcctcatggaaagccattgcctcagaccctagccctctccaagacttttgtgtcgctgatctgaattcgccagtgcgagtaaatggatttgtttgcaagaacccaatgaacgcgagtgccgacgacttcttcaaggcagccatgctcgataagcctagagacacaaacaataaggttgggtccaatgtcactttggtcaatgtcttgcagcttcctggtctcaatacccttggcatctcgatagcacgtcttgactttgcacccttgggtttgaacccaccacacacgcaccctcgtgcaaccgagatcttcacggtgcttgaaggaacactctacgttggctttgttacgtccaacccagataacaggctattgtccaaggtgctcaacaagggtgatgtgtttgtgttccctgaggggctcatccacttccagttcaatcctaacccacacaagccggcagttgccattgctgcactgagtagccaaaatcccggggttattactattgccaatgcggtgtttggatcgaacccacctatctcagatgatattttgatgaaggcgtttcaggtggataagaagatcatagatttgctccaagctcagttctag

SEQ ID NO: 4394 - DNA, 1098 bp, Oryza sativa
atggctcccaagaaggtgctcctgctctgcggagactacatggaggactacgaggccatggttccgttccaagcgctgcaagcgtacggggtgtccgtggatgctgcctgccccggcaagaaggccggcgactcgtgccgcaccgccgtccatcaggggattggccaccagacatatgctgagtcaaggggccacaatttcgcacttaatgcttcgtttgatgaggttaatatcaatgaatatgatggcttggtaattcctggaggccgtgcaccagagtatctcgccatggatgaaaaggttcttgatttagtaaggaaattctctgatgcgaagaaacctattgcatcagtttgccatggacagttgattttggcagcagctggagtagtccagaaccgtaaatgcaccgcatatcctgctgttaaaccagttttggttgctgctgtggcttacgatgcacatcctgaattcatcagcctttttgtgaaagcgcttggaggctctgtaactggctcaaacaaacggatattgttcctttgtggggattacatggaagattatgaggttatggtaccatttcagtctcttcaagcccttggttgccatgttgatgcagtttgccctgacaagggtgctggggagaaatgcccaactgccatacatgactttgaaggtgaccaaacatacagcgagaagcctggtcacgattttgctttgacagcatcatttgacaatgtggatgcatcaagctatgatgcacttgtaattcctggtggacgggctcctgagtaccttgcactgaacgataaagtcattagccttgtgaagggcttcatggataaagcaaagccagtcgcctcaatttgccatggccaacagattttatctgctgctggagtccttcagggaaggaaatgcacggcgtatcctgcggtgaagctgaacgtggtgcttggcggggcgacatggctggagcccaatcccattgaccgctgcttcaccgacggcaaccttgtgaccggcgcggcatggcctggccacccggagttcatctcccagctcatggcattgcttggcatcaaggtctccttctga

SEQ ID NO: 4395 - DNA, 2136 bp, Oryza sativa
atgtcgtacgcgtccggtggcggcggcggcggggagctggcgacgaagcggtcggcgttccacatcgactatgggggtggcgtgtcactgcggcggctggcgcagccggaggccctggcgcgcgggatgatcacgcaggggtcggcgcagctgcggacgctggggcggtcgctgcggacgggggcggccatggcggtggtgttccaggaggacctgaagaacacctcccgcaagatcttcgacccgcaggaccggctgctggtgcgcctgaaccgcagcttcgtggtctcctgcatcgtctccatcgccgtcgacccggtgttcttctacgcgccccaggtgacggcgaacggcggcaacctgtgcgtggggatcagccgcgacctggccatctccgccagcgtcgtgcgcaccgtcgtggacctcttcttcgcggcgcggatcgtgctccagttccggaccgcttacatcgctccgtcgtcccgcgtattcggccgcggcgagctcgtcatcgacaccgcccagatcgccgcccggtacttccggcggttcttcgccgccgacctcctctccgtgctcccgctcccgcagatcgtgatctggaagttcctccaccggtccaagggcgccgccgtgctgtccaccaaggacgcgctcctcatcatcgtcttcctccagtacatcccccgcgtcgtccgcatctaccctctctcctccgagctcaagcgcaccagcggcgccttcgccgagtccgcctacgccggcgccgcctactacctcctctggtacatgctcgccagccacatcgtgggggcatcgtggtacttgctgtcgatcgagagggtgagcgattgctggaagaaggcgtgcaacgagttcccgggatgcaacaagatctacatgtactgcggcaacgaccaccaaaaagggttcctcgagtggcgaaccatcacgcggcagtacatcaacgagacgtgcgagcctagggacggcgtcatgcccttcaactacggcatctacacgccggccgtcaggtccgacgtcatcaagtccaacgacttcacctccaagctcctctactgcctctggtggggccttgccaacctcagcacgctggggcaagggctgcagacgagcatatacacgggggaggcgctgttctcgatattcctggcgacgttcgggctgatcctgatggcgatgctgatcggcaacatccagacgtacctgcagtcgatgacggtgaggctggaggagatgcgggtgaagcggcgcgactcggagcagtggatgcaccaccgcctcctcccccaggagctccgggagcgcgtccgccgctacgacgcctacaagtgggtcaacacccggggcgtcgacgaggaggtcctcgtcgccaacctccccaaggacctccgccgcgacatcaagcgccamctctgcctcggcctcgtccgccgcgtcccgctcttcgccaacatggacgagcgcctcctcgacgccatctgcgagcgcctccgccccgccctctacaccgagcgcaccttcatcatccgcgagggcgaccccgtcgaccagatgctcttcatcatccgcggctgcctcgagagcatcaccaccgacggcggccgctccggcttcttcaaccgcagcctcctcgaggagagcgacttctgcggcgaggagctcctcacctgggcgctcgaccccaaggccggcctctccctcccctcctccacccgcaccgtcagggccctctccgaggtcgaggccttcgccctccactccgacgagctcaagttcgtggcggggcagttccgccggatgcacagcaagcaggtgcagcacaccttccggttctactcccagcagtggcggacgtgggcggccacctacatccaggccgcctggaggcgccacctcaagcggagggcggcggagctgcggcggagggaggaggaggaggaggaggccgccgcgatccgctcgtcgacggggctcaagaccaccatgctggtgtcgcgcttcgccgccaacgccatgcgcggcgtccaccggcagcgatccaggcgggccgacgaggtcctcatgatgcccatgcccaagccctccgagcctgatttcggcgccgattactga

SEQ ID NO: 4396 - DNA, 3920 bp, Oryza sativa
atggacgcggcggcgaacggcggcagggatggcaaggagaagaaggcgaagaacggcagggacggcgaggacaagaagaaggaggaggacggcgacgccgggaagaaggtgtcgttcacggggctgttccggtacgccgacggcacggacctgctgctgatggcggtcggcacggtggcggcgctcgccaacggggtttcgcagccgctcatgaccgtcatcttcggccaggtcatcaacgccttcggcgaggccaccaacggcgacgtcctccaccgcgtcaaccaggcggttctcaactttgtctacctgggcatcgcgacagcggttgtttcatttcttcaggtggcgtgctggacaatgactggagaacggcaggcgacacgcattcgatctctatacctcaaatctgtcctgagacaggatatagcattctttgatgtagaaatgacaactgggcagatagtttcaagaatgtccggtgacactgtgttagttcaggatgccattggtgagaaggttggcaagtttctacaacttgtggctaccttcgccggtggtttcgttgtagcatttgtgaaaggttggcttctatcccttgtcatgttggcctgcatccctcctgttgtcattgctggtggagctgtatcgaagatgctagcaaaaatctctagcaagggtcaagcatcatatagcgatgcagcgaatgttgttgaacagacaattggagccataaaaactgttgtttccttcaacggtgaaaagcaggctgttgcatcgtacaataaactcataaacaaggcatacaaggcagctgttgaggaaggacttacgaacggttttggcatgggctccgttttcttcatatttttctccagctatggtttagctatatggtatggcggcaagttggtagtcagcaaaggatactcaggaggagacatcataaatatcttgtttgctgtcatgactggggcaatgtctttagggaatgcgaccccatgtatggcagcctttgcagaagggcaatctgcagcttatagattgttcaaaacaatcaagagaaaaccacagattgatcctgatgacataactgggaaacagttggaggacatcaggggtgatgtggaattgaaggatgtgtacttcagctacccagcaaggcctgagcaactgatatttgatggattttcattgcatgtttctagtggcacgacaatggctatagttggggagagtggaagcggcaagtccactgttattagtcttgtcgaaagattctatgatccacaggctggtgaggttttgattgatgggattaacatcaagagcttgaggcttaattggataagagggaagattggtcttgtcagccaagagccattgctctttatgacctccattaaagataatataacatacggcaaagaggatgcaacaattgaagagattaggagagcagctgagcttgctaatgcagcaaattttattgacaaattacctgatggctatgatacaatggttggtcaacgtggcrcacagctctcagggggacaaaagcaaagaattgctattgctagagcaatacttaaaaaccccaaaatccttctgttagatgaggctactagcgcattggatgtggaatcagagaggatagttcaagaggcactgaacaggatcatggtggacagaaccacacttgtggttgctcatcgcttgaccacagtgaggaatgctgattgtatatcagttgttcaacaaggaaagatagttgagcaaggtccccatgatgaattggtaatgaaccccaatggtgtttattcgcaactcattaggctacaagaaacccacgaagaagaagagaagaaattagaccatcacatatctgattcaaggtctaaaagtagaagtttgtcattcaagcgatcaattagcagggattctgcaggaaatagtagcaggcattctctagcccttccctttggcttgcctggctcagttgaattgcttgaaggcaatgattcgactgtgggggaacagacagagcagggtggtgatggtgaggtccaacagaaagctcctattggacgactggctagactaaacaagccagaggtaccgatacttttgttagcaacactggctgcaggagttcatggagtgcttttcccaatgtttggagtaatgatttccaatgccatcaaaactttctttgagccagcagacaaactaaaaaaggatgctagcttttggggtttgatgtgtgttgtcctgggtataatttcaataatatcaataccggtggagtactttatgtttggaatagctggaggtaaacttgtagagcgtgtccgtgccttgtcattccggagtattattcaccaagaagttgcttggtttgatgatcctaggaattccaggtttggttgcccattctttattggttgttttctcttcctcctaaatatcaaggaattttacacattgggaactgatgatgaaatttcatcctacagtggagcgcttggtgcaagattatcagtagatgctttgaatgtccggcgtttagttggagacaatcttgcattggcagttcaggtcgtctcaacacttatcacaggaattgtcatagcgatgatagcggactggaagctcactttgatcatcctttgtgtgattccacttgtgggtcttcaaggttatgctcaagttaagttcctgaaggggttcagtgaagatgccaagatgttgtatgaagatgcaagtcaagtggctactgatgcagtaagcagcatcaggactgtagcttccttttgttctgagaaaagagtgatgacaatgtatgataataaatgtgaagcttcgaagaatcaaggagttagaacaggaatggttggaggccttggttttggtttctcattcttgatgttgtacctaacatatggtctctgtttctatgtcggagcacaattcgtacgccacaataaaactacttttggggacgttttcaaggttttctttgcactggtgttggcaactattggaatatctcaaacaagtgcgatggcttctgattctacaaaggccaaggattcagctatctccatatttgctttgctagaccgcaagtcacaaattgactcgagtagtgatgagggtaggacattggccaacgtcaagggaaacattgatttccgacatgtcagcttcaagtatccaacccgcccagatgttcagatcttcagtgattttactcttcacataccctctggcaagaccgttgcacttgttggagagagtggtagcggaaagtccacagcaatcgctttgctagagcgattctacaatcccgagtcaggaaccatcttgttggatgaagtagaaatcaagaacttaaaggtcaattggttgagggatcagatggggttggtcggccaagagcctgtgctctttaatgacacaatccgtgctaacatagcctacgggaagcatggggatgtcactgaggaggagctcatcaaagctgcaaaggcatccaatgcacatgagttcatatcgagccttccccaaggatatgataccaccgtgggggagagaggggtgcagctatctggtggccagaaacagcgggtggctattgcgagggccatattgaaagatccaaagatactacttctagatgaggcaacgagtgccttggatgctgaatctgagcgcattgtgcaggatgcgttagataatgtgatggttggcaggactacgattattgtggcgcaccgcctctcgacgatcaaaggtgctgatatcattgcagttctgaaggatggtgcgatagcggagaaaggaaggcatgaggcattgatgaacatcaaagatggtgtctatgcttcacttgttgaactccgttcaggctcatcata

SEQ ID NO: 4397 - DNA, 2757 bp, Oryza sativa
atggcggcgccagttccatgccttccagaccaggcatcggcgctgctccagctgaaacgctccttcaacaccacggtcggtgactactccgcggccttccgatcatgggtcgccggcacagactgctgccactggaatggcgtccgctgtggcggatccgatggccatatcacctccctcgacctgagtcaccgtgatttgcaagcctcaggtcttgatgatgcactcttcagtctaacctccctcgagtaccttgacatctcttggaacgacttcagtgcgtccaagctcccagccattgggtttgagaagctcgccgagctcacccatcttgacctctgcaccaccaacttcgccggccgggtacccgttggcatcggccgcctcaagagcctggcctaccttgacctgtctacaacattctttctatatgagcaggacgaggagaacagcatcacctattactactcagaaacaatgtcacagctctcggaaccgagcttggagaccttgctcgcaaacctcaccaacctggaggagcttcgcctgggcatggtgaacatgtcaagcaacggcgcacggtggtgcgacgccatagccaggtcctccccaaagctgcgggtcattagcatgccgtactgctcactctccggtcccatttgccactcactctcggccttgcgatcactttcagtgatagagctgcactacaatcatttgtctggtccagttcctgagctcctggctactctctccaaccttactgttcttcagctttcaaataacatgcttgaagggagtatatctgtgagcaacaccaacttctccggcacaattccagcttccatcagcaacctcaaatatctgaaggagttggcacttggagctagtggtttctttggaatgctgccatcttccattggtaagctgaaatctttacatatactagaggtgtctgggttagagctacaaggatccatgccgtcatggatttcaaatctgacttttttgaatgttctcaagttcttccattgtggtttgtccggaccaatacctgcttctgtcggatccttaacgaaattgagagaattggcactgtacaattgccacttttcaggagaggtagctgcgctgatatcaaatttgactcgcttgcaaaccctcctgctccattcaaacaactttattggcacagtggagctagcctcatactcaaaactgcaaaatctttctgtcctcaatctctcaaataataaactagttgtggttgatggagaaaatagttcttcagtagtgtcctaccccagtattagcttcttacgtctagcatcttgcagcatatctagcttccctaacatcttgaggcatctcccttatattactagtcttgacctttcatataaccagatccaaggtgcaatacctcagtggacatgggagacatggacgatgaactttttcttgttgaacctatcacataataactttacgagtattggatccaatcctttacttcccctttacattgaatactttgatctcagtttcaacaattttgatggagcaataccagtaccacaaaaaggaagtatcacacttgattactcaaccaaccggttctcatctatgcctcttaatttctccagttaccttaagaatacagtcgttctcaaagcctccgacaatagcctctctggaaacattccctcatcgatttgtgatgcaattaagagtttacaactacttgatctctctaataacaacttgacaggctcaatgccatcatgtctgacgcaagatgcaagtgcattgcagtgcattagacttcagcggcaatatggattcaagggacagctaccaagatctttggttgcctgtaggaatctggagatccttgacatcggcaacaatcaaattagtgaccacttcccatgttggatgagtaaacttcctgaacttcaagtcttgggcctcaagtctaacaagttccatggggaaataatggatcctttgtataccagagatgggaacaactgtcaattttccatgttgcggattgctgacatagcctcaaacaacttcagtggcacattgccagaagagttgtttaagatgctcaagtccatgatgaccaggtcagataacgagactttagtcatggaacatcagtattcccacggccagacataccagtttactgctgcactcacatacaaaggcaatgacataacaatttccaagatcttgagatcacttgtgctcattgatgtctcaaataatgaattcgatggtagcatcccttcaagcattggggaacttgcgttgcttcatggactcaacatgtctcataacatgcttacagggccaattccaactcagtttgacaatttgaacaaccttgagtcgttggacctctcctcaaataagctttctggtgagattccacaagagctagcatcgttgaacttccttgcaacattgaatttgtcctataatatgttggctggaagaataccacaatcgtcacacttctcgacattttccaatgcctcttttgagggaaatattgggctctgcggacccccattgtctaaacaatgtagctaccgatctgaaccaaacatcatgccacatgcttccaagaaggatcccatagatgttctactttttctcttcactgggttgggatttggtgtctgctttggaattacaattttagtgatatggggaagcaacaacaggaagcagcaagcctga

SEQ ID NO: 4398 - DNA, 783 bp, Oryza sativa
atggcggcggcgaacggcgatgccagccatggcgccaacggcggcattcagattcagtccaaggagatgaagacggccatccacagcaacgatagccccaagaccctcctcaagagtgaatccctccacgagtacatgctgaacacgatggtgtacccgcgggagaacgagttcatgcgcgagctccgcctcatcaccagcgagcacacctatgggttcatgtcgtcgccgccggaggaagggcagctgctgtcgctgctgctgaacctgacaggcgccaagaacaccatcgaggtgggcgtgttcaccggctgctccgtgctcgccaccgcgctcgccatcccggacgacggcaaggtcgtcgccatcgacgtcagccgggagtacttcgacctcggcctccccgtcatcaagaaggccggcgtcgcccacaaggtcgacttccgcgagggcgccgccatgcccatcctcgacaacctcctcgccaacgaggagaacgaggggaagttcgacttcgcgttcgtggacgccgacaaggggaactacggcgagtaccacgagcggctgctgcggctggtgcgcgccggcggcgtgctggcctacgacaacacgctctggggcgggtccgtggcgctggaggacgactccgtgctggaggagttcgaccaggacatccgccgctccatcgtggccttcaacgccaagatcgccggcgacccgcgcgtggaggccgtgcagctcccggtctccgacggcatcaccctctgccgccgcctcgtttga

SEQ ID NO: 4399 - DNA, 1338 bp, Oryza sativa
atgacgaccggcaatggcgacgcaccggtgatcaagaacgcccacagcgacatcgacagcaccaacaagacgctgctcaagagcgacgccctgtacaagtatgtcctggacacgacggtgctgccacgggagccggagtgcatgcgcgatctgcgcctcatcacggacaagcaccagtgggggttcatgcagtcgtcggcggatgaggcgcagctgctggggatgctgctgaagatggccggagcgaagaggacaatcgaggtgggtgtcttcacsggctactcgctgctggcgacggcgctggcgctgccggaggacgggaaggtggtggcgatcgacccggacagggagagctacgagatcgggcggccgttcttggagaaggccggggtggcgcacaaggtggacttccgcgaggggaaggggctggagaagctggacgagctgctcgccgaggaggcggcggcggggcgcgaggcggcgttcgacttcgcgttcgtggacgcggacaagcccaactacgtcaagtaccacgagcagctgctgcagctggtgcgcgtcggcgggcacatcgtgtacgacaacacgctgtgggccggcacggtggcgctgccgccggacacgccgctgtcggacctggaccggaggttctccgtcgccatcagggacctcaactccaggctcgccgccgacccgcgcatcgacgtctgccagctcgccatcgccgacggcatcaccaatctgccgccgcctcgtagctgcactgtgcaggcttttactgctactagtggtagtagtaggacatggcaagcaaggcaggctggatggggaaggggcgtcggcgtcgacagcggcatgtgccagcatgatgggataggagagggtggagacaggagacgtgcggtggcggccctatggcgttgggtagcgtgctggccgggatggtggcatctcgcatcgcagcaggttctccaactccaaccgcacccgcccacccccaaccaggctgaccatcacgagcccacgacgggtgcggttgtgcgcagtgtcccccaccttgcagttgcaggcggcagtgtggcacgaccacccatcggttgccggcacgggagcgggaggcgtcgcgtgggagggacgggagaagcaatttaccgcaagcgctggcccgcggaacgtggcccggttacgtcggacgttcggggcaattttgtgttgcccgccgcgaggcccgagagaggcgccgtctacgctattcggccgatctgccctgacctgtccgcctacagcagaagccgggcccgtagaaccagactacagactatatatggctttggttag

SEQ ID NO: 4400 - DNA, 1722 bp, Oryza sativa
atgggcgggccatacaggagtatagtgccggagccggtggcggttggcgggacttctagaaagaacaccgttcttcatgtcgcagcggagaaagggcacatcgagctgatcaaggagctctaccacaggttcatcaaggacaacaacttcctctctcgtcgaaactcggcactgaacacgcctctgcactgcgcagcaagggaagggcacaccggcaccgtgacaaccctagtacatctagcccaggaccgtgtggagaatatcatggggtgccagaacacggccggggacacggccctacatctggcagcgaggcatggtcatggcgccactgtggaggctcttgtcgcggcacacgcaaaggcgacagagctgaacaaagtcggcgtgtctccgttgtacttggcggtgatgagcaggtcggtgcctgctgtaagagcaatagttactacctgcagtgacgcatcagccgttgggccgagctcgcagaatgctctgcatgctgctgtctttcggagcttagagatggttcacctcttattgcaatggaagccagaactggctagccaagtcgactgcaatggtagcaccccgctccatttcgcggcatccgatggcaacagcaaaatcatacgtgcaatcatggccactgcgccacctggcacagtgtacatgaaggactcggatggcctctctgctcttcatgtcgcagctaagttggggcatgccgatgttgtcaagcagttgattgggatccgccctgatgctgtcgagcttcgtgacagccatggtgagaccttcgtgcactccgcagtcagggagaagcgctcctcgatcgtgtcccttgccatcaagaaacacaagcaggtcggtggtcttctggatgcgcaggacggggatgggaacacgccgctccacatcgccgtggttgccggcgcgcctggcatcgtgaatgctctactccagaaggggaaagtgcaaaccgatgtcttgaacgacgatggacacacaccgctagatctcgcttccacatcgcccagtttgttcaatatggtaaggttcgtgatggcattagttgctttcggggcacaatgccgaccacaaaggaatgaccatctgaagccatggagcggccatgacaacatagggaaggggatagagaggacttcggacagcctcgcggtggtggccgtgctcatcgccaccgttgcctttgcagctggattcaacatgccgggcgggtacacgaacgacggctcggcaagcctcgagggcatgtccttgttcagatggttcgtggtcctcgacgccatcgcggtagcatcatcggtgatcgccgtgatcctgctcgtctacgggaaggcgtcgcgctccaccgggtcgtggaagagcttcgtggcggcgttgcactgcatctgggtctcgctcgtcagcctaatcctggccttcttcgcggcctcccgtgccgtgatgagaacctcgacggcagaatccatcgtgtacattgttatctacgtgggcatccatcgttttgtctctctttgtcgcacagtggattggacctgtgacgacggcgcgtgcattctggaggtttttgtggctcagtcaccgggctcacaccgtcaggaggcagtatccgttcgccgtcgcttccatctacaactggcttctcttcttacatataacttatataatgtttgctggtttgggagtggtacataa

SEQ ID NO: 4401 - DNA, 2679 bp, Oryza sativa
atgcggcgttgcagttgctggcagctattgtggctggtgcttgtgtgctcatggcggatcgctgcagctcaggctcaggcggcaccaagaaccgatccaaccgaagcggcagctctgaacacaatcctgggaagatggggcaagaaagcatcatcagagtggaacatcagtggcgagctttgtagtggcctggcttccgacaagaccaactgggatgactaccccaacatcaacccatttatcaagtgtgactgctcctacaataacaactctgtctgtcacattatcaaattgagggtatataagttaaatgttgttggtcaattaccttcagagcttcagaatttcacctatatggaggacctgaacttggctttcaatccattatccgggcaacttccgaaggaaattgggaatctcacaaatcttctcatgttgggagttagctttaacaattttacgggtgaacttcctgaagaactgggaaatttggtgaaacttgagcagttgagggcacaagataatgatttcacaggcaaaatacctgataattttggcagcatgagtagtttggaagatatgcgaattggtgatatcgtaaatgggagctcttcactggcttttataagcaatctcacctctttgagcaacatgatattaaggaactgtagaatatctggtaatcttggactagtagatttctcgaagtttgcaaatctaacatatctagatttttcctacaaccagctcagtggaagatttccttcttgggtcaaccagaacaatttgcaattgaatttggtggcaaacaactttgttcttgtgggcactaacagcagtattctaccttcaggtctaggctgcctccaacaagacactccttgtttccgaggatctccagaatattactccttcgcagttgactgcggcagtaatagttctacgagtgcctcagataatactatttttgaagcagatcccacgagccttggcactgcagcatattatgtcaccagtcagacaagatggggtgtcagtagtgttgggaacttcttccagggcacaaatggaatggatagaatatatagctcctccaagcattttcagaatactgttgattcaaaactgtttgagactgctaggatgtcaccttcatcactgaggtactatggtcttggacttgagaacggaaactacacagttctgcttcaatttgcagagttctcttttacggaaacaccgacttggcaaagcttaggaaggagagtttttgacatatatgttcagggtgcactgaaagaaaagaatttcgatataaggaagacagcaggtggaaaatcttttactgcagttaacaggagctacacagcaactgtgtcgaaaaacttcattgagatccatctcttttgggctggcaaaggcacttgttgtgtacctactcaaggtcactacggaccgacgatctcagcattaagcatcactccaaattttactcccactgtacggaatggggtaccaaaaaagagaagtaaagcaggtgcaattgttggaatagtgattggtgcatcagttttaggattggcagccttatttggaatatttttcttagtaaagaagcgaagaacaatggcacaacaaagaaaagaactgtatgacctggttggacggcctgatgtctttagtagcgccgaactcaagctagctacaaataatttcagttcacaaaacattcttggagaaggcggatatgggccagtgtataagggtaagctacctgatggaaaagttgttgctgtcaaacaactttcagaatcatctcatcaagggaaaagccagtttgtgacagaggttgctacaatttctgctgtgcaacatcgtaatcttgtgaaattgcacggctgctgcattgatagtaaatcacccttgctggtttatgagtaccttgaaaatggaagcctagatcaagcacttttcagagacacaggcttaaaactagactggacaaaacgctttgagataattttaggcattgcaagaggcctaacttatcttcacgaggagtcgagtgtgcgcattgtgcatagggacatcaaagccagcaatgtactactcgacactgatctcaccccaaagatatcggactttggactcgccaagctatatgatgagaagaagactcatatcagcacagcgattgccggcacatttggctatctggcacccgagtatgcaatgagaggtcgtttgactgaaaaggctgatgtttttgcattcggggtggtcgcgctcgagactgttgctggtcggtcaaacatcgacaactcccttgaggaaagcaaggttaatctctttggatgggcatggagcctgtatgaaaaggagcaagctctagaaatcgttgacccaagaatcaaagagttcagcagggatgaagccttgagagtcatccatgttgcactcatgtgcacccagggctcaccgcaccagcgacccccgatgtcaaaggtcgtggccatgctcaccggagacgttgaggtggctgaggtgatcatgaagccgagctacatcacggagtggctgcacagggaaggggacagcagctacttcacaaactacgcaggatctgccacccccgagttcagtgggcacaaagagagtgaactttcgtttatcagttag

SEQ ID NO: 4402 - DNA, 1872 bp, Oryza sativa
atggcgaagaagaactacggtcaagtgtacaacatcctcgggtggggcgacccctacttcaccgtgaactcccatggccacctcgccgtcaagccccatggccgcgacaccatgtccggccaggacatcgacgtccactccgtcatccacagagctctcgccaccaccatcaccaccaacgacggcgacaagaagccccagttcccgatgatcctccgcttccccgacgtgctcaagaaccgcctcgactccctccacgccgccttccatggcgccgtcgacagcaccggctacgcgtccaggtaccagggcgtgttccccatcaaggtgaaccagaacaaggccgtcgtccaggacctcgtcaccttcggccatggctacagctacggcctcgaggctggctccaagccggagctgctcatcgccatgagctgcctcgccaaggccaagcccggagcttacctggtctgcaatggctacaaggacgccgactacgtcgcgctcgcgctctccgcgcgcgccatgggcctcaacgccatcatcgtgctggagatggaggaggagctcgacatcgtcgtcgagcagagcgccaggctcggcgtcgagccggtcatcggcgtccgcgccaagcttctcaccaagattccgggacacttcggctccacggccggcaagcacggcaagttcgggatgctcgccgacaagatctacgaggtggccggcaagctgaagaagatggggaagctgcactggctgaagctgctgcactaccatgtcggctccatgatcccgaccaccgacatcgtgtacaacgcggcggccgaggccgcaggaatctactgcgcgctggtgaaggagcacggcgcgacggggatgaccacgctggactgcggcggcgggctcggcgtcgactacgacgggacgcggtcgggcagctccgacatgtcggtggcgtacgggctcgagcagtacgcgtccagcatcgtgcaggcggtgcggctcacgtgcgacgacaatggcgtcccccacccggtgctctgcaccgagagcggccgcgccatggcgtcgcaccactccatgatcatcctcgaggcgctctcggcgatcccggagccgcaggacgaggaggacacccatcaccggctgctcagcaagatccaggacctctcctccaagcagccaagaactgctcataccgtcaatggcggcggcggcgtggacgccatgcactcgcacgccgtggagctgaagaagcacgggatcgagatgtacaagctggcgaagaagctgtccaagagggtgaccggcgacgccaacggcatctacaactaccacatgaacctctccgtcttctccctcgtccccgacttctggggcatcggccagctcttcccgatgatgccggtgagccggctgaacgagaagccgaccatcaacggcacgctggtcgacatcacctgcgacagcgacggcaaggtagagaagttcatccgcgacgccgtgacgctgccgctgcacccactcgacgacgcggcggcggagcacggcggctactacgtggcggcgctgctgtcgggggcgtaccaggaggccctggcgtgcaagcacaacctgttcagtggccccacgctcgtgcgcgtcgagagcgccggcggcggcggcgcgttcaagatcgtctccgttgagctcggcccgacggcggaggaggtcatcggcacgatgaggtacgacgtgaagaacgacattagcgatgtgatcgagaaggttgcgacggagaatggcgtgtggccgatggttgagccgctgatgaagaaagggctgaccaccatgccctacctcaacgattacaagccccccaaaaccaccttttaa

SEQ ID NO: 4403 - DNA, 1665 bp, Oryza sativa
  misc_feature (1)...(1665): n = A,T,C or G
atggcgacggcggcgaccctcccctcctcctcctcctccgccgccgccgcggtccagaccatatcccgcgtcctctccttcccccgccgcggcggcgggggcttcctccacytccgccgccaccccctcgcggctgcggctgccgcaacccggggccggggcccgntcctccgcctyggcccgcgccgcccgttctccgcctycgcctccgccggggataacggggccgctgcgggcggcgatgggggtgggtgcgactacgactacgacctcttcaccatcggcgccgggagcggcgggatgcgggcktcgcgcgtcgccgcctccctctacggcgcccgcgccgccgtctgcgagatgcccttcgccaccgtcgcgtccgacagcctcggcggcgtcggcggaacatgtgtgcttcgtggctgtgtcccaaagaaactgctggtgtatgcatccaaatactctcatgagtttgaagagagtcatggctttgggtggaggtatggcactgagccaaagcatgactggagcactctgatgaccaacaagaatttagagttgcagcgcttggtgggggttcagacaaacatgctaaagaattctggggtcactataattgaaggccgtggaaaggttgttgatccacatactgtcagtgttgatggaaagctttatactgcaaaaaacatactcattgcagttggtggtcggccatccatgccagacattccagggatagagcatgttattgattcagatgcagcattggacctgccttcaagacctgagaagattgcgatagtaggaggagggtatattgctttggagtttgctggcattttcaatggcttaaaaagtggtgttcatgttttcatccgacagaagaaagtactgagaggctttgatgaggaggtcagggattttgttgccgatcagatgtctttgaggggtatcacatttcataccgaagagactcctcaagcagtaatgaaatcagacgatggcttgctgactctgacgacaaacaaaggaagcataaatgggttctcacataatttgggtctagaagaggttggggtcaaaatggacaagcatggtgctattgtggttgatgagttctctcgaacctcagttgattctatatgggctgtgggtgatgttactaacagggtgaacttgacaccggttgcattaatggaaggtggggcattagcaaggactatttttggcaatgaacctacaaaaccagattacagtgctgtgccatctgcggtgttttcccaacctccaattggacaagttggactcactgaagagaaggcgatcgaaaagtatggagatgttgatgtctacacatcaaacttcagacctctcagggccactctttctggtctacctgatcgtgtatacatgaaggttatcgtgtgtgctaatactaacaaagttctaggagtgcacgtgtgtggtgaagatgcacccgagattattcagggtattgcaattgctgtaaaggctgggttgatgaagcaaaactttgatgccaccataggtgtccacccaaccactgcagaagaacttgtcacaatgagaagcccgactaggaaggtccggagagatgctgtggatgaggccaaaatgaaagatgaggccacaagtcagaagtag

SEQ ID NO: 4404 - DNA, 3588 bp, Oryza sativa
atgcggcagcagcggcggcggccgtgctccggtgccgcgcggggcgggatcgccggccccatttctgctgggtttggcggggttggggacttacttgggtatcgagctgggagtgctaccaggaatgctgggatgaattcatattgtgataagaaagaggttactgtagcttttagcaaaactaaaaggcaagaggaggatgaagtgatttggagaatggtagaacaaggcgctacagatgatgaagagtgtggtggtaccaactgttcggctggcgaaaatagggatcctggttggcctggaacgagtgtcttcaggatgctgattcctgcaactaaagttggcgcagtaattggtcacagtggagaaaggcttagaagactgtgtgaggaaacaaaagcctgcgtccgagtaataggtggccactttgctgctgcagagcgagctgtaatcatttttgcaaaggaacaacctgatgagccaaaacctccagctattgatgcactactaagagtatatgagtgtataatcaatgatgatggtttagatgtgagatataacaatatagttgtggcacggattcttacaccaagtgaacaggcagcaagccttattggcgatcagggttcagtgattaattatatcaagaaagcttctaaaaccaacatccatgttattggtaactttcttactttgatgcacctcttggaaccactagttccttctattgataaatttgatatcagtggtctccaactctccatatatacagatgcggacggtgacttgccacctgttgcacttgaagatgatatgattattgaaatttggggactgcctgcaagagtgcatcaagcattggaacttgttgcttgtcatttgagaaagtacctggttcatcgaagtgtcatcccactgtttgacccccatgtgtctattccaatctcacctgtggatatgcccccattccactacagtgaccatcatgagggccttctgcacgaagctagtccaggctattactccctatatgctgaagcttttcaacttgaacacccatggactgatactagttattcaaggtatccaatggaaaactttacacatgctgacatatttgaatacagacaagaagcaccagtattttttgggagatatcggtcagtcacacctccacattatgggcatgaagcagaagcatatttatcatctccaatggaattatgtttgcataacaacctgaatacatatggatggcaagcaactccaccaattggtcgatcagatactgttgaaagaatacgctcccttatatctgtgtatggaaaacaggcacatccacatccgctgaggcagacatatcaatcaactaaaatggaaaaacatccacactcggggatatctttgtacagaagggatgatcatccaacaagggtatctccatcacctgctactgaactacccccatctcctgctgtttctgcatataaatggcaagtatctccatccttaaagatgtatccttcaactaatgtcgaaaaccttcaacactgccgtgtttctgcatgcgctccagaagaactgccaaatgtggttgtgccttcgttaactagtcaatctcctgcagtcacttctcaggttataatgaagatgcaagttccaattttctatgctgaagcggtaattggcccaactggtgcacgaattgattacattcgccaagccagcggatcaagcgtcgtgataaaggatcttgatgacagtgcaatgtctattgagatcactggaagtgctgcaacagatgttcaaattgcagagcagttgataaagaaattgactctgatccatgagttagaaatagaccttgatccatgggttagaagtctgagattatggtataggacaacaattttttggtggattcaggattttccacacaaatctgtacgccttttcggtctaaagaaaaattcagcatcgcgagctttgcttgatcatcctgctccatgtggccgcaggagcatcctacctggcgacgaggttggcgcgcatccacaagctcaagatgccatgcatcctgtgcacaaggatggatcatgcccttcatgggaagccatgcaaccgaatgatgtggttgacacaaggagatcgaaatccaggcagctgtgttcttgctgttcggagccattcaccaaggcgcgcaatgcgcataggatttctgagactgccagtgtttctggggagatcaaccgggaacaaatccctgcagatcattcaaaagataaggcctttgtggtgggtattgaggaggtgaatgaatctgatagttcaccacgaacatatgaacaatccacaaagaacaatggcgcttctggaaatgctgggactgcaaagctagcacccagtggatctactgtgcctatgcgcgttttcgtcgatcgcaacagcagcgtaaagaacggtttcataagtagggccaatctttcatcacctcggccatcacaaataatctctgccaaggacagcaattcaaccactcagcaagaagtgaaggcattcctttcacagatgtctactgtaaggggcattgacagttcttggagtgatggagctcctagccccggaatcaatgcgcaaaccgatgaaagcaatgccaatggcaggaggccatccctcgagaggaactattctgtgatagaaccatcggatgcgaacctcgctgatgaagttgagggagagagctctcctgagaacctgaagcggcttcttgagctcaacaagaagtcgatgagtgctctctacaaagagcttgaggaagaacgtagcgcttcggcgatcgcggctagccaagcaatggccatgatcaataagttgcatgaggaaaaggctgcaatgcagatggaggcactgcaatacctgaggatgatggaagagcaggccgatcatgaccacgaagcgattcagaatcttcacgacttgcttacggagagggagaaagaattacttgacatggatgctgagcttgagaacttcaggaggctagtccagaatgaacaattcaatggcgggaaacatgatatcgctggcataatgaatgaaacagacatgccgtttgaggtcttgaatgacttgggctacacgaagaacaccatgtcgggtttcgaagacgaaatggcgtatattttggaatcgataagcagattggaggataagctctgcgtctccacaaacagacttgcttctgacgatgccaaaattaatcaagagggattgataggaggggctgattttgggagctcaccaacgcatggtgaatcaacttctgatcagcaagatgatggaaacaaatctgttcagaaccataaggataactgttcttgttctcatccagaggatgggaaaacgagtgatgcaaatcttaaggatgaagtctcactgttgcatacgagattgcaggcacttgaagctgatcaggagtttcttaagcatgtgttaaactccctaaggtgtagccctgatggactgcagtgtgtacaggcgatagccagccatttactagagttgagaagaattgcaactcagagataa

SEQ ID NO: 4405 - DNA, 672 bp, Oryza sativa
atgggcctcaacccctccaagcgcgtggacgccgcgctccggggcgcgccggcgttcgccgccgcttgcgacgacgccttcggccgctgcctcgccgacgcccagtacgccttcgccggcgtccgcccctaccagctcgccgacgcgtccgcgcacctccactcgtcgctccggggctccctcccgctcgtccgccgctgggtgccctcgccgccgccgcgcgccsgcgtcgacttccgcgctgcgcgcccgcgggggctcgaggacgcggcggtgctctcgaggggccatttcagggatttcgccgccgagctgttcagggaggccgtgctcgccggcgcggcccaggcggcttttgttcgggccccggcaggcgccgccgggctcgtcggtgttggcctcgcgacccgcgccggggccggggtkgtagggaggtgtacatttgttcccttcatcaagcttcagctgcagaatatccaaaatttcagggcctctctaagctctcttcctgatacgggcagtaactgcggtgggcgtggcatagtgggcgcgtgtggcctccacgagcagtgcacggttgaaatgtatgatggcctgctcgttgaatgtggcgaccaatcgggctcgcgcatgcatgatggtggcctacgcaaggaggacactcgtccatga

SEQ ID NO: 4406 - DNA, 939 bp, Oryza sativa
atggcttcttggatcatcactcgatctacttggatcatgagtgtgttcttcgtcatcctatcattctttcaagggttggtaatggtgggcggcgtgacgttcacgttcacgaacaggtgcggcggcacggtgtggccgggggtgctgtcgaactcggggagctcggcgctggggacgacggggttcgcgctgggcgccggcgagacgcggtcgctggcggcgccggcggggtggtcggggaggttctgggcgcggacggggtgcacgttcgacgacgacggcaagggcacttgcgcgacgggggactgcggctccggcgaggtggagtgccgcggcgcgggggcgacgccgccggcgacgctggtggagttcacgctgggcagcggcggcggcggcgggaaggactactacgacgtgagcctggtggacgggtacaacctgcccatggtggtggaggcggcggcggcggggtgcccggcgaccgggtgcgtcgtggacctcaaccagcggtgccccgccgagctgaaggccggccatggccaggcttgccggagcgcgtgcgaggcgttcggcacgccggagtactgctgcagcggcgaccacggcaatccggacacgtgtcacccgtcggtgtactcgcagatgttcaagagggcgtgccctaggtcgtacagctacgcctacgacgacgccacgtcgaccttmacctgcaccggcaccgactactccatcaccttctgtcctcgacccggcaatcccaaaagtcagaaatcgagcaatgacccgtcgccgaggccgaaggatccgcagctggaggacgactcatggctggcgagcttggccaccggcgaggtcgacggcgcggcgccggcgtcgacgtcgttgttgctgcaagccacattagcagtggcagtaatggctttgcttgtgctacactag

SEQ ID NO: 4407 - DNA, 4863 bp, Oryza sativa
atgggttttgatccactggaatggtactgccagccggtcaatggcggggtgtggtcagatgtagagaatgcttttggtgcatacacaccatgtggcactgaaaccttggtggtgtgcatctcatactttgcactcttcggtgtttgcttctatcggatatggaggacgacgagggactacacggtgcagcgctacaaattgcggtcgccatactacaactatatgctcggcctgcttgtggtgttgtgcatagctgaatcactgtatcggatcgctactggcacctccataatgaacttggatggggagactagccttgctccatttgaggttacctcatctatcattgagattgctgcttggtgttgtatgcttgtaatgattgcacttgagacaagaatttacatctatgagtttagatggtacatccggtttgtggtcatttacatcttggttggggaagctgctatgttcaatcttgtgctttcagtaaggcagtattatagttcgagttcaatattttacttgtactgcagtgagataatattcaagctcttgtttggaattctcatggtggtttatctgcctagcttggattcctatccgggttatactccagtcaggcatgaggcacttgttgataatactgattacgaacctctgcctggtggggagcagatttgccctgagaggcatgctaatatattttccaggatattcttttcatggatgactcctctaatgcaacaaggatttaaaaggcccatcaccgataaggatatttggaaattagacagttgggatgagactgaaacattgtacaaccggttccaaaaatgctggaacaatgagcttcaaaaaccaaagccttggctgttacgggctctgcatagcagccttggtggaaggttttggctaggaggattttttaagattggcaatgatgcttctcagtttgttggcccactcatattgaacctcttgttggagtctatgcaaaaaggtgatccatcttggagcggttacatctatgctttctcaatcttcgctggagtgtcactgggtgttctttctgaagcacagtactttcagaatgtcatgcgaacgggtttcaggttgaggtcaacattgatcgcagctgttttccgtaagtctttgcgactaactaatgatagtcgaaagaagtttgcctctgggaggataaccaatttgatttcaactgacgcagaatctcttcagcaagtgtgccagcaacttcacagtctatggtctgctcctttccgcattgttattgccatggtccttctatacgcacaactaggccctgctgcattggtcggtgcagccatgttggttcttttgttcccaattcagactgttatcataagcaaaatgcaaaaacttaccaaggaagggttgcaaaggactgacaggagaatcagtctaatgaatgaaatattagctgcaatggatacggtcaaatgttatgcttgggagcaaagtttccagtcaaaagtgcaggacatccgtgatgatgaaatttcatggttccgcagcgctcaattgcttgctgcgctgaatagcttcatcctaaacagtatccccgttattgtcactgtggtttcatttggtgtatactctctgctgggaggtgacttgacaccagcaaaggcgttcacatcactttcactgtttgctgtcttaagatttccactttttatgctgccaaatctgataactcaggtggttaattgtaaagtgtcattgaaacgtctggaagatctcctcttggctgaagagagattacttctgcccaatccacctcttgatcctgagcttccagcaatttctattaagaatggatatttttcatgggaatcgcaggctgagagaccaacattatcaaacgtcaatctggatgtacctatgggcagtttggttgcaatagtaggaagcactggggaggggaagacttctcttatttctgcaatgcttggtgaaataccaccagtgtcaggatcgaatacatcggtggtccttcgtggaacagtggcttatgttcctcaagtttcatggatcttcaatgcaactgtccgggacaatatattgtttgggtctcccttccaacctccacgctacgagaaagcaatagatgtcacttcattacggcatgaccttgacttactcccaggtggtgacctaacagagattggagaaagaggagttaacattagtgggggacaaaaacagagagtctcaatggcaagagctgtttattctgattcagatgtctacatatttgatgatccactgagtgcattagatgcccatgttggtcgacagataggcacactttctggttgttatagagtaattgcgtcgataagatatggtacaccatttgtcacggtatttgacaaatgtattaaagaagagctacagcacaaaactagggttcttgttaccaatcagctgcattttctaccatatgtggataaaatactggtagtccatgatggtgtaattaaagaagaaggtacctttgatgaacttagcaactctggggaactctttaagaagctcatggaaaatgctggaaagatggaagaacagatggaagagaaacaggacgaaagcaaaagacaggatgacataaaacaccctgaaaatgggggcagtgtaatagctgatggtgatatgcagaagagtcaggacacttctaataaaacaaaacaggggaaatctgttctgattaaacaagaagaaagggaaactggagttataagtgcaaaggtcctttcacgctacaaaaatgcattgggagggatctgggtggtatctgttctctttttttgctatgcactcactgaagttcttcgcatttcaagtagcacatggttgagcgtttggacagatcaaggttctacgaaaatccatggccctggttactacaatttaatctacggccttctttcttttgggcaggttctagtcactctaacgaattcttattggctgatcacatcaagtcttcgagcagccaagaggttgcatgatgccatgctccggtctatattaagagctcccatggtattttttcacaccaatccacttggacgaatcatcaacagattttcaaaggatttgggtgacattgacaggaatgtagccatctttgtgaatatgtttatggcacaaatatctcagttgctctcaacatttgttctcattggcattgttagcactatgtctctgtgggctatcatgccacttctgattttattttatgcagcttacctctattaccagactacgtctcgtgaggtaaagcgcctggattccattacaaggtctcctgtgtatgctcaattttcagaggcattgaatggtctgtctacaatccgtgcctacaaagcctatgatagaatggcaaacatcaatgggaaatcaatggacaacaacatcagattcactcttgtgaacatgagttcaaacagatggctagccatccgtctggaaacattgggtggcatcatgatatggttcacagcaacatttgctgtcatgcaaaaccaacgagcagaaaatcaaaaggcttttgcctccacaatgggtcttcttcttacttacaccctcaatatcaccaatttgctcacggctgttcttcgtcttgctagtctggctgaaaacagtttaaatgctgttgagcgggtaggaacatacattgagttgccttctgaggctcctcctgtcattgaggatagcaggccacctcctggttggccatcatctggtgttgtcaagtttgaagacgtcgtgcttcggtaccgaccagaacttcctcctgttcttcatggcatatctttcatcattaatggcagcgaaaaggtaggaatagttggcagaacaggagctggtaaatctagcatgctgaatgctctgttccgtattgtggaactggaacgagggagaatattggttgatgattgtgacacttctaaatttggaatttgggacctacgaaaagtactaggaataataccacaggcacctgtcctattttcaggttctgttcgatttaatctggatccttttaatgagcacaatgatgcggatctctgggaagcgcttgaaagggctcatctaaaagatgtcataaggaggaatgctctgggactagatgctgaggtctctgaggctggtgaaaattttagcgttggacagcggcagctactgagtttagctcgtgcattgctgcggagggcaaagatacttgttcttgatgaggcaacagcagctgttgatgttcgaacagatgctcttatacagaagacaatcagggaagaattcaagagttgtacaatgcttataattgctcaccgcctgaacactgttattgactgtgacaggttgcttattctaagtgctgggaaggttttggagttcgactctcctgagaatcttttgagcaatgagcacagtgctttctccaagatggttcagagtacaggacctagcaatgcagagtacctgaagactcttgtatttggggatggtgaggagaggttgcgaaaggaagaaagcaagatgcaagatatccagaggaagtgggtagcatctaaccgatgggctgttgctgcgcagtttgcgcttgccgctagccttgcctcttcacacagtgaccttcttgcactggaggctgctgagggaaacaacatcctcaggaaaacaaaggatgcagtaatcactctacagaatgtcctcgaagggaagcacaacaccgaaattgatgatacactcgctcagtatgaggttccatctgataggtggtggtcatcgctatacaaagtcatggaagagtag

SEQ ID NO: 4408 - DNA, 2370 bp, Oryza sativa
atgggcacggcccatttatcgcacctccagtacatgggccgcctccgtgggaaagtgtgggtgtggcgacgatcggcttcggggacgcgtctgggctcagagcgtgttctgagaaggcaggttaggcgatttgattctgtacgaagcaccacggcgagagctcagaacgggaacgctgggagaagcatgaccgaggaaagaggatgtacaatgtctgatactgaaatgccatttaaatattcctctggtaaagccttcccattaggagtgtctcaagttgaaggcgggctgaacttcgcacttttctctcagcatgcttcttctgtcattctctgcttaaagcttcctgggaggggaactgaagatgagaaaggtgcagatgttgtcgagtttgttttagaccagcagaagaacaaaactggggatatatggcatgtgatagtggagggcttgcctgcttctggtgttctttatgggtatcgtgttggtggccctcaaggatgggaccaaggccatagatttgatagcagcactgttcttctggacccttatgcaaaattagtttctggtcgaaagtactttggggttgctgaagagaagtcaagccagcattttggaacatatgattttgatagctctccttttgattggggtgatgactacaggcttccgaatttgcctgaggcagatctagtcatatatgaaatgaacgtccgtgctttcaccgcggatgagtcaagtggccttgattcgacttctcgtggaagctatcttggtctcattgataaaatccctcatttgctggaacttggcgttaatgcagtggaactacttcctgtttttgagtatgatgagctggaattcaagaggtaccccaacccaagggaccacatggtcaatacatggggctattctacgataaacttttttgcacccatgagccgttatgctagtgccggtggtggaccagtggctgcttccaaagagctcaagcagatggtcaaagaattgcataaagctggcatagaggttattctggatgttgtttacaaccatacaaatgaggcggatgatgctcacccgtatatgacttctttccgtggcattgataacaaggtctattacatgttagacctgaacaaaaatgctgaactactgaacttctcaggctgcgggaatacactgaactgcaaccatcctgttgtcaaggagctcattcttgacagcttgagacactggtatggacaacttgcagctaagatttttctcataaatccaattgtgtgtagattcatccatatttctttgtttcatcttgactatgtcggcattattcataatcaagtgtcaaaaaatatctatatcgatttgagctttcatgttgatggttgtcctcttgatgcacctccactcatcaaggaaattgccaaagatgctgtattatctagatgtaagatcattgctgaaccttgggattgcggcggcctttatctcgtagggcgtttccctaactgggacaggtgggctgaatggaacggcaaatacagagatgatcttcgaagatttattaagggtgaccctggtatgaagggggtgtttgcgactcgtgtgtctggatctgctgatctctatcaggtgaacgagcggaagccttaccatggtgtaaattttgtgattgcacatgatggatttactttatgtgaccttgtttcttacaacttaaagcacaatgatgctaatggagaaggtggctgtgatggatgcaatgacaactttagctggaactgtggtgttgaaggagaaacaaatgatctgaatgtgttaagtctgcgttcaagacaaatgaaaaacttccatgtagctttaatgatttctcagggcaccccaatgatgttgatgggcgatgaatatggtcatacacgttatgggaacaacaatagctatggacatgatacttgcattaataatttccaatgggaacagttggaacaaagaagagatggccatttcaggtttttctcagagatgataaagtttcgtcacagcaacccaatattaagacgagacaggtttcttaataaaaacgatgtcacctggcacgaggattgttgggagaaccaggaaagcaaatttttggcattcacagtacatgatcacaactctggtggagatatctatttggcattcaatgcacatgactattttgtggacgctgtaattcccccaccaccacaccataaatgttggaaccgtgtggtggataccaacctggaatcaccaaatgatattgtaccagaaggggtgccatttacaggaccaaaatacagaattgctccatactcttccattctgctcaaggcaaagccttag

SEQ ID NO: 4409 - DNA, 744 bp, Oryza sativa
atggaggaccggcatgtggccaaggtcgccctcggcggagaccccaaagtggccttttttggtgtattcgatggccacggcgggaagagcgcggcggagttcgtcgccgagaacatgcccaagttcatggccgaggagatgtgcaaggtggacggcggcgacagtggcgagactgaacaggcagtgaagcggtgctacctgaagacggacgaggaattcctcaagagggaggagagcgggggcgcctgctgcgtcaccgctttgctgcagaaaggtggcctcgttgtgtctaatgccggagattgccgtgccgtgctcagccgcgccgggaaggcagaggcgctcacctctgatcaccgggcctcgcgcgaggatgagagggaaagaattgagaatctgggtggattcgtggtgaattaccgaggaacatggcgagttcagggatccttagcagtgtcaagaggcatcggtgatgcacacctcaagcagtgggtggtgtctgatccagacaccacaactctgggtgttgattcgcagtgcgaattcttgattcttgcctctgatggtttgtgggacaaggtggagaaccaggaggcagttgacattgccaggccgctttacatcagcaacgacaaagcttctcgcatgactgcttgcaggaggctcgtcgaaactgcggttactaggggctcgactgacgatatcagcattgtgatcatacagctgcagcaattctcaagataa

SEQ ID NO: 4410 - DNA, 1773 bp, Oryza sativa
atgtgcgggatcctggccgtgctcggcgccgccgactggctgaagcacaggggacccgactggtccgggttgtaccagtgcgagggaaacttcctcgctcagcagcgtctcgccatcgtctccccgctctccggcgaccagccgctgtacaacgcggaccggaccatcgtcgtcgtggccaatggagagatctacaaccacaagaagatcaggaagcagttcgcctccaagcacacgttcagcaccggcagcgactgcgaggtcatcatcccgctgtatgaggagtacggcgaggacttcgtcgacatgctggacggcgtgttcgccttcgtcctctacgacacccgcaccaagacgtacatggccgcccgcgacgccatcggcgtcaaccccctctacatcggcaggggcagcgacggcgccgtctggatatcgtccgagatgaaggcgctgaacgaggactgcgtggagttcgagatcttccctccgggccacctctactccagcgccgccggcgggctccggcggtggtacaagccgcagtggttcgccgagaacgtcccggcgacgccgtaccagccactcctcctcagagaggccttcgagaaggccgtcatcaagaggctcatgaccgacgtgcccttcggcgtcctcctctccggcggcctcgactcctccctcgtcgccgcggtgaccaagcgccacctcatcaagactgaagccgccgagaagttcggagctgagctccattccttcgtcgttggccttgagggttcccctgacctgatagctgcacgagaggtcgctgaccacctaggaaccatccatcacgagttccacttcactgtccaggatggcatcgacgcgatcgaggaggtcatctaccacgacgagacgtacgacgtgacgacgatacgggccagcacgccgatgttcctgatggcgcgcaagatcaaggcgctcggggttaagatggtgctgtccggtgaaggctccgacgagctcctcggcggttacctctacttccacttcgcccccaacaaggaagagttccacaaggagacctgccgcaaggtgaaagcacttcatcagtatgactgtctgcgtgctaacaaggcgacgtctgcctggggactggaggtccgtgtgccgttcctcgacaaggagttcatcaacgtcgccatgagcatggaccctgagtggaagatgtacaatgctgatcttggtcgcatcgagaagtgggttatgaggaaggcgttcgacgacgaggagcatccttacctgccgaagcacatactgtacaggcagaaagagcagttcagtgatggcgtcggctacaactggatcgatggcctgaaggctttcaccgagcagcaggtcagtgatgaaatgatgaagaacgctgccaaagtgtacccgcacaacacgcccgtcaacaaggaggcgtactactaccgcatgatatttgagaggctcttcccgcaggaatcggcgagggagacggtgccgtggggcccgagcatcgcgtgcagcacgccggcggcgatcgagtgggtggagcagtggaaggcgtcgcacgacccatccggccggctgatcgcctcccacaactccgcctccgcctccgccaaccacaccaaccacgcaaacgccaacgccaacggcaacagcaacggcaaggccaacggcaactgcgcgatggcggccaacgggacgaacggcgtcggcctggttgtggccaacgggacagccaacgggaagatggaagcataa

SEQ ID NO: 4411 - DNA, 3684 bp, Oryza sativa
atggcgaggcacgaggcggcggccggggtggtggacttccacctgcccgacgagatcctggctgtgatccccaccgacccgtacgagcagctggacgtggcccggaagatcacctccatggccatsgcctcccgsgtttcccgcctcgaggccgacgcggcgcgcttccgccgcgacctcgccgaccgggaccgcgccgaggccgacctccgcgcccgcctcgcggactccgacgcccgcctcctcgccgccctcgacgagaacgcgaagctggcgaaggagagggactcgctcgcctccacggccaagaagatggcgaggaacttggcgaagttggaagcatttaagaagcagttgatgaagtcactgagtgaagacaatttattacaattgtcagaaataggtgatgaccgtgattttgatgcaaacaacaatttgactgctcgagttccctcttggaaagaacatcagttctcagtcacaccatacacagctcctaaattaactcctggttcaacacctaagttcttatctggtccaacatcacctacaaaatctctgtcagaagtccactcaacattttcatcatggcatggatcgtcaagccatcagtattcagcacccacctcccctcctcagcatcgttcgttcgcagggcggccccgtatagacggaaaggaatttttccggcaagcacggacacgactttcgtatgagcaatttggggcatttttagctaacatcaaggagttcaatgctcagaaacaatcacgagagctgaaaagctccaaacaaagtctaaataataagaggctgacatgtcggtcccacgtgattcgccgtaggcgcactgaagtcgaggccccacatgtcatacacctgagagatgagtgcctcacggccccagctccattcccccccttccgccggccgatcccaccaccaccaccaccatgrccrccgcctccacctccggcgacccaccggccgccgccggcgagcccaaggccgtcgtcctcagcatccgcgcagccacggcagccggcgtcccgcatatcccacatcgtgcgcacctacctggacctctcctccaaccccaagaagcgccgcgccgctcccaagagccaccccaagcccgccgccgccgccgccggccaaggcgcccccgatgccggagacgggaaggacggcggcgggaaggcggcggcgaccccatcgtcggcggcgcagcccacgaccacgcggctcctccgcgagctcggcgtccgggtctcccgctacacgcacgaggagcgccgcgacatcgtcctccgctacatgcagaagcggagcggccgccagggcgtcaagcgcgccaccgccaaggccccatcgaggcaggctctcgcggagcggcggcggcggggtgcgagagggcagttcctcggcaaggagggcgccaagactgtagataaaccagaagaagatccagaggtgccgccagaagttattgctaacgctggaggagtgcccatagttggaatggttttcgagaatgaagagaaagcatatgagtattatgctagttatgctggaaatgtaggattcagtgttcgaaaaggattgtgggataaaacggtgaaaaatgttgctaggtcaagggtctttgtatgctctagggagggatttcgctcaaagaatgaggccaaaagacctcgcccagagactaggacaggttgtcctgcacggatagctataaaattggtatccaatggcaagtaccgggtagcagaatttgtggaagatcacaatcaccagcttgctgcaccatttgatatagatatgctgaagtcagagagagtgttgaccaaggttcaaccaggaaaccgaaatgctagtaacattcctccaggatgcaagaattacattcgggccaagtcttcaacacacatgaattcagaggaccttggagctctaatggattattttcgaagaatgaagagtgataatccctctttttactatgccattcaggtggatgaaaatgataaagcaacaaatgtcttctgggctgatgcaagatcaatagtagactatcattatttctgtgatgtgatctgctttgacacaacacacagatcaaatgactgcagaaaacccttagctttgtttttgggtatgaaccatcataggcaaacaatcatatttggctctgcttttctgtatgatgaaactgttgaatctttcaagtggcttctcgagacctttaagagtgccatgtgtgggaaacagccaaagacgatattgacagatcgatctgctgctttgaaggaagccctgagtctcacctggcctggtacaattcaccgttcttgtgtgtggcaaatataccagaatgcttttaagtccttagaacatgtttttaatactcttgaggaattcacacatgattttcaccactgcatgtttgatatcgaggatgaccaggagtttgatgagatatggaatgtgataatcaagaagtacagcctcaaaggagaggaatggttaactaagttgtatgaagatcgggaaaattgggccttgccatataaccggcaaatattctttggggacattaaagggatgttacaagtagaaacttcttgcgttgggctgagagagttcttggattgtgagaaagatctctctaaattttttatgttctttgaaagctcaatggagaagaggaggcaagaagagatacaagctgattaccaagccagcgaaggggcaccaagaatatctctgccactgctatggcaagctgcaaaagtgtatacaccaatcatctttgagttatttagaaaggaatatgaactgtgtatggactgtatggcttatagttgtggggagtttggctctctttctgagtacatgatcactgttaagaataaaactaaagaccagcttgtgcggtttgactcatcagatggcacagttgcatgtacttgtaaaaaatttgaaaatgctggaatattatgttgccatatattaaaggtatatgagctgaggaatgttaaagagatcaggccgcagtattttcttaagagatggagaaaagatgcaaaggtggggtccaccgatgaaactaatagatttaattttgatagtggcacaaaatcttctgttccagaacgctatgcagctctgtgccgctcgttctacaagatagctgctaaggctgcagagaatgcagagacatttgcactgatggcaagccaatcagatcgacttgttgaagaagtagaacggattttgcaatctacactggcgaataagtcatccgtaggcccttccattaagaaccagttaactagtatggttcagaatgaatatctccttaatagtagcaatgaagttgagaaatctactggaaagaagaagactgaagtttatcgccataaaagtgctgtggggcattatatacttggtcagagctatgggcttggtacctcagagaatcttcataacaatttgaatcagtttggtcaggcttcctcacttccaaccatgcaacagcaggcatttcccggaaacaatcaattaacccaaggctatcctagtgatatgcatgcactacagtttgtaggggcaaatccccagatggagcatcagaatggtgatcaggggcagtcatcaataccagtgtgggattttctctga

SEQ ID NO: 4412 - DNA, 1338 bp, Oryza sativa
atgacggcagcccctccagctgagactaatggatacttgcgtgttcggtgcaatggcggattgaatcaacaaagaagtgctatatgtaatgctgttgttgcagctcgtataatgaatgctacattagttctaccagagcttgatacaaattctttctggcgggataaaagtggttttccaggtatctatgatgttccccattttctgaagactttaaaacatgatgttcatattgttacaagcctgcccgggattatgtcaaaagggaagactaagaagctcaaagctcataagattgtgccacctagagatgctccgctaagttggtatacaacattggctttggaagaaatgaagaagtatggggctatatatttaactcctttctcacaccgcttagcagaagatattgatgatccagagctccagaggttgagatgccgagtgaattaccacgcactacgatttaagccacatatcatgaaaattagcaatgagatagtgaacaagctacggtctgaaggccacttcatgtcaattcatcttcgatttgagatggacatgcttgcttttgctggatgcattgatatatttaccccagaagaacagaaaattctgatcgaataccgtgaaaaaaattttgcaaagaaaatccttgtttacaaggatagaagaatcatagggaagtgccccttgactccagaagaggtgggccttatccttcgtgccattggttttgacaattcaacccgtatttatcttgcatctggtgagatatttggtggtgatcgattcatgagtccatttagagcaatgtttcctcgcctagataaccacagttcagttggacctgaaaagctggaagaaaatactcgaggcttggctggatcagcagtagattatatggtctgtctcctgtcggatatcttcatgcccacgtacgatggtccaagcaactttgcaaacaacctcatgggccaccgcctctactatggcttccagacaacaattacaccaaacaggaaggcccttgctccaatattcatggacagggaggaaggccatgtaaccggttttgaggatcgagtcaggcaagtaatgttcaacacacactttggcggtccacacaagcgcattcatccagagtctttctatacaaactcatggcctgagtgcttctgccatatgaacccaatgaatccatctgacaagtgcccctcggatgatccacatgacgttctaggtggtcagttgcagaatgaagaaattgaagatgtagatttgaagaccactgacaagattgagtctattacccaaattgaagagactatgatttaa

SEQ ID NO: 4413 - DNA, 1032 bp, Oryza sativa
atggccatggagctctctaacctgacgaggtgccatctgccactgctcctgctcttcctgctggcaggatcctcctccatggctttgccagtgcatcctgcaatggacagggtgagatggcaggtcgacaaggtcaaccggcggggccattccatcgggctcgtcatgtcgtacatcgatgaggccactgctcttgaatcctccggctacttcagaccttggcatgtcctccccttcgttgacctctacggacgaaggtatcacatcgggagtattagaggtgtcaatgttatatatgcactgacaggacaacgcaggttaaatgcggctgtgactgtacagactctcatcgacgtctttactgtgtctggcattgttcattatggcacagcaggaagttctaatgattcaatgtcatttggcgatgtcagtgtccccaaatttgttgcttatacaagtgcttggacatggaagaagttcaaatcaccaaaagagtcggatacagaacttagctttggagattttactgtcccaaatggaggagagaatcttctaggagctctgaaattcagaaatgaggagctatactcagtgggtaagcctatgaaagaagttttctggttacctgtagattcagcatggttcaaaatcgcagaaggacttaaggtttcacttgaaagatgtaacgacactttctgcttgccaacaactccaaaagtagtctgtgggctaaaaggatcgtcagctgatatgtttctagacaatgcagaatataggaagttccttttcagagaatttggtgtatcaacagtagatgaggagagtgcagcagtggtgatgacaacaacatctcctggcatacctgtgattgtattccggggagtttctgatttggctggaggggagccaacatggtcgtcaacaagcctgatgaacctggcatctattaatgcactcaaagtggcagtggagtttattgctacagtcgggaaacagaagtcaacaatgtcagcaggaagtgctaataactga

SEQ ID NO: 4414 - DNA, 609 bp, Oryza sativa
atgaatcccgagtatgactacctcttcaagcttctgctcatcggagactcgggcgtcgggaagtcttgcctgcttctgaggtttgcggacgattcatatctggagagctatatcagtaccatcggtgttgattttaaaatccgcactgttgagcaagatgggaagacaataaagctgcaaatttgggatactgctggccaagagcgatttaggaccattacaagcagctactaccgtggtgcccacgggatcattgttgtttatgatgtgactgatcaggagagcttcaacaatgtcaagcagtggctgaatgaaattgataggtatgctagtgaaaatgtgaacaagctcttggtggggaacaagtgtgatctagctgagaacagagtggtttcttatgaggctggcaaggcccttgctgatgagattggaataccattcctggagaccagtgcgaaggatgcaacaaatgtggagaaggcattcatgaccatggcaggagagataaagaacaggatggcaagccaaccggctacaaatgcaagcaagcctgcaaccgtgcaaatgcgaggccaacctgttgcccagcaaagcagctgctgctcttga

SEQ ID NO: 4415 - DNA, 882 bp, Oryza sativa
atgggaagtgctactgctgattccagatctggtattaagctttttgaagcttgtatcaattcgaatctgaggtccttccttcacagtgttacgccaactttggagccctacaccgttgccaagccaggcggctattctggtagagtgcccgagttaggtagatgcttcttccttgtagacctttggaaccacttctacccgttgagcgcctatggtgtcggtactccggttcgtctcccttccggtcaggaaattgagcagtactttgtgccgtatctttcagccattcagttgcacaccatctcagacttcacttcatgcaacgagataatggtcggcaataacttgtttgatgcgaacaactacggctggtgcagtgcggcagataactggaatggtcagtatgcaacaacatcattagcgaggtatgacagcccgaggtcaatgaatggagggccatgttttcagtactttgaatgtgattccccttatgaaaggatgcctctcgcagacaaggtgtatgagctgtgctataactttccacccctatcatatcttagcagtattgagctctctccatctagttggatgtcagttttctggaaacattgtgaacattttattgtagatcgtacgccgtttgacagcaaggacccgctgacgcttcccccaattggcctcgcgacgcacaagacggacggagatgtatggacaagcgcgaactccggcgaccaagagctgaccacctccctcgtcggcgcggcggactcgtggctgaagaagcttgacgtccagcatcatgacttcaattacttcctcaacagtaacaggaacctgatccactacaggtccttgaccgaagcaagtaccagtgcagtttga

SEQ ID NO: 4416 - DNA, 740 bp, Oryza sativa
atggcgatcgctggcgttctcttcctcctcttcttggcacggcaagcctccgccgccgggtacggcgggtggcagagcgcccacgccacgttctacggcggcggcgatgcttccggcaccatgggcggggcttgcggttacggcaacctgtacagccaagggtatggcacgaacaccgcggcgctgagcacggcgctgttcaacgacggcgcggcgtgcgggtcgtgctacgagctgcggtgcgacaacgccgggagttcgtgcctgccgggctccatcaccgtgacggccaccaacttctgcccgcccaactacggcctccccagcgacgacggcggctggtgcaacccgccccgccctcacttcgacatggccgagccggcattcctccacatcgcccagtaccgcgccggcatcgtccccgtctccttccgcagggtgccgtgcgtgaagaagggtggggtcaggttcaccgtgaacgggcactcctacttcaacctggtgctggtgaccaacgtggccggcgccggcgacgtccgctccgtctccatcaaggggtcgcgcaccgggtggcagcccatgtcgcggaactggggccagaactggcagagcaacgcgttcctcgacggccagagcctctccttccaggtcaccgccagcgacggccgcaccgtcaccagcaacaacgtcgcccaccccggctggcagttcggccagaccttcgagggtggccagttcta

SEQ ID NO: 4417 - DNA, 3240 bp, Oryza sativa
atgaatttccacgaataccagtcaaaacaactgcttgccgagtacggcatcccggtcccggccggcaaggtcgctgcgaccccggacgaagcggttgccgctgccaactccctgggccagggcccctggatggtcaaggcgcagatccacgctggcggccgcggcaaggctggcggcgtcaagttctgcaagaccaccgacgacgtgaaggccgctgcggccaagatgctcggcaccaagatggccacctaccagaccgcaggcgttgaactgccggtcaacctggtgctggtgaccaccgccggcgagatcgtcaaggaactgtacctgtcggtgctggtcgaccgtggcaccaagaccatcacctacatcgcctcttcggaaggcggcgtggaaatcgagcaggtcgctgctgaaaccccggagctgatccactcgctgaacgtcgacttcgtcgaaggcgtgcagggccgccagttcgccagcatcatggtgaacctgtaccgcctgttcaacgaaaaggacctggcsctggttgaaatcaacccgctggccatcctggacgacggcaacctgtacgcgctggacggcaagttcgacagcgacgacaacgccgcgttccgccagaaggccctggtcgccatgcgcgacaagacccaggaagatccgaccgaagtgatcgcttcggagctggacatcaactacgtcaccatggacggcaacatcggctgcatggtgaacggcgccggcctggccatggccaccatggacgtcatcaagctcaacggcggcgagccggcgaacttcctggacaacaccaaggtgatcgtgcagggcttcaccggccagcagggcaccttccacgccactcagatgatcgagtacggcacccaggttgttggcggcgtgaccccgggcaagggtggcaccacccacatcgacctgccggtcttcaacaccgttgccgacgccgtgcagagcaccggcgccaacgcttcggtcatctacgtgccgccgccgtacgcggccgacgcgatcctggaagccgctgctgccggcatcaaggtcatcgtctgcatcaccgaaggcatcccggtgctggacatgctgcgcgtcaagaacgtgctgacccgttcgcatccggacaccgtgctgatcgggccgaactgcccgggcgtcatcaccccgggtgagtgcaagatcggcatcatgccgggccacatccaccagccgggcaagatcggcatcgtgtcgcgttcgggcaccctgacctatgaagcggtcaagcagaccaccgaagtcggcctgggccagtccacctgcatcggcatcggtggtgacccgatcaacggcctgaacttcgtcgactgcctgaagctgttcaacgaagacccgcagaccgaaggcatcatcatggttggcgaaatcggcggtgacgccgaagaagccggcgccgagtacatcaagaatcacgtgaagaagccggtcgtcggtttcatcgccggtgcgtcggctccggccggcaagcgcatgggccacgccggtgcgatcgcctcgggcggcaagggcacggccgaaggcaagttcgccgccatggaagctgccggtgtcgtcaccgtccgctcgccgggcgacctgggcgctgccatcgccaagctggctggattcccaatggcttcgatccgcatcgcgatggcgcagttcgacttcccggtcggcgatgtcgccggcaacaccgagcgcatcatcgagatgatcggccaggcgcgcgacgagtacggcgccgagctggtgatgttccccgagctggcggtgagcggttacccgccggaagacctgctgctgcgcccgggcttcctgtacgagtgcgagcaggcgatgacccgcatcgctgccgcctgccgtggcatcaccgccgtggttggctggccacaggcggccggcgcggtggtctacaacgccgccagcgtgctgcgcgacgggctggtcgaacagacctaccgcaagcgtgagttgcccaactacgcggtgttcgacgagcgccgctacttcgatgtcgatccggatggcggcagctgcgtgttcgaggtcaacggtgtgccggtcggcctgctgatctgcgaggacctgtggttcgccgagccgttggccgacaccgtgcgcgccggcgcgcagctggtggtggtgccgaatgcgtcgccgtacgagcggggcaagcatgcccagcgcgatgcggacgcgctggtgttcgatggcgcctcggtggtggccgatggcgacggtaccgtgcacccggccgccgccgccttcgtcgaccagtggctggtggtggagtacgacggtgaaacccgccgcttcatgccgcatgtgtggatggacgatggtgacgagagcatggacgcgctggcctggcgtgccgtgacccgtggcatccaggactactgccgcaagaacggcttcaagaaggtgtggctgggcctgtccggtggcatcgattcggcgctggtgctggccatggccgtggacgcgatgggcgccgagaacgtcaccgccgtgcggttgccgtcgcgctataccgcaggcctgtccaatgacctggccgccgagcagtgccaggcactgggcgtgaagctggaggcggtgtcgatcgagccggcgttcaagggcctgatggaatcgctggcgccgatgttcgagggcaccacgccggacgtgaccgaagagaatctgcagtcgcgcagccgtggcgtgatcctgatggcgctggccaacaagttcggcggcctgctgctgaccaccggcaacaagagcgagtacgcggtcggttacgccaccatctacggcgacatgtgcggtggctatgcgccattgaaggacctctacaagaccgaggtgttcgggctgtccaagtggcgcaacaccgtgggcggcgcaccggtgatcccgccggcggtgatcagccgcccgccgtcggccgagctgcgcgagaaccagctggaccaggattcgctgccggcctatgacgtgctggatggcatcctgtaccgctacatcgatcaggagcagtcgcgcacggagatcgtggcggccggttacgacgcgaccgtggtcgaccgcgtgcttcgcctggtgcgcatcagcgagtggaagcggcatcaggccgcgcccgggccgaaggtctcgcgccgggcgttcggccgtgagcgtcgttacccgatcagcaacggctacaagggctga

SEQ ID NO: 4418 - DNA, 3342 bp, Oryza sativa
atggagataccggcggtggagtcgtcggcggcggggaggatgccgccgaggatcaggcggcggttgctggaggggagccgcgtcggaggcggggcgccgacgagcgcggaggagatcgaggcgaagctgaaggaggcggagctccggaggcagcaattccatgaatgggtgtcctgcaaagcgaggaagaagccgcggagcccatcatggtcatcacaagaggaagatcaaggtcagcgcctcgaagcgaagcttcaggccgccgagcagaaaaggttgagcctcttggcaaaggcacagaacaggctagccaagttggatgaactccgacaagcggcgaagaacatcgtggaaatgcggatcgagaaagaaagggaagaactcgggactcgagtcgagtctcgtgttcgtcaagcagaggcaaatcgcatgcgtcttttgcatgcacatatgcagaagcgggcggcaatgaaggagagaacggcgcggtcccttgtgcggaaacagacatctgagaggaaatacacggagcgagtcaagtctttgatcttacaaaagcgcaatgctgctgaaaagaagcgactggcattgctggaagctgagaagaggaaagcccaggctaggattttgcacatccaacgagctgccaagactgtatgcagcaagagagaatcagagaggagacagttgcaagaacagctagaaagcaagcttcagaaggcaaaaaggcagagagctgagtacttgaagcagcgggtaagtccccgtagttctgcccatgctgattacatcaagcatgcagaatttctttcaacaaagctggcaagatgctggaaaagatttttgaaatctaacaagacaacatatgcactggttcaagcttatgacgccttgggaattaatgagatgtctgtcaaatctatgccatttgaaaatttagctatgttgatggaatctccaacgactctccagaccaccaaggcagtgcttgaccggttcgagaaacgtttgcttctttctcagccaactggttcatcatcagccgagaacattgatcaccttctgaaacgccttggatctccaaagaggaaggcacctgctagcagatctagggtagctgcgaaaaagccagcgaagggttccgagacaagcaagctttctagatactcactgcgggtagtcctctgctcttatatgatactggctcatccaggtgctgtattaagtggacaaggggagaaggagaatctacttatggagtcagcagaaaactttgttaaggagtttgagctattggttaagacagtacttgatagaccaggaggtgcctcgatgcaatcgactgatgctgccagtcagaaaaagttcaggactcagttggctgcttttgataaagcatggtgcgcttacctttaccactttgttgtgtggaaactgaaggatgccaaatcattggaacaagatcttgtcagggctgcatgcaagcttgagctgtcaatgatgcaaacatgcaagttaagttcagatgggcagtcacatgacctttctcatgatatgaaggcaattcagaaacaggttactgatgaccagaagctgttaagagagaagattcagcacctgagtggcgatgcaggcatcgagcggatgaactctgctctttcggatacaaggtcaaagttctttgaggcgaaggaaaacggaaatccattagcaacatctgttgcaaatgtatctactcctttgagcattaattcatctggacaggttccaaaccctacttccaagcctactgtggaaggatcaagtttcactgcccaatctttgcctggagctgcttcatcgtcaagcagtacatctccaatgaaaccgccgacggacaatgagcaaatggtcaatgagatgcttcatgaggacgatgtttcttttgctcgcaactctgataacgtcagttccgcggagaaggactttcaggccaaagtgaaagcaacgatggagaaagccttttgggatcttgttactgattcgatgagaggggacaaaccagattatagccaattaattaacctcgtaaaggaagtcaggaattcgttacatgagttggcctcaaatgagttgaaggaggaaattcttgagaacattgacctcgaaattttgtctcaggtgcttcagtcaggctcccaggacacgcgatatctggggcagattttgcagtactccctggatatggtcaggaaactatctgcccctgcaaaggaagatgacatgaagaggagtcatgagaaattgttaaacgagttggctgcaagttccgaagttaatgacaatggtatcagctcctttgtcattgctgtcatcaagggcctgcgtttcactctcgaagaaataaagcaactgcaaactgaagttagcaaggctcgcatccagctcatgcaaccaattattaaaggctctgccggagtggaatacctgcagaaggctttcacggatcgctatggacctcctgctaatgcatcagtgtctctccctataactaagcagtgggtttcggcaacgaagagcatcgtggaacaagagtggagctcacatttggagtctctccaagctttgccagcagatcatgctcagcacgttgttccggtacttcgagctggtcacggtgctccagcgccgcaggcttcttcgtctgcagctagcagttctggtctcccagaatgcaagggtgagaagatcgacaagctgacaagggttggcttgttgcaacttatcagcaatgtggagggcctgaacatgcagtcaacccctgagaccttccaaattaatctgctgaggttgagggctgtgcaagatcagtttcagaaggtgatagtgatcgcgacgagcatgcttgtcctgcatcaagttctgatgttgaagatcgctcctccggagctacagaataccatctcagagctctacgacgctctcgtgaagctcctcgacaacaacgctgacgcatcaacgaaggagatcgtggaggcgatgacgcgctctctggcctcggtcggctctctgccggaggaacagattcaggacacgacagagctagcaaccaagatgcttctcaagagcctccaggccggcgacatcgtcttcggtaaggtgtcccgggcggtctactttgccttccgcggcgtcgtcctcggtggcggcgccaagggcaagaagctagccgaagcgccgctgcgacgcctcggcgcggcgaagctcgccgacagggttgtcaaggccggggaggtgctgataaagatggcagtcatatcagagaaggtccatggacaatggtacaaggcgcttgccttgtga

SEQ ID NO: 4419 - DNA, 1614 bp, Oryza sativa
atgggtggcctctgctcaaaggtttcagcggtagacaagtccccgagcgacaccacgcttgttcgggaccagatagttgatcctgagcctgccttgacaaagcgggctaagtcgcctgtggttgaagaggcaacggcgaagcgggtggaagaccagcagcagtcttttgcattcttggagagcgttgttcccgggcttgctgtttacaatggtgcagatgccggtcaggccgggtctaggacaccacaactggcccggactctgtcgcagaaggctggtttgggcaagactaaggccggtgctgcaaaggtttcagaagtgagctcccttttaggcagggctggcactgttggtcttggaaaagcagtggaggttctagatacgcttggtagtagcatgtcaagtttaaatactagcagtggttttatatcggcagcaaagggagataaaatatctattttggctttcgaggtggcaaatactattgttaaaggttccaatctaatgcgtgcactctcaaagaccaacataaagcacctcaaagaagtggtgctttattcagaaggtgttcaacaccttatatccaaagatatggatgaattacacaagattgcagcaactgacaaaagggaagagttagaaatcttttcaaaagaagttgttcgatttggaaatcgttgcaagaatcctcaatggcacagcttggaccgctactttgaaaagtgcagtttgatttctgccttgtatttaatgaaggaattatatcatgaattgcatactttggatagatttgaacaagactgtcgtcgtaaacagcaagaactggatggtttgggttcaagaggtgatagtctgcatatgctaaagcaggatgtcaagagtcaaactaagcatgttaaaagtctgaagaagaggtcactttggtccaagaatttggaagaggtgatggaaaagctcgtagacattgttcatttcttacatttggagatcaataatgcctttggcctcgctgacagtgaagcgccacaagaaccagctaaacaccacaatagattgggaccagcaggccttgcattgcattatgcaaatatcatcaatcagattgatactcttgtttctcgatcaagtttgatccctcccactacaagggatacactataccaaggtttgccactgactatcaaatcagctctccgttcgaagctacaatcctttgaactcaaagaagagcttacagcttctcaaatcaaagctgaaatggagaagactttgcgatggcttgtccctattgcaaataatacaacgaaatctgagctgaactgcaagctatcagggcagatggacttaacccgaatcgaaacactatatcatgctgagaaggaaaaggttgatggccatatccttgagcttgtcgtgtggctccatcatctcatcagtaaatccaaaaatgccaatggaggtgtaaggtctcccatcaagtctcccgtccgttcaccaacacaaaagggtatcaccttgatgccagacaagtcgaacagttcatcgccaatcctcacacaagaggataaggatatgctgaagaatgttaagttccggaaattcgtcctggaataa

SEQ ID NO: 4420 - DNA, 993 bp, Oryza sativa
atggatgccggcgcggaccagatcacggtggccccggtggccgccgcggacggcgaggaagtgctccccgagsgcaagatcggstacaagtcgctggtgatggccgtcggcagcacctcgaactacttcggcgtgccgggcgcgcgcgagcacacgatttccctgaatgccaccgaggatgccgagcgcttccgcctgcgcctgctgcgcttgctggcccaggccgagcaggaccgcgaggacggcgccagtcgcagcggcctggacgtcgtcatcatcggcggcggcgccaccggcgtcgagctggcagccgagctgcgcgaggcgtcgggcgcgccgcgcatcctggccccgctgcccgagcgcgtctcgggcgccgccacgcggctgctggaccagcgcgccatcaaggtcgtggcggactgccgcgtcgcatcgatcgacaaggaccacgtcaccgacagcaagggcaacgtctatccggccgacctgtgcgtgtgggccgcgggcattcgcgcgccggaattcctcggcacgctgggcctgtcgacgacgaagggcggccagctggacgtcgacgcccacctgcgcgtgcgcgacgtgcccgacgtgtacgcactgggcgattgtgccgcctgcacggacggcaacggcaagccggtcccgcsgcgcgcccaggctgcgcaccagcaggccgactacctgctcaagaccttcatgaacatggcgtcgggctacccgccgcaaaagcatccctacgtgtaccgcgactacggctcgctggtgtcgatcggccaccagaccaccgtcggcagcctgatgggctcgctgcgcggcgcgagctggttcgtggaagggttcatggcgcgcatcatgtacctgagtttgcacctgctgcaccacaaggcggtgctggggaccatgcgtactgggctgatggcgttcgggcgtttcctgattcgcaggacgacgccgctggtcaagctgcactga

SEQ ID NO: 4421 - DNA, 1269 bp, Oryza sativa
atgggcggcgccgccgcsgccgccgccgtggccctgctcgcggccactcgccggkgccccgmtgcgggcccgctggcgttcctcctccctcgygcggcccgcgcggggctccacgaggctgctgctccggcggcgaagaggaaaagggaggacccggaggagcygaggaggagagcagcagcagccgccttctcgggccggavatccccgacacctgggactcgcccccgggcgccgcggcgcggccgtctcccccgagcggcgccggaggtaaccggcgggcttgctgatgtgaagcttttgctaggcgtgcgcttcgtcgaccagtggtttcgccgggagatgccattcgaagtattcggatggttttgggttgattatgactccactgcgaccattattgatggcaagtctgtcgcggaagacataaggtttcagatcgctgaagaagttcgtcaaatgaaaaatgcagtggggcatgtgcctggcctagctgttgtattggtcggcgatagaagggactctgagtcatacgtgcgatacaaaattaagggctgtgaggaggttggaataaagtccttgttggcggagttgcctgggaactgtacggaagacgtagtggtggattctgtgtcaagattcaatgaagatccatctgttcatggcattcttgtgcaactacctctaccacaggatttgagcgctattagcctagagaaggatgttgatggtttccatccattgaatgttggtaatcttgccctcagaagccggaagcctttatttgtgccctgtgctgcaaaggcttgccttgagttattgctccagtctgggattgaactcatggggaaacatgtcactgtgattgggagaagcaaagttgttgggttgcccacttctttacttttacagagacaccatgccactgttagtattatccatgctttcacaacaaatccagaagagattacccgtcaatctgatattgtgatctcagctgctggagtggccaatcttgtaagaggaagctggttgaagaaaggtgcagttgtgatcgatgttggaacaaacccaattgaggatccaaccagtgattacggctatcgattaactggagatgtctgcttcgaagaagctgtgaagttggcctctgctataactccagttcctggtggtgtgggaccggtgaccattgcgatgcttcttgcgaatacacttgactcagcgaaactagcttacggcttagctactgaatcccctgaattgtaa

SEQ ID NO: 4422 - DNA, 1983 bp, Oryza sativa
atggcgcggagcggggagctccccaaggtctcggcggcggcgacggccgcggtgcggcacgaggggtggatgctgcggtacgggcggaggaagattgggaggtcgttcgtccgcacgcgctacttcgtcctcgacaacaagctgctcggctactacagaagcagcccaggacaacatgatgtaaagcatatcgttggagaatttgtggatgggcaggtgccagtgaaggcgcttcaaatagatggaaattgcagagtggaagacagagggcttaaaacacatcatggtcaaatggtctatgttctgtgcatatacaacaagaaagaaaaggagaatcatatcacgatgggtgcgcatgatatcgaggatgccctggtctggaaaaagaagctagagctccttattgatcagcaacaagacactatgacggctaaaaaccgcaaagcttttgcttcactggactttgacatggagtttggaggcccattatcattctctgatcgtgacagtgggcaagccctcctgattcggtacatgattggaccaaggagcctgatattgggctgtcagatcagaatgacaccaaccatgcttactcaagaaagaactggcggctacttagatgtcagaatggcaagaagctgtagccgagcaatgagagctgttggtgtggtggaagccacatgtgaatccatttttgggctaataatgagtatggatgtaacacgatatgagtgggattgtagcttccagtatgggagtttagttgaagaggttgatgttgtactgttccgatctactgagcatcagaattgtggtccccaaccaggatttgtgagggcgtttattgaaagtggaggttttaaaatttctcctctcaaatgcgtcaacgggagaccacgcactcaagttcaacaccttatgcaaattgatctaaagggatggggcgtcaactatttttcatcgttccagtactactctttgttgcagatgctcaactgtgttgctggattgcgtgagtacttttcccaaactgatgatattcatccagttccgaggattcctgtgatgagtactatggctactgtgtccaaattgaaaaaggataagaaactccaagaaactgacttaaagacaaaacaagctgattttggacaagtcgataacaaaaatttggatatgatagatgaagagtcagaagaagatgatgactatcaagttcctgaagctaatcttgaggaggcacctaccagatctgacagtgatgctaagtacacagatccaatagatttgtcttgtttttcgggcattattcgtcgggatgcaaatgagaaaagccgtaactgctggacagtacctgatagcaagctctttaaagttcgtagtgagagctttccacatgacaaatcaaaggttcccgcaacaaagtaccttatggagcttgtagcaatcgactggcttagggacataaagcgaatggatcatgttgctaggcggaaaggatgtgcagctcaggttgctgctgagaaggggatgttcacctttgttgtaaacattcaaattcctggatcaagccattacagcttggtcctctattttgttacaagaaccttggaaaaaggatcactgttacaacgttttgctgatggcgatgatgatttccgaaatagcagattgaagctcatcccatctgttccaaagggatcttggatagtgcgacagagcgtcggaagtaccccttgcttattgggaaaggctgttgattgcagttatatgcgtggtcaagagtacatagaagtagatgtagacattggttcctcagcagtggccaatggtgttctgggcttggtgtttggcgtcgttacgactttaatagttgacatggcttttcttatacaggtatgtatgctcagtggctccctcattttcttcagtctttactctccaagagcacccttttggctcagccgcagccaaaactaa

SEQ ID NO: 4423 - DNA, 1104 bp, Oryza sativa
atggcaatggagaggcttatctcttcgccgctcctcccgcgccggcctccccgcgccgccttctcccgcccgccgccctccctcgccgccgcgccaccccaccaccgcgccggcggtgcggcctccgggtacggctccaggccgcctctcgcctcgctcctcctctccaggcaccaccaccaccaccagcctccggtcctcgcggccaatcctgctgccgatgtggccgccggcgaggctgtccctcccgccaccgccaccgccagccggcgcttcctccagaaggtggcgtcggctgcggctgccactctgttggcgacgattgcactgacgctgatccagccggcgtgggcgccgccggcgttggcgtcgttccactcggcggcgaaggcgggaggtggcatcttcaagtcggagctgctcagcagcgcgtggacggggttcctggccggctgcctgcacacgctctccgggccggaccacctcgccgcgctggcgccgctgtccatcgggaggtcgcgggtggagagcgccgccgtgggcgcgctctggggctgcggccacgacgccggccaggtcatcttcggcctcctgttcctcagcctcaaggaccgcctccacatcgaggtcatccgaacgtgggggacccgcgtcgtcggcctcacgctgctcgtcatcggcgccctcggcatcagggaggccaccgaggtgcccacgccgtgcgtcgcgctggagaacggcggcggcggcggcggcgcgcaccgtggcccgctcgatgctctaccagccaccaggaagaagatcaccttcgccacgttcgccaccgggatcgtgcacgggctgcagcccgacgcgctcatgatggtcctgccggcgctcgccctcccgtcgcgcgtcgccggcgcggcgttccttggcatgttcctcgtcggcaccgtggtcgccatgggcagctacaccgtcctgatcggctcttgtacggaggcgctcaaggagagggttcccaggatcacggagaagctgacatgggctgcctcgctcgtggccatctccatgggcctcggcatcctcatcagccagtctctcggctttagcttgtactga

SEQ ID NO: 4424 - DNA, 410 bp, Oryza sativa
atggcgtcgtcgggggacagcagcggcaagcagcggagcgacgaggagtggcgcgccgtcctytccccggagcagttccgcatcctccgcctcaagggcaccgagttacctggaacaggtgagtacaacaagttctatggtgatggggtctacaactgtgctggctgtggaacacccctgtacaaatccacaaccaagtttgattctggttgtggctggccagcattttttgagggacttcctggagccataaaccgaacaccggatcctgatggaaggagggtagaaatcacgtgtgcagcttgcggtgggcatttgggtcacgtgttcaaaggagaaggcttcaagacgcctactgatgagcgtcactgtgtgaacagtgtttcgatcaagttcaccccggcctccta

SEQ ID NO: 4425 - DNA, 1155 bp, Oryza sativa
atggggatctacgaccgccggcaccatcccctcgccgccggcgtctggggagaccaccccttcatccgcccggacaccaccgccagcaccagcaacgccgccgccgccgccatggtcgtcgcgccgccgccgctaacagagcccaagttcgagagccagctagctctgcctctgcagcatggagacgatcaagacaacgctgcagctctgcaagaatcgccgaggcatgcgtcggacagcttcgagcaggaggcgtccaagcctcgagacaagatccagaggcggctcgcgcagaacagagaagcagctcgcaagagccggctacggaaaaaggcttacatccagaacctggagacgagccggatgaagctggcgcatctggagcaggagatcacccgagcaaggcaacagagcgcgtacatcaaccgcagcagcaacccagccaccctaccagcgcccatcgattcaggtgtggtgacgttcgaggtggagtacgcgcagtgggtggaggagcaggggaggcagacggcggagctgagggcgtcgctgcaggcggcggcggaggggccggagctccgggcggtggtggaggcggcgctggcgcactacgacaggctgttcgcggcgaagcktaaggcggcaaggcgcgacgtgttcttcgtgatgtccggcgtttggcgcaccggcgccgagcgggtgctcgcgccgcagctggagccgatgacggagcggcaggccgccgacgtgcaggggctccagcagaaggcgcgccacctcgaggacgcgctgtcgcagggcatggacaagctgaagcagacgctcgccgactcgctgctcgccgaggccgtcgtcgtctccacctcctgcgacgcctcgccgccgccgccgccgccggaggaggaggagccgtcgtcctccgccgccggtgacggcggatgctacatggcgcagatggggagcgccatgggcaggctcagcaacctcgtcgcgttcgtcgaccatgccgaccatctccggcaggagacgctgcagaacatgtacaagatcctgacgctgccgcaggcggcgcgcgggctcctcgcgctcggcgactactgccagcgcctccgcgcgctcagctcgctctgggcggcgcgcccgcgcgagccggcgtaa

SEQ ID NO: 4426 - DNA, 2358 bp, Oryza sativa
atggtttcaaagtcatatacaaatcttctagatatgagtggtgaagatgtgtttgactttcagcaaccatttagatcgcttcctcgttttgtgacttccccaagcatcacatctaatcctgattgggatacaagtaatgctgatgattcagttggtcctgcatcttgctgtgtaaggaaaataatcgtctccaactttcttccactaaactgtaccaaagatgaagctactggacagtggtccttctcaatggatgacaatcaacttcttgttcaacttaaagatggatttccaatggagagcgaagttgtttatgtgggtagcttgaacgctgaagttgatcctggtgagcaagatcaactttcacagaaacttttcagagaatacaaatgcatacctactttcctcccagctgacctccagcagcagttctatcatggattctgtaaacaacaattatggccacttttccattatatgcttcctatttgcctcgacaaaggcgagctctttgaccgctctctatttcaagcctatgttcgggcaaacaaaatatttggtgacaaagttatggaggccatcaattcagatgatgactgtgtgtgggttcatgattatcacctcatgcttctcccaacctttttaagaaaaaagcttcatcgcatcaaaattggtttcttccttcacagtccatttccctcctctgaaatctataggacactgccagtaagagatgaaattttgaagtctcttctgaatgctgatctcattggctttcaaacatttgactatgcccgccacttcctttcatgttgcagcagattgttaggccttaattacgagtcaaaacgtggtcacatcggtatagagtactttggccgtacgattataaatcctgcaagaagcactggaaaagatgtggaggaagcaataaatgaagccgtctctgtagctgaaaggataaacattaagtatggttctgctgagtacaagcctgtcatccttatcgactaccccataccttcttatgagaagattgcatactatgctgcatctgattgctgtattgtaaatgctgtgagggatgggatgaacttgataccatatgagtatactgtctgcaggcagggaaatgaggagattgataagctcagaggtgttgataagagctcacatcacacaagcacactaattgtgtctgagtttgttggttgctccccatcacttagtggtgctttcagggtaaatccttggagtattgaagatgtagctgatgcattatataaagcaatggatttgactcaatcggagaggaaattgcgtcatgataagcattatcgctacgtcaaaactcatgacgttgcttactgggcgcgcagtttttcccaagatctagatagagcgtgcaaggatcactatagccgaaggtgttggaccactgggtttggtttgaattttagagtcattgctctttctcctggatttagaaggctatctttggaacactttgcttcttcttataagaagactaatagaaggctgatatttatggattatgatggcacccttgtcccccagtcatcagtcaacaaagttccaagtgcagaagtcatttctatccttacaagcttgtgcaatgatccaaagaactgtgtgttcatagtcagcggaagagatcgtactaccctaagtgagtggtttgcttcatgtgataagcttggtattgcagctgaacatggctattttatcaggtggaacaaagaaggtgaatgggaaacaagctcctcagctcaagattgtgaatggaagaacatcgccgagcctatcatggaagtatacaaggaaacaaccgatgggtctgccatagagacaaaggagagtgggctagtttggcattatcaggatgcagatcatgacttcggttcatgccaggcgaaggagctagtgagtcatcttgagagggtgctggcaaatgaacctgttgtggttaaacgtggtcatcaaatcgtagaagttaagccccagggtgttagcaaggggattgctgtggacacagtcattcggacggtaatcaacaacgaaaacgcaccggattttctgatgtgcattggtaacgatcgatcggacgaggacatgtttgagagcatcaatgaagccgtctcacgttctgtgtttcctactgctccagatgtctttgcctgctctgttggccagaaggctagcaaagcgaagtactatgtggatgggtgcagtgaggtgatcagattactcaagggtgtaaccgccattacaccccgaagggaggtgatcagccagagtcaagtaacattcagggatatacttgaggttgtcagctga

SEQ ID NO: 4427 - DNA, 1605 bp, Oryza sativa
atggccgcggcgcctatgagcttcgcttttacgctgctcgcggcttgcatttccttcttgcaccacgcgccggccgccgccgcagccgctccggcgaaccagaccgccggctttctcgactgcctcgccgcgagcctccctgccggcgtcgtctacacgcacgcgtcccggtcgtaccagtccgtcctcgagtcctccatcaagaacctcctcttcgacacgccggccaccccgacgccggtcgcggtcgtcgaggccaccgacgcctcgcacgtccaggccgccgtgcgctgcggcttctgccatggcgtctccgtccgctcccgcagcggcgggcatgactacgagggcctgtcctaccgctccctcgacgcggcccgcgccttcgccgtcgtcgacatggcgggcggcgcgctccgcgcggtccgcgtcgacgtcctcggccgggcggcttgggtcggctccggcgcgacgctcggcgaggtgtactacgccatcgccaacaagacctcccgcctcgggttccccggcagcgtcggcccgacggtcggcgtcggcgggttcctcagcggcggcggcttcggcctgatgctgcggaagcacggcctcgcctccgaccacgtcctcgacgccaccatggtggaggccaaggggaggctcctcgacagggccgccatgggcgaggacctcttctgggccatccggggcggcggcggcggcaacttcgggatcgtcctgtcctggaagctccggctcgtccccgttccggccaccgtcacggtgttcaccgtccaccgctcaaggaaccagtccgccaccgacctcctcgccaagtggcagcgcgtggcgccgtccctccccagcgacgccttcctccgcgtcgtcgtgcagaaccagaacgcgcagttcgagtccctgtacctcggcacgcgcgccggcctcgtcgccgccatggccgacgccttcccggagctcaacgtgacggcgagcgactgcatcgagatgacgtgggtccagtccgtgctctacttcgcgttctacggcacggggaagccgccggagatgctcctggacaggggcaccggcaggccggacaggtacttcaaggccaagtccgactacgtccaagaacccatgcccagccaggtctgggagaccacctggagctggctcctcaaggacggcgccggactgctcatcctcgacccctacggcggcgagatggctcgcgtcgcgccggcggcgacgccgttcccgcaccggcaggcgctctacaacatccagtactacgggttctggtcggagagcggggaggcggcggcggcgaagcacatgggctggatcagaggggtgtacggggagatggagccgtacgtgtccaagaaccccaggggcgcctacgtcaactacagggacctcgacctcggcgtgaacgacgatggcgacggcggcggcggcgtggcgagggcgaggtatgagaaggcgacggtttgggggagagcgtacttcaaggccaactttgagcggctcgcggcggtgaaggccaaggtggatcctgacaactacttcaagaacgagcagagcattccaccacttccgagttag

SEQ ID NO: 4428 - DNA, 5232 bp, Oryza sativa
atgaaccagacccgcgtattcctcatttttgcctggctgatggtggccgtgctgctgtggatggagtggagccgtgaaaaggctgctccgaccccggcaccgacgaccacgtccgccccggctgccgcacagagtgttccgggcgctgcctcgggcagcattcccagtgcacaggtcccgggcgccccgggccaggccgctgtgcaggcgcaggccagtgccaccccggccagccagcgcgtgaccgtcaccaccgacgtgctgcgcctggtgcttgatggtggccgcgtgctcgacgccgagctgctgcagttcccgcagaccaaggacgaaggcagcccgccggttcgcctgctgaccgaagaccccgcgcatccgtacagcgcgatcagtggctgggccagcgaagacaagaacaccccggttcccggcgccgacggcttcaagctggtcggtgacaccaaggacttcgtgctggccaagggccagaacgagctgcagatcccgttcgtgtggaccgccgacaacggcgtgaccatcaagcgcaccctgaccgtctcgcgcaacgagtatgccgtgcgcttcaaggacgaagtcagcaataccggcgccgcgccgtggaacggctacgtctaccgcaccctggaccgcaccccgaccatcctgtcgcggagcatgaccaacccggactccttcagcttcaacggtgccacctggtacgacaacgacaagaagtaccagcgtcgtgcgttcaaggactacctggaagacggcacgctcaaccagaacatcaccggcggctggctggcgatgctgcagcaccacttcttcaccgcctggatcccgcagaaggaccagaccgcacactacgtgctgtcgcaggtggccggtcgtgacctgatcgaagcgcgtggcccggccttcaccgtggcgccgggccagtccaccagcaccgaagcccgcctgtgggtcggcccgaagctggtcaacctgattgccaaggaagacgtgccgggcctggaccgcgtggtcgactacagccgcttctcgatgatggcggtgatcggccagggcctgttctgggtgctgaaccaggtgcacaagctggtcggcaactggggctgggcgatcgtcggcctggtggtgctgctgaagctggtgctgtacccgctgtcggcgacccagtacaagagcggtgccaagatgcgtcgcttccagccgcgcatcgcgcagctgaaggaacgctatggcgatgaccgccagaagttccagaccgcgatgatggagctgtacaagaaggaaaagatcaatccgatgggcggctgcctgccgatcctcatccagatgccgatcttcttcgccctgtactgggtgctggtggaatcggtcgaactgcgccaggcgccctggttcggctggatccaggacctcactgcacgcgacccgtacttcatcctgccggtgatcaacgtggcggtgatgtggttcacccagaagctgaccccggcaccgggcatggacccgatgcagcagaagatgatgcagttcatgccgcttgtgttcggcgtcatgatggccttcatgccgtccggcctggtcctgtactgggtggtcaacggcggccttgggcctgctgcagcagtggtggatgaccaagcgccatggcggcgagccggtcccggccaccaccgcgccggccccggtcaaaaagaagtaatccgaccggcagcgggctgtggcgacaaggacgcgaaggtgccggcgagcacggtcacccagcccagcgcgcaggccgccgccgctgccgatccggccgccgcgccgttgctggccgcgctgcagaagcaactcgatggctaccgccggatcatcgtgctgctggccgacgaggagcagcagtcgaccgccgaccgcggcacctccacgcgtgtgggccagcagctgttccacgatggcctggaacagcgcacgaccatcgccgcgcagttcgacaccctgctgcgcgattccagcccgcagcgctttgccaccctcggcacggtgctggactacatcgagtctgcgccggaactgttcgacgccgatcgcctggccttccgtgaagtgctgcgtgacctgcatgagcgggtcggcaccgattcctcgctgccggcggtgaagctgcaccagcgcatcggtgaggatctcgaagcgctcgatgagatcgagcgcaactacaaccaggaactgacccgcatcttcagccgcttcgagcgcacccgcgccatcgaactgaagcgcgagaagtgggacgactacatcgcccacctgcacaaggactacagccgtgaagcgatcctgcgcgactacggggacagcgaccgtgagatcttcggccgcgacctgccggccaagacggtggtgctgaccttcgacgatggcccgcacaaggcctacaccgatgaagtggtggccatcctcaagcgctacgacgtgccgggcgtgttcttcgaggtgggccgcaacctgggcaaggtcgaggccgatggcaaggtcagcctcggcccgatggcgaagatcagccgcaacctgatggaagaaggctatgcggtcggcaaccacagcctgacccacgcccagctgtcgcgcaccaccggcgacgccctgcgccagcaggtgctggacaccgacacgctgctgaaggatgtcgacagcaagcgcgcgccgctgttccgcttcccgtatggtgcgcgcaatgccgaaggcctgcagctgctcaacgaggccgggctgaagtcgatcatgtggaacatcgactcgatggactgggccgacccggtgccagagtcgatcgtgcagcgcgtgctggaccaggtgaacaaggaacagcgcggcatcatcctgttccacgatatccacgatcgtgcagtgaaggcactgccgcagatcctcgaccggctgatcgccgatggctaccagttcgccggctggaacggccgcgacttcactgtcgcccgtgcgcgcaagggcgataccggtgccgcgaccgtcaccaccggctacgagaagtcgtgggcgatcgtggtcggcatcgacaactacgccaaatggccgaagctggaatacgccagccatgatgcgcaggcggtggccgataccctgaccgggcagttcggcttcccgtcctcgcaggtgatcgtgctgaagaacgagcaggccacgcgcaacaacatcctggccgcgttccacgaccgcctggccgatgaccgcaccgggaagaacgaccgcgtgttcgtattcttcgctggccacggcgcgacccgccagctcgcctccgggcgcgatctcggctacatcatcccggtcgattcggatccgaaggaattcgccaccgacgcgattgcgatgaccgacatccagaacatcgccgaaagcatgcaggccaagcatgtgatgttcgtgatggatgcctgctacagcggcctgggcctgacccgtggcggcccgtcgtcgtcgtcgttcctgcgcgagaacgcgcgtcgcagcgcccggcagatgctgaccgcaggtggggccgaccagcaggtggccgatgccggcccgaatggccactcggtattcacctgggtgctgctgcaggcgctggctggcaagggcgatctcaacggcgatggcctgatcaccggtaccgagctggccgcctacgtggcgccggccgtctcagccgtttcgcaccagatcccggccttcggcagcctgccggggtcgcagggcggcgagttcgtgttccaggtgcccgacagccaggaattcctcaacgccgatacgcgccagctgactgccgatgcgatcgcgctgaacaacaaggtggatgccgccagcgaggccaagggtgcccaggcaccggtgaccgtggctgacctgcagggcggcaaggccaagctggtgttgtatcgcgagaaacagtacgacgaggcggctgcgcagttcaccgaggcactgaagctgcgcccggacttcgcccaggccgccaacaacctcggcttcgtctactaccgtcagcagcgctacgccgaagccgcacgctggctggagaacacgctgaagatcgatccgtcgcgtgcggtggcctatctcaacctgggcgatgcctacttcaacgccggcgacaaggccaaggcgaagcaggcctacacgacctacctggcgctgcagccgcagggcagtgcgattgccaatgcgctgggcgcacctgcattgcgtccgcgccacgcgcactacgcgcgcctgcgtgatgctgacggcgacgtcatcgacgatggcatcgtgctgtggttcccggcaccgaacagcttcaccggcgaagaggtggtggaactgcagggccacggcagtcggtcctgctgcagcaactggtcgcgcgctgcatcgcgcgtcgtgcgcgccaggcgcggccgggcgagttcagcgaacgtgcggcgtgggctggaacaggcgcgcagtgatctggacctgctgcgccgcgacgccgaacgcggccgtcgcctgcgcgacggcctgcatgcggtgctgatcggtccgccgaacgcgggcaagagttcattgctgaacgcgctggccggcagcgagcgcgccatcgtcaccgacatcgccggcaccacccgcgacacgttgcgcgagaccatccgcctggatggcctggagctgaccctggtcgacaccgccggcctgcgcgacggcggcgacgccatcgaacgcgaaggcatgcgccgcgcccacgtggaaatcgagcgcaccgacctggcgctgatcgtgctggatgcgcgcgatccggcggccgggcaggcggcgctgggtgatgccgtggcagcggtgccgcacaaggtctatatccacaacaagtcggacctgctggcggcgctgccgacgctggatgatccgggccgcgtcttcgtttcggctgcgaccggcgccgggctcgaaaatctgcacgcgcgtttgcgctcgattgcttcggccggggcaggggagcaggtggacggtgagttctccgcccgcacccgccatgtgcatgcgatcgaacgtgcgcaggaacatgcgcagcgtgcggatggcgagctggcccatgagcacctggaactggccgccgaggaattgcggctggcccatgacgcactgggcgagatcaccgggcagatgagtgccgatgatctgctgggaaggatcttctccagtttctgcatcggcaagtaa

SEQ ID NO: 4429 - DNA, 2334 bp, Oryza sativa
atgggggaaactactggagaacgtgccctgacccgtctccacagcatgagggagcgcatcggcgattccctctccgcgcacaccaatgagcttgtggctgtcttctcaaggcttgtgaaccaaggaaagggaatgctacagccccaccagatcattgctgagtacaacgccgcaatccctgagggcgagcgtgagaagctgaaggactctgccttagaggatgtcctgaggggagcacaggaggcgattgtcatccctccatggattgcccttgccattcgcccaaggcctggtgtctgggagtatctgaggatcaatgtaagccagcttggtgttgaggagctgagtgtccctgaatacttgcagttcaaggagcagcttgtggatggaagcacccagaacaactttgtgcttgagctggactttgagccattcaatgcctccttccctcgcccatcgttgtcgaagtctattggcaatggggtgcagttcttgaacaggcacctgtcgtcaaagctgttccatgacaaagagagcatgtaccccctgctcaactttcttcgtgcgcacaactacaaagggatgaccatgatgttgaacgacaggattcgcagtctcgatgctctccaaggtgcattgaggaaggcagaaaaacatcttgcaggcattacagctgacaccccatattcagagttccatcacaggttccaagagcttggtttggagaagggttggggtgactgcgctcagcgagtgcgtgagactattcaccttctcttggaccttcttgaggcccctgagccgtccgccttggagaagttccttggaacaatcccaatggtgttcaatgttgttatcctctccccgcatggttactttgcacaggctaatgtcttggggtaccctgataccggtgggcaggttgtctacattttggatcaagtccgtgctatggagaatgagatgctgctgaggatcaagcaacaaggtctaaacatcacaccaaggattctcattgtgaccaggttgctacctgatgcgcatggcaccacatgtggccagcgccttgagaaggatgtggcacacgagatttctggagagctgcaggccacccctgacctgatcattgggaactacagtgatggcaaccttgttgcatgtttgctggcacacaagttgggtgtcactcattgtacaatcgcccatgcacttgagaaaaccaagtaccccaactccgacctttactggaagaagtttgaggatcactatcacttctcctgccagttcacagctgacctgattgcaatgaaccatgctgacttcatcatcacaagtaccttccaggagattgctggaaacaaggaaactgtggggcagtatgagtctcacatggcattcacaatgcctggcctttatcgtgttgtccatggtatcgatgtctttgaccccaagttcaacatcgtctctcctggtgctgacatgtccatctacttcccattcaccgaatcacagaagaggctcacctctctccatttagagatagaggagctactcttcagtgatgttgaaaacactgagcacaagtttgttctgaaggacaagaagaagccaatcatcttctcgatggctaggctagaccatgtcaagaatttgactggtctggttgagttgtatggtcggaaccctcgcctgcaagagctagtaaaccttgtggttgtctgtggtgaccatggcaaggaatccaaggacaaagaagagcaggctgagttcaagaagatgtttaatctgatcgagcagtacaatttgaatggccacatccgctggatctccgctcagatgaaccgtgtccgcaatggtgagctctaccgctacatctgcgacatgaggggagcctttgtgcagcccgctctctatgaggcctttgggctaactgtgattgaggccatgacctgtggtcttccaacatttgcaactgcctatggtggtccagccgagatcatcgtgcacggcgtgtctggctaccacattgatccttaccagaacgacaaggcctcggcgctgctcgtggagttctttgagaagtgtcaggaagacccaaaccactggatcaagatctcgcagggtggacttcagcgcatcgaggagaagtacacatggaagctctactctgagaggctgatgactctctccggtgtctacggtttctggaagtatgtcaccaacctcgacaggcgtgagacacgccgctacctggagatgctgtacgccctcaagtaccgcaagatggctaccaccgttccattggccattgagggagaggcctccaccaaatga

SEQ ID NO: 4430 - DNA, 1782 bp, Oryza sativa
atgggcaacaactgcgtcggccccagcgccgccggccagaacgggttcttcgccaacgtcgccctctggcgacccaggcccgccgacgcggctycccccgccctcccgccgccctcctccgcgccgtccgaccaggcgcccgagcccgtcacaatccccccatcggagcactcctcccaccactcctcccgctccaccgacccgtcgacccccacctccgccgcggagcagccggcgaacaaggcggcgcccaaggtcaagcgcgtccagagcgccgggctgctcgccgattccgtcctcaagcgcgacgtcaacaccgcccgcctcaaggatctatacacgatcgggaagaagctagggcaggggcagttcggcaccacctacctctgcgtcgagaaggccacaggtcgggagttcgcctgcaagtccatcgccaagaggaagctgctcacgcaggaggacgtcgaggacgtgcgccgcgagatccagatcatgcaccacctcgcgggccacgccaacgtcgtctccatcgtcggggcctacgaggacgccgtcgcggtgcagctcgtcatggagctctgcgccggcggggagctgttcgacaggatcatccagagggggcattactccgagaaggccgcggcgcagctcgcgcgggtgatcgtcggcgtcatcgaggcgtgccactccctcggcgtgatgcacagggatctcaagccggagaatttcctcttcatccaccagaaggaggattcgcctctcaaggccatcgatttcggcctctccatcttcttcaagccaggtgagacatttasggatgttgttggaagcccgtactatgttgcacctgaggttcttatgaaacattatggtcgtgaggttgacgtctggagtgctggtgtgataatctacattttgttgagtggggttcctccattttgggatgaaagtgagcaagggatatttgaacaagttttgaaaggtgatctggacttctcatctgagccttggcctaatatctcagagagcgcaaaggatttggtcagaaaaatgcttattcgtgatccaaaaaagagattgactgcccatgaagccctatgtcatccttgggtctgtgttgatggagttgctcctgacaagcctcttgattccgctgtcttgagtcggttaaaacaattttctgcaatgaacaaactaaagaaaatggcgcttagggttattgctgagagtttatcagaagaagaaattgcaggattaaaagagatgttcaaaatgctagacactgacaacagcggtcatattacactggaagaactaaaaacaggcttgcagagagttggtgctaatttgatggactcggaaattgatgctctaatggaggcagcagatattgacaacagcggaacaattgattatggagaattcattgctgcaactttgcatataaacaaagtagagaaggaggataagctgtttgcagctttctcatactttgataaagatggcagcggttacattactcaagatgagcttcaaaaggcatgtgaggaattcggtataggtgatacccgtattgaggatattattggagacattgatcaggacaatgtgctgctaagtgaagttgccatttcagacaatggctataacccaacatcagaatatcacgatgtcaaactaccatcgcaccgcaagctaagttttggatctctcaagcaaagctaccacatgcctgagcatcaacatttcctaggcttcaatctcacagttaactgtcaatag

SEQ ID NO: 4431 - DNA, 960 bp, Oryza sativa
atggaaggcgttgttgacgggagcggcgcgcagctggtggtggcggagctggtgcgcgtgcaggggctgctccggcagctcgaggcccacctgagcgcgccgtgctccgtcgagctctgccgcggcctcgtcgcgcagatcgtcgcgctcacggacaggtccatcggcatcgccacccggtccttctcctccgcctccggcggcggcgcgcatttcgcggacacggcgccgccgatgccggcgctgacgtcgtgcacgcccagcccgctcagcgacggctccgaccaccagccgttccggaccaccaacgccaagaagaggaagacgacggcgaggtggacgagccaggtgagggtgarcgcggcgggcggcgcggaggggccagccgacgacgggcacagctggaggaagtacgggcagaaggacatcctgggcgccaagcacccgcgcggctactaccgctgcacccaccgcaacacgcagggatgcaccgccaccaagcaggtccagcgcaccgacgacgacgcctccctcttcgacgtcgtctaccacggcgagcacacctgccgcccgggcgccgccagcgccgccgccgccaagaggccgcacgcgcagacgctgctgcagagcctcagcgccagcctcaccgtgaacacggacaccaacacgccgctgacgccggagaaccgcgcgccggcgccgccgctgcagcagcagcagcagcagcagagcgtgtcggcgtcgcccgtggcgtcggactcgtacggcctgggcggcgccgggtacggggactggcgctgctgcgacggcgacctgcaggaggtcgtgtcggcgctcgccaccgtgacgtcggcccccgaccacgccgccatggacgccgccgacttcatgagctactgcttcgacttcgacccggcggtgtacggcggcatcgtcggcacgccgagcttcttcctatga

SEQ ID NO: 4432 - DNA, 819 bp, Oryza sativa
atgtcgaccgccgccgccgccgccgctgcccagagctggtgcttcgccactgtcaccccgcgstcccgcgccacagtcgtcgccagcctcgcctccccatcaccgtcctcctcctcctcctcctccaacagcagcaacctcccggcccccttccgcccccgcctcatccgcaacacccccgtcttcgccgcccccgtcgcccccgccgcgatggacgccgccgtcgaccgcctcaaggatgggttcgccaagttcaagaccgagttctatgacaagaagccggagctcttcgagccgctcaaggccggccaggcacccaagtacatggtgttctcgtgcgccgactctcgcgtgtgcccgtcggtgaccatgggcctggagcccggcgaggccttcaccgtccgcaacatcgccaacatggtcccagcttactgcaagatcaagcacgctggcgtcgggtcggccatcgagtacgccgtctgcgccctcaaggtcgaactcatcgtggtgattggccacagccgctgcggtggaatcaaggccctcctctcactcaaggatggagcaccagactccttccacttcgtcgaggactgggtcaggaccggtttccccgccaagaagaaggttcagaccgagcacgcctcgctgcctttcgatgaccaatgcgccatcttggagaaggaggccgtgaaccaatccctggagaacctcaagacctacccgttcgtcaaggaggggatcgccaacggcaccctcaagctcgtcggcggccactacgacttcgtctccggcaacttggacttatgggagccctaa

SEQ ID NO: 4433 - DNA, 1263 bp, Oryza sativa
atggggaggaagcctgatccgtcgaagccacactacggtggcggcgcctcgccgagggcagcgaggaggacgcagccgtcgccggttttcctgggaacggcgctgttcgtcctagggtttgtgtccctcttcacgggacacatcgttacggacgccgactggtcccggatccggagccggtggcgatccaagcagcatgttatttgtctcagttcttggtcaatgcttccttacaacgttggcaatgtgcaggttagaaataacgagcccataaatatttggaaatcgagtttccagataacagatgctgttgttgtcgcccgaatattgaatgccacacttgttgtacctgagttagatcaccactcattctggaaggatgatagagggagtaggacaacttctgaagttcatcaaccccttgcacgatggacttaccctgatatggatgtaactattgtcaaagaatcccttatgatggtgatgatgtcaatggataaactcccatggaccatgcgtgcgcctaggaaatccatgcctgatttttacattgatgaagttttgcctatccttatgcgaaggcgagctttgcagctaacaaagtttgattatcggctcactaacgagcttgatgaagaattgcagaagttacgctgccgaggtgagaaattggtgcgcaagctgaggagcatgagctcacgatacgttgccgttcacttgaggtttgagcctgacatgcttgcattttctggttgttactatggtggtggtgataaagaacggagggagttaggtgaaattaggaaaagatgggatacactacctgagttgagcgctgaggatgagcgcagtaggggcaaatgtccactgactcctcaagaaattggtttgatgctccgagctcttggttttagcaatgacacgtacctgtatgttgcttctggagaaatatatgggggagaagaaactctccagcctctgagggatctctttccaaactactacaccaaagaaatgcttgctgggaatgatttgaaaccgttccttccgttctcttcaagattggctgcaattgatttcatcgtatgtgacgggagtgatgtttttgttacaaacaataatggaaacatggccaaggttttagctggacgaaggcgatacatgggccacaagagaaccattcgcccaaatgctaaaaaactcaacttactatttaagagacggaaacagatgggatgggatatattttcacagaagtactaa

SEQ ID NO: 4434 - DNA, 483 bp, Oryza sativa
atggccgtgctggtggcgaggcaggggcgggagctgcagcggtacacgagcgccgggggccgcatcgtggtgggttgcatcccgtaccgggtgcgcagcggcggcgagatggaggtgctggtgatcacgtcgcagaaggggcacggcatgatgttccccaagggcgggtgggagctcgacgagtccatggacgaggccgcccgccgcgaggcgctcgaggaggccggcgtccgcggcgacaccgagacgtccctcggctgctggtactacaagagccgccgctacgacaccacctacgagggcttcatgttccctctccgcgtcaccgacgagctcctccagtggcccgagatgtcctcccgcaagcgcacctgggccacggtgcagcaggcgatggatggatgccagcacggttggatgcgtgaggcgctcgagcggctcgtctcccggcacgccaccaacaagctgcagtctgcgctgtaa

SEQ ID NO: 4435 - DNA, 1032 bp, Oryza sativa
atggccgccgccgccacgggccctgtccccttcaaggacgccgacgacgacggcacgctcgccgccgccgaggcgcgctcgcctctcccgaaggaggagttcggcgacctcgtcgcggcgctgccgcggaaggagcagtacctcgacgggcggctctacgaggggttctggctgccggagcactacgcgccggggatcatcgcgttccgccgccgcttcacgccgcgcgccgacgacgtggtccttgccagctaccccaagtgcggcaccacgtggctcaaggcgctggccttcgccgccatgacccgcgccgcctacccggcggacgaacacccgctgctccgcctcaacccgcacgacgtcatcccgttcgtcgaggacgtcttcaccgacggccacgaggccaagctcgacatgctcccctcgccgcgcctcatcaacacgcacacgccgtaccagcttctcccggagtcggtcgtcgccggcgacggcggcggcggatgcaaggtcgtctacatctgcagggaccccaaggacatggtcgtgtcgctgtaccacttcatgcggcgcctccagcccgacctgtcgctcgccggcgtggtggagtccgtcgccgacggcacggtgccgttcgggccgatgtgggaccacatcctcggctactggcgggcgagcgtctcccgcccggaccgggtgctcttactcaggtacgaggacctgctccgcgacggcgccgccggcgagcacgtcagggcgatggcgaggttcatggggcggccgttctcggccgccgaggaggccgccggcgccgtagcgagcgtcgtggagttgtgcagcttcgagaggatgaaggcgctggaggtgaaccggcggggcacggcggggtcgtacaagagcatgccgcgcgacgccttcttcaggaagggcgtcgccggcgactgggcgaaccacatgtcgccggagacggcagcgaggctggacggcatcttccgcgaaaaattccgtggcacagggctcaccattgttccatga

SEQ ID NO: 4436 - DNA, 405 bp, Oryza sativa
atgaagaataaaaaaggggcgaagaaggagcgtgagccacgtgtggcgttcatgaccaagagcgaggtcgaccacctcgaggacggctaccggtggcgcaagtacggccagaaagccgtcaagaacagctcctacccaaggagctactaccggtgcacggcgccgcggtgcggggtgaagaagcgggtggaraggtcggagcaggacccgtccatggtgatcaccacatacgaagggcagcacacgcacccgagccccgtgagctaccacatgcacaggcagcaggggctcatgcatktgascgcgcgcggtgtcatgcccggcgccgccggcgcctaccatttcggcgcgccgccgcggcggctccttggcttcgacraagccctcgccgctcgggtgcaatga

SEQ ID NO: 4437 - DNA, 1647 bp, Oryza sativa
atggcggctcatcatgtcatgagcatcgccgcagcagcagtagccatgcttctcctgatggcgtcgtcgccggcagtcgccggcacggcggtgctcggccggaagggcggcgccatgactgacgacgatgtcgtgggagggcaggcggcgacagggccggggaagtacgccgtgatattggacgccggcagcacggggacgagggtacacgtctttaggttcgacaggatgatggatcttctcaagatcggcgacgacatcgaggtcttcgccaagaataagacactaataaacaagtaccgtattctaataggatattattttgtggtaaaaattaatgtggttcctggactgagctcgtacgctggacgaccgcgggaggcagccaactccatacagcctctgcttgataaggccatccacgttgtccctaactggcttatgaagaaaactccccttaaacttggggcaactgctggactcatacttattggagatgaaaaggcaaaccagattcttgaagcggtcagagatgttgtccacaccaagagcaaatttcagtacaatccaaactggatcaatgttcttacgggatctcaagaaggatcttacatgtgggttgctcttaactatcttcttgatagactgggtgaagattactcgaaaacagtaggcgtgattgatcttggaggtggatccgtacaaatggcctatgccgtctcatcaagcattgctgctaacgccccagaggtgcctaatgggcaggatccctatattacagaggagtatcttaaagggagagattacaacatttatgtgcacagttacttgcattatggcgctcaggcttctcgcgtagagatactgaagagaaagaatgggccatttagcaactgcatgttgcgtggattcaaaggcaaattcacctacaacggggagcagtacgaagcaatggcagcaccacaaggtgcagactaccacaaatgcagacaagatgtggtgaaggcactgaacctagactcgccctgcgaaaccaaaaattgcagcttcaacggcgtgtggaacggcggcggcggcgttgggcaggacgagatctacgtcacatccagcttctactacatagcctccggtattgggttcatcgacagtgaggcgcccagtgcaaagtctacaccagcagcgtacaaggctgcatcagagaaggtttgtatactgagcatcgaagaagcgaaagcagcatacccaatagctcgtgatcacgcctacttatgcatggatctcatctatcaatacaccttgcttgtcgatggcttcggtttggaagcaacgaaggagattactctggtagagaaggtgaagcatggagagtcctacatagaagcagcgtggccattgggcactgccattgaggcaactactggacccagacttattggagatgaaaaggcaaaccagattctagaagctatcctgaagagaaagaatggaccatttatcaattgcatgctgcgtggattcaatggtctggatccaaataagaagataatgctggtaaacaaggtgaagcatggggagtactacattgacgcggcttggccattgggtacagctattgaagctgtatcacccaaaaaagggcttcaatag

SEQ ID NO: 4438 - DNA, 1566 bp, Oryza sativa
atgaggccatcactcttgcagtatctgaagctgctcctgttacttgcccttggtggtgtcaccaccatgcatgtgcctaaacaagatgtgccatcatccctggaggaactcacccttgatggccatttcagcttccacgatgtgtctgctgctgcacaggactttggcaacctgtccagcttcccgccggttgcggtgcttcatcctggctcagtggctgacattgccacaaccatcaggcatgtgttcttgatgggtgagcactccacgctcacagtggcagcccgtggacatgggcactcgctgtatgggcagtcccaggctgctgagggaatcatcatcagtatggaatccctccagagtaacacaatgagggtgaaccctggcgtatcaccctatgtcgatgcttcaggaggagaactctggataaatgttttgcatgagactctgaagtatggtttagcaccaaagtcgtggacggactatctccatctcacggttggaggcacactgtcgaatgcaggagtcagtgggcagaccttccggcatggcccacagatcagcaatgtcaacgagctggaaattgtgactggaagaggtgatgttatcacatgctcacctgaacaaaactctgatctcttccatgctgcccttggtggcctaggtcagtttggcgtcatcacaagagccaggattcctcttgaacctgctccaaaaatggtaaggtggctacgagttctctacttggatttcacaagcttcaccgaagaccaggaaatgctcatttcagcagagaagacatttgactacatcgagggctttgtcatcataaataggacaggcatcctgaacaactggaggtcgtccttcaatccgcaggacccagtgcgttctagccagtttgaatcagatggaaaagtgctcttctgccttgagatgacaaagaacttcaaccctgacgaggctgatgtcatggaacaggaggtcaacacactgctgtctcaacttagatatatgccttcctccttattccacacggatgtaacatacatagagttcttggatagggtacactcttctgagatgaagttgagagctaagggcatgtgggaagtcccacacccatggcttaatatcatcattccaagaagcatgatccataaatttgcgaaggaggtctttgggaaaatcctgaaagacagtaacaatggtcccatattactctatccagtgaacaaatccagatgggacaacagaacatcagtagtcataccagatgaggaagttttctacctggtggcattcctatcctcagcacttggcccccataacatcaaacatacattggacctgaactacaggataatagagttctctgacaaggcaggtattggagtgaagcagtatctcccaaactataccacagaacaggagtggcagtcccattttggtgcaaggtgggacacatttcaacagaggaaaaaagcctatgaccccttggccatcttagctccaggacaaagaatatttcaaaaggcatcagcgtcactacccttgccctcatga

SEQ ID NO: 4439 - DNA, 1245 bp, Oryza sativa
atggcccggctgctactctccggcgtcgcgccgctccccctcctcccctgccgccgtcgcgccattgcatttgcgctcccacttgggaatgtccgcctccgcctccgtgtggccgcacccaccagccgcgtggccaccgtggaggaggacgacaatgaaaataatgctcctcctcctccttgtgaggacttcgacccgggcgcggcgcccccgtttggtctggccgacatccgcgccgctatccccaagcactgttgggtgaaggacccctggcgatccatggggtacgtgctgcgcgacgtggtggtggtgttcgccctcgctgccgccgccgcgcgcctccacagctgcctcgcctggccgctctactgggcggcgcagggaaccatgttctgggcgctcttcgtcctcggccacgactgcgggcacgggagcttctccaacaactcgaggctcaacagcgtgatgggccacatactccactcctccatcctcgtaccctaccatggctggaggattagccacaggacgcatcatcagaaccatggccatgtcgacaaggatgagtcctggcatcccctccccgagcggctgtacaggagccttaacagagccacccggatgctccgcttctccatacccttccccatgctcgcctacccattctacctgtggtctcggagcccaggaaagtctggttcgcatttccatcccagcagcgacctgttccagcccaacgaaaggaacgatgtgctgacatccacagcgtgctgggtggccatggctgccctcctcgcaggcctcaccttcctcatgggacccctcctcatgctcaacctctactttgtcccttactgggtacattttgttatgtggctggacttcgtcacctacttgcaccatcacggccacaacgacaagctgccctggtaccgtggcaaggaatggagctatttgcggggaggactgacgacagtggacagggactatgggtggatcaacaacatccaccacgacatcgggacacatgtcattcaccatcttttcccccaaatcccgcattaccatctaattgaggcgacggaagcagcaaagggtgtgatggggaaatactacagggagccggacaagtctgggccttttcccttacacctgtttggagcgctgtcccggagcttgaaacgcgaccactatgtcagcgacaccggagatgtggtctactaccagaccgaccctgctaactaa

SEQ ID NO: 4440 - DNA, 1250 bp, Oryza sativa
atggtaatgccggggttccggttccacccgacggaggaggagctcatcgagttctacctccggcgaaaggtggaggggaaacggttcaacatcgagctcatcgccttcgtcgacctctaccgctatgacccgtgggatcttcccgctctggcctcaattggggacaaggagtggttcttctatgtgccaagggaccgcaagtaccgaaacggcgatcggcccaaccgagtgacgccatcggggtactggaaggccacaggggcggataggatggtgaaggtggagggtgaccgtcctatcggcctcaagaagacgctcgtcttctacgtcggcaaggcgcccaaggggcttcgcagcagctggatcatgaacgagtatcgtctccctcatggcgacgctgaccgctaccaaaagatagcttttgatatagtcaccggcaggcaggcaagcatatgtactgcatatgctattggcacgtcttgtctctcagctggtgatgaaattaaagtacacaccatgcgaaaattgtatgtagaggaaatttcgctgtgtcgagtctacaaacgcccaggaatcgaagacaacttccacctyaccggcacaaccactaaatcctccggctcaaaggcggcggcggcgatgggcaagaagcacgccgmcgcgaaccggacgtcatcgacggcggcggctgcggcgccccgcctcgccccgatgttcgacggcggcggcggcggccaccactcatccgccctcatgggaaaggcaacatacaacgcatcacacaccgccgccgaagggacgaacgccatcgccatgtcactgtcggcggcggccgcgctgcatcctccggcgccggcgatgttccggtcgacggcgtcggtggcctcgctgagctccaccacgtcgacggaggaggacggcacgtcgctcttccacctcaaggccggcgcgacgacgacgaacacgacgacgatgcatcatcaccatcatcatcagcagctgcctgcttcaactcatgctctgctcaacaccaactcgtcagcaatggcgaccatccccatcgacgagctgagtagggcgattggatcttacagcaacatccaccatcaaccaaactctactacaactcatcaatcaactgctttgccgccatcgcaacaaagccctcttcttccattcgctagcatggagaagatttgggattggaaccctctcctagaatctcccaaggtttgcacaaacttcaagta

SEQ ID NO: 4441 - DNA, 579 bp, Oryza sativa
atggcgccgcaacccgccgccgccgccgccgtggacggagtcggggtcggggtcggggcgcacagcgtgttcgtgtacgggagcctgatgcaggacgaggtggtgcgcaccatcatcaagcgcgtcccgccctcctccccggcgctcctccccaactaccacaggttcaacatcaagggtaggatttatcctgcaatcctacctgttcaaagcaagaaagttgctggcaaggtcatcaccggtgttactgatgcagagctccagattctggatgaatttgaagatgtggagtacgtgaggacaagagttgagatatcattaactgatacttcagagacaatgcttgctgacacctatgtatgggctgatgcagaggatccaaatctttatggtgaatgggattttgaggtgagggaatggaagaggttgcacatgaaagatttccttgcgatgacccacgggttcatggatggcctcgaacagcctgaatccaagtccagggttgaaacctaccaatcattcatgcaggaaatccaacagcctgggacgacgacgacgacgacccaggttgagatttga

SEQ ID NO: 4442 - DNA, 924 bp, Oryza sativa
atggcgtcaagggatctccggcggctgctcgacggcgcggccctcgtcgcccgcgaggccgccaggcgcgcctcggcccccgacgtcctcaggtccgcgctcctcgccgccaccgacctcgccgggctcaccaggggcaccccgcgcaccccgaggcccacccctccccttkgacccaaccccamcgccgccgccgccggcggcgaggctcgtgcctccgtcgtgtacttctcccacgacgatgccggtcccgtctytccgccgcggcggccgccgcaggatcccccgctggagcagcggccgcctgcgcgtgaatccccccacccggcccaggcgaaggagatcaccgaagccggcgtagccgcggccgtgggcgcagctgagcctgaacctgtggcggtggccagaccacccgatggcgaagctgctggccgctcacctgcaccctcgccatcgccctcgccggtggtgcgggtggagaagaggcggcggccgcgggagcggagggttccctccaccccattcaccagagccctcgggtcagaatcagctcggcgggtggtgtatgggagaccagcggacgcagatggcaagcgttctgctatgtccccgttcttatcagatcagaatgctgagcgtatcgccctggcgctgtgccggatgcggggtgcagcgctcaaggtgggacagatgctgagcatccaggacgaatcccttgtgcctccaccggtcttggcagctcttgatattgttcgccaaggtgctgatgttatgccgaggaagcagctcaattcagttcttgatgctgagctaggtcaggactggtcctccaagttaacgagttttgactatgagccactagctgctgcaagtattggacagaaaattttaaatttgattggtaatgattatttgagaagttag

SEQ ID NO: 4443 - DNA, 1790 bp, Oryza sativa
atggcgacggcggcggcggcgggagagggagggagtgggcggcggtactggcggtggagtaaggcggacttcttcccggagccgtcgttcgcgagctggcggtcctacggcggcgcgctcgcggccaccgtgccgcggctggttgaccgcgtggggagccgctcgtcggaggcggcggaggccggcacgctgcgcgccgtgagcgagaacccgctgcggcggtgcctgtcgtggctggacctcgcgttcctcgggttcggctccgtcgtcggctccggggtgttcgtgctcaccggccaggaggcgcgcttcgacgccggcccggcgatcccgctcgcgtacgccgcggcggggttctccgcgctgctgtcgtccttctgctacgccgagctcgccacggagatcccctccgcggggggctcgttctcgtacctccgcgtcgagctcggcgacatcgcggcgttcctcgccgccgggaacatactgctggaggccgtcgtcggggcggccgggcttgggaggtcgtggacgtcgtacctcgccgcgctcctcggccgcgacaccgactcgctccgcatccacgtcccggcgctcgccgaggggttcaatctgctcgaccccatcgccgtcgtggtgctcgtcagcacctccgcggtggccatgtccggggcgcgcctcacgtccacgctcaactcgctggcgtcggtggtcggcatcgccatcatcgcgttcgtgctggccgcggggttctcccacttcgacgccggcaacctcgcgccgtccttcttccccttcggcgccgcgggcgtgttccgcgcggcgggggtggtgtactggtcgtacaccgggttcgacatggtggccaccatggcggaggagaccaagaaccccggccgcgacgtgcccctggggctcatctcgtccatgtcctccatcaccgtcgtgtactgcctcatgtcgctggcgctggtcgggatgcagcggtacaccgagatcgacgccaacgccgcctactcggtggcgttcgccgcggccgggatgaggtgggcgcgctacgtggtggctctcggcgcgctcaaggggatgacgagcggcctcctcgtcggcgcgctggggcaggcgaggtacacgacgcagatcgcgcggacgcacatgatcccgccgtacttcgcgctcgtccacccgacgaccggcacgcccatctacgccaccgtcgccgtcacgctcggcgccgcctgcgtcgcgctcttctccagcctcgacgtgctcgcctccgtctcctccatcagcacgctcttcatcttcgcgctcgtcgccgtggcgctcctcgtccgccgctaccacgtcgcgggggcgacgacgccggggcagctgcgcaccttcctcgcgttcctcgcgctcgtcgtgctctcctccatcggcgtctcggcctactacaactcccggtacgcgcggcggtggccagggtacgcggcgttcggctgcgggttggccgccggggccgccgggctggcggcgtgcgcggagaagcagcgggcgccgcgggtgtacggcgcgccgctggtgccgtggctgccggccatgtccatcgccaccaacctcttcctgatggggtcgctgggcaccgcggcgtacgcccgcttcggcatctgcacggccgccatgctcgtctactacgtgctcttcggcgtgcacgccacctacgacgtcgcgcacgcggacgacgcggctgccgacaacctcgagcacggcaagatcgcggcggcgcccgcgcccacgacgccggcgtg

SEQ ID NO: 4444 - DNA, 1914 bp, Oryza sativa
atggacctcacacctgctggcggtgagcgtgacattcctgacgacttgttcatgtgctctgagctctacattgcagcgttcgaggggcacaccgatcaggtcatcggacttttagaaggaagccgcgcctccgcggcagtcgccgggaacggctggtcgtcgccggcggcacaaccaacagctaaacaccatggaaactgtaacattcacgaggtgaccgccgagcgctggacgctgctccacatcgcggcggcgcaggggcacgacgacctgatcgacgagctatgccgccgggacagcggcctcctctccgcggcgagctcgtcgggggacacgccgctgcactgcgcggcsagggcggggcacgccggcgcggtccgggccatcgaccggctggcacgcgcgaacgtggaggaggacaggctgcgggaggcccttcgcgggaggaacgaggccggcgacacggcgctgcacctcgccgcgaggcacggccacggcgaggccgcggaggcggtggtggaggcggcgccggagacggcggccgatctgaacggcgccggcgtgtcgccgctctacctggcggtgatgagcgggtcggtgcgcgccgtcacggcgatcctctggtgcagggacgcgtcagccactggaccgaaatcacagaacgcgttgcacgctgcggttctccagtgttcagaaatggtttctttgctactgaactggaaaccaggactggtcatcgatcttgacagcaacaggagcagcccactgcattttgcctcatctgatggtgactgctccattatcaaagcaatcctagctcatgcacctcccggagctgcacacatgcaggacaaccagggcctctcaccgttgcatgccgcggcgctgatgggccatgcagctgctgtccgcttgctgatgcagttctcaccggcttcggcggatgttcgagacaagcatggcatgagctttctacatgttgcagctatgaaaggccatgcttccatcatctcgcatgctgcgaaaaacaggatgcttgagcaccatctgaatgctcaggacagggacggaaacacgccgctccatttagcggtggctgcaggggaatacaatgttgtttctaagctgttatcaagtggcaaggtgcaaactcatatcatgaacaatgcaggttgcacaccatctgaccttgtgaaggattgcaaaggtttctactcaatggtaaggttagtggtgaagatgtatgtctcaggagtacaattccaaccacaaagacaggatcagatagagaaatggaacggccaagatataatgaaatggcgagagacaacatcgaaaaatcttgcagttgtttccacgcttgtggcaacagtcgccttctccgcagctttcaacgttcctggatcatatggagatgatggaaaagcaatcctaaccggtgatcgcatgtatgatgccttcttggttctggatacatttgctgtggttagttcagtgacggcaacaatacttctggtctatggaagagcctcccagtctaaccgttcatgggtaggcttcatgatctcgatgcacttcctatggatgtcacttaacagcatggtgctaggcttcttcactgctatggctgcagtgacgaacaagaaagtgggcacgaagacagcaatgtcccaaatgatctacttcgggatgtacttcttggtaatgctactcataagccttgtaacaccagggtcacttataggcactttgaagtttctgatagggggttgcatggaacgacaacggcgtgtcaagagacgcatctgccggcagtatcccttcaccattagctatgtgtttaatgtggttatgttcatagtgctaagttgtgtagccattacttccgttgatgtcactagaaacctcccatga

SEQ ID NO: 4445 - DNA, 1467 bp, Oryza sativa
atgggggagaacgtggttggcacgtactactacccgccttcggcggccgccatggacggcgtggagctcggccacgccgccgccggctccaagctcttcgacgacgacggccgccccaggcgcaacgggacgatgtggacggcgagcgcgcacatcatcacggcggtgatcggctccggcgtgctgtcgctggggtgggccatcgcgcagctcggctgggtggccgggccggcggtcatggtgctcttctccctcgtcacctactacacctcatccctcctctccgattgctaccgctccggcgaccccgtcaccggcaagcggaactacacctacatggacgccgtgaacgccaacctgagcgggttcaaggtgaagatctgcgggttcttgcagtacgccaacatcgtcggcgtcgccatcggctacaccatcgcggcgtccatcagcatgctggcgatcgggagggccaactgcttccacaggaaggggcacggcgacccgtgcaacgtctccagcgtgccctacatgatcgtcttcggcgtcgccgaggtcttcttctcgcagatccccgacttcgatcagatctcctggctctccatgctcgccgccgtcatgtccttcacctactccgtcatcggcctcagcctcggcatcgtccaagtcgtcgcgaacggagggttgaagggaagcctgaccgggatcagcatcggcgtggtgacgccgatggacaaggtgtggaggagcctgcaggcgttcggcgacatcgcgttcgcctactcctactcgctgatcctcatcgagatccaggacaccatccgggcgccgccgccgtcggagtcggcggtgatgaagcgcgccacggtggtgagcgtggcggtgaccacggtgttctacatgctctgcggcagcatggggtacgcggcgttcggcgacgacgcgccggggaacctcctcaccgggttcggcttctacgagcccttctggctcctcgacatcgccaacgccgccatcgtcgtccacctcgtcggcgcctaccaggtgttctgccagccgctcttcgccttcgtcgagaagtgggcggcgcagcggtggccggagtcgccgtacatcaccggggaggtggagctccgcctctcgccgtcgtcgaggcggtgcagggtgaacctgttccggtcgacgtggcgcacggcgttcgtcgtcgccaccacggtggtgtccatgctgctgcccttcttcaacgacgtggtcggcttcctcggcgcgctcggattctggccgctcaccgtctacttccccgtggagatgtacgtggtgcagaagaaggtgccacggtggagcacacggtgggtgtgcctgcagatgctcagcgtcggctgcctcgtcatctccatcgccgccgccgcgggctccatcgccggcgtcatgtcggatctcaaggtttaccgcccgttcaagggttactga

SEQ ID NO: 4446 - DNA, 2589 bp, Oryza sativa
atggcgccgccccgcacatcgggtctcctctctctcgcgcggtcgtgcggcgccgccgtcgtcctcgtcccgccggcgaggcgcgtggcgagcatcgacctggggtcggagtggctcaaggtggccgccgtgcacctcgcccccggacgcgtcccgatcgcggtggccatcaacgagatgtcgaagcgcaagtccccggcgctcgccgcgctcgccgacggcaaccggctcgccggcgargaggcgtccggcatcaccgcgcgccamccgtccaaggtctacaccgtcgaggagatcgtcgcgatggtgctccactacgccgctgggctcgcggatgcgcacgtcggcgctcctgtgcgtgacgccgtcgtcgccgttccgccctactttgggcaggccgaacgccgggccttgacgcaggcggcgcagcttgccggagttaacgtcctcgcgctcatcaatgagcacgccggggcagcgttgcagtacgggatcgacaaggatttctcgaacgagtcgaggcatgttatcttctatgacatgggcgcaggtagtacctacgccgcgctggtgtactactcagcttacaaggccaaggagtttgggaagacggtatcggtgaaccagttccaggttaaggatgttagatgggactccaaacttggaggccttgaaatggaaatgcgcctggtaaactattttgctgatcaatttaataaacaactcggtaatggagttgatatccgccagtctcccaaggcgatggctaagttgaagaagcaagttaagcgtaccaaagaaattctgagtgcaaatactgctgctccaatttcagttgaatcactatataatgatctcgatttcaggagtaccattacacgtgaaaaatttgaagaactttgtgaagaattatgggagcaggctctaactccagttaaagaagtgcttgcacattctggaatgaagattgatgatatctatgctgtagaattaataggaggagctactcgagtaccaaaattgcaggctaagctgcaggaattcctgggaagaagtgacctggataagcatcttgatgcagatgaagcaattgttctgggtgcctcactgcatgcagctaacttaagtgatggaattaagttgaaccgtaagttagggatgattgatggttctacttatggttttgtgtttgaaataaatggcccagattatgtcaaagatgaaagcactgatcaattactggtgccaaggatgaaaaaattgggaattaagatgttcaggtccattagacatactaaagacttcgatgtttctatcagctatgaaaaagcttctgaactgcctccaggtgttacatcacacaaatttgtggagtattctgtatcaggcctgacagatgcaagcgaaaagtacagtagccgcaatttatctgcacccatcaaggcaaatctacatttttctttgagtaggagcggaattatttctcttgatagggcagaagcagtgattgagataactgaatgggttgaagttccaaagaagaatttaactctagagagtaattccaccagtcagactttgtcttcggaaggaggagcagctaatgacacatctgacagtaaggagaatgtgagttctgatggggatgcaaataagtccagtgctccaatagatgagagtaatgcacaagatattgttacagagaaggtgctcaagaaaagaacattcagggtcccgttaaaggttgtggaaaagatggctggtgctggatcaattctttcgaaggagttgtattctgaagcaaaaactaggttagaggcgcttgataagaaggatgctgaaaggaggagaactgctgaactgaaaaataacctggagtcttacatatactctatgaaggagaagctggaagagaacacagaaattttgaccgtctcaactgaacaggagagggaatcttttgcagagaaacttaatgaggtctgttcaataataatcttctggtacaagattggttgtatatggatggtgaagatgctcaagcaaatgaattcaagggaacsccttgaccaacttaaggccatcggtgacccaattcttttcagattgagtgagctaaaagcccggccaacggcttgtgaaaatgctagattgtatcttgctgagttgcaaaagattgttaagaactgggactcgaacaaaccgtggcttccaaaaaagagggtagatgaggttgtaagtgaagcagagaaagtaaaaacttggttggaggagaaggaagccatacagaaaagcacccctgtctacagtccacctgctttcacatctgaagaagtctacgaaaaagttctggacctacaagataaggtttctagtgtcaataggatacctaaaccaaaacccaagatagaaaagaaacctcccaaggaagaagagtctgctaacaaagagaaaactgactcttcggaatctgaatccaaagaagctgaatccacggaaacatcgtcggaatcagctgcccctgaagagagtcagtctgaaccacaaaagactgacgatttagaacctgaagctcatgatgagttgtga

SEQ ID NO: 4447 - DNA, 1350 bp, Oryza sativa
atggcgacagatcaggcaacaggttcagtactggtctgggaaacatttctgatcatcctggtggtgtactcggcgtggatctgcccgctggagttcgcattcctgaggtacctgcccagcgcgccttttgtcgtggacgatgtcgtcaacgggtttttcgccgtcgacatcatgctcactttcttcgtcccgttcgtggacaagaagtcctacctcctcgttaacgatccgaagaaaatagcagtcaggtacctgtcgtcttggttcgtcttcgatgtatgctcgactgttccattccactccatcagcctgctgttcaacgagcacgggcatgaccttggcttcaagtttctcaatgttctcaggctctggcggttgcgtcgagtcagttcgatgtttgcgaggcttgagaaggacatccggttcaactacgcggtgatacgctgcacgaagctcatctcggtcaccctcttcgcgatacactgcgccgggtgcatcaactaccttatcgccgacaggtacccggacccgaggaggacatggatcggcgccgtgatgcccaacttcagggaggacgggctgtggatccggtacgtgacggccatgtactggtccatcacgacgctgaccaccacgggctacggcgacctgcacgccgagaacgccagggagatgctgttcggcatctgctacatgctcttcaacctctggctcaccgcctacctcatcggcaacatgaccaacctcgtcgtccacagcaccagccgcacccgagactttagggatgtggttcaggccgcctcagaattcgcggcgaggaaccagctgccgcagcaaatagaggagcagatgctgaaccacatatgcctccggtacaagaccgatggcctcaagcagcaggagacgctagacgtcctcccgaaggcgatgcgatccagcatttctcactacctcttcttccgggttgttcaaggagcctacctgttcaagggagtctcctcaaggttcatccagcagttggtaacagagatgcaagcagagtacttcgccccaaaggaagacatcatactgcagaatgacagcccatcggacttgtatcttcttgtatccggagcagtagacattctggtattcctagatggaacagaacaggtttacaggagagcagctgagggagaactgctaggggagataggtgtactgtgcaacaagccacagtcgttcactttccggacgacaaaactatctcagattctgaggatcagtaggaccaagctgttgggtatcatccaggagaacagagaagacggcgacatcatcagaagcaaccttcagcaagtgaacgtataa

SEQ ID NO: 4448 - DNA, 1965 bp, Oryza sativa
atgggtgtcgtcgaggcagaggcgttgcatggggcggtggaggccctggctgggtcgctgcagccgcacgtggccaccgccttcttcgtgttctcggcgtgcacggtggccctcgccgcgctccttgccgtggtgcgcctgcgcccgccgtggtggtgcgactgcaccgtgtgcgaggccttcctgacggcgtcgtgggcgggagagttcgacaacctctgcgactggtacgcccacctgctgcgcacctcgccggcgcagaccgtgcacggcgctcccttctccgccatcctcgccgacttcctcggccgcgggatatttaacgtcgacggtgacgcgtggctcttccagcgcaagctcgccgctgccgagctcgcctctccggcgctccgcgccttcgcggcgcgtgtcgtggcctccgagctgaggtgccgcctcatccctctgctccactctgcttcacgtgagggcaacggcaaggtgctcgacctgcaagacatgttccgccgcttcgccttcgacagcatatgcaagatctcgtttggcctcgaccctggctgcctcgagctgtcgatgcctataatctggaggctgaagcggttcttgaacgtcggggacgaaaggaagctccgggacgcggtccgtttggtcgacgcgctcgcggcggaggtcatccgacaacggcggaagcttggcggcgctgccaccggcagcgacctcctttcacgcttcatgggctccatcgacgacgacaagtacctccgcgacatcgtcgtcagcttcatgctcgccggccgcgacaccatcgcctcggcgctcaccgccttctttctgctcctctccgatcacccagaggtcgccaccgccatccgagacgaggtcgcccgcgttcacgggcgaacggcaaccgaaccatggccgccacattcgacaagctcaagggacatgcactatgtgcacgccgcgaatgtacgagagccatgcgcctgtttcccgccagtgccagttcgatttccaagttttgccgccggcgacgatacgctgccggacggcacggtcgtcgcgaagggcacccgggtgacctaccacgcctacgccatgggccggatggagtccgtatggggccccgactgcgccgagttccggccggagcgatggctccgggacggccggttcgtcccggagagcccgtaccgttacccggtgttccaggcgggcgttcgcgtctgcatcggcaaggagctagccctcatggagatgaaagccgtcatcgtcgccgtcgtccggagcttcgacatcgaggcgatcgcgcggagctcgcggcggcccaagttcgcgccgggcctgaccgccacgttcgcaggcggcttgccgcccaccacctgggatgctgaggcgtcggcagcgtgggacacagccagcagcggcaaggtggcggagctrgtgatctgccccatctacgcmaacytcccsgccgagctgcaggccaagatcttcgagccagcgccggcgggcgcgcgcaaggtggtgctcgscaccaacatcgccgacgccgagacgccgtacaacccgcgcacagcgatggagtcgtttctcgtcgcgccggtgtcagggcgtcggcggagcagcgcgcctgccggtcgggtcgaccgggacagcgacaccatcggggcgtacgtgtgcaacccaacgacaaggcggtgggcctccttgacgcagccggcgaccccgtggccccgcagacacgacggcgcgttcatcgccttcgacccggccgtctcgcagacacgacggctggcttgtggcgtggttggacgtacgccgacgctggatttgctcataccggagtcgtcgtccggagaagacgagctagcgccgtcgccggaggagaggacgttgcttctgcgcggtgttctctgtgtcccacgctgccgccgcctccgcatcccaggtcgtgggctgtag

SEQ ID NO: 4449 - DNA, 4323 bp, Oryza sativa
atgggctccgtgtcaccaccagcgccggaggaggacgcggccgccgtggagtcggccggggcggcggcgcgcatgttctggcatgagacaaagcggctgtgggccatcggcacccccatcgccatcggcaccatcaccaactacgccatcagctccgtgaccaccatgttcatcggccacctcggaaacctccccctcgccgccgcctccgtgggcctctccgtgttcgccaccttcgccctcggcttcctcctgggcatgggcagcgccctggagacgctgtgcgggcaggcgttcggagccgggcaggtgtccatgctgggcgtctacctccagcgatcctggatcatccttctcggcgccacggtcctgatggtccccgtgtacgtgctggccgagccgctgctcctgctggtggggcaggacccggaggtggcgcgcgcggcggggcggttcacgctctacatcctcccgggcgccttcgccttcgccgtgaacttcccgtcgggcaagttcctccaggcgcagagcaaggtgggggtgctggcatggatcggcgtggcggggctggcgttccacgtgggcatcacctacctcgcggtgtcggtgctggggttggggctcccgggcgcggcggcggcgtacgacgtgtcgcagtgggcgtcgtcgctggcgcaggtggcctacataatggggtggtgcagggaggggtggcgcgggtggtccatggcggcgttccacgacctggccgccttcctccgcctgtccatcgagtcggcggtgatgctgtgcctcgagatatggtacctgggcctcatcaccgtcctcacgggggacctggacgacgcccagatggcggtcgactcgctggggatctgcatgaacatcaacggctacgagggcatgatcttcatcggcctcaacgcggccatcagcgtccgggtgtccaacgagctgggctccgggaggcccagggcggccatgcacgccgtggtggtggtggtggcggagtcgctgctcatcggcctcctctgcatggcgctcgtgctcgccttcagcgacaagctggcgctcgtctacaccagcgacgcccacctgctccgcgccgtctccaggatcgctggcctgctcggggtcaccatggtgctcaacagcgtgcagccggtgctgtccggtgtggccgtcggcggcggatggcagggcctcgtcgcctacatcaacctcgcctgctactacctctttggcctccccgtcggctaccttctcggttactacttcaacctcggagtcgggggggtttggggtggcatgctctgtggagttgcacttcaaacactcattctactctttgtagtctggagaacagactggaaggcagaggtagagcttgctctaccttatagtcatttcattaagagaaatgaggtttacaggttacaagttaaaggaaggccgagcttgattcggatttgttggccagctgcatccttgatccctaatcctcctttaatggatttttcacctttccaaaagaaagcacgacttattttgtcagttgtctcgatagatttctctgtccaaatacatatatatcatcgcctgccattgtcatcatcgcataggagttcccaactgaagaattgctaccttcctaatttaaggaaggagagtgcaaggcttgccagcaagaggacaacttgttccgttgcaaccgagccgccgccttccacaaccgaagaaccagagatggatcttccaaaggagatattcctgaaagaatacaaaaagcctgattacttatttgactcggtcaatttggaatttcaacttggcgaagacaaaacaatagttacatctaaaatagctgtatctccaggaactgaaggtacctcctctccacttactcttcatgggcgtgatctgaagctgctatcaatcaaagtcaatggcaaggaccttaaggtggatctgtttgtcttggtcagggatggaggtttattatgtccaagtgtgagtgaagattatatggttgattcacgccatttgactgtttcaagaccacctggtggtacattcaacttggaaattgttacagaaatatatcctcagctaaatacatcattggagggactttacaagtcaactggcaatttttgcacccagtgtgaagcagaagggttccggaagattacatactttcaggatcgtccagatgttatggcaacatatacttgccgtatcgaagctgataagacgttgtatccagtactgttgtccaatgggaatcttatagagcagggggatcttgagggtggcaagcattatgcattgtgggaagaccccttcaagaaaccaagctacttatttgctttagttgctggtcagttggattgcagggaggactcatttactacatgttctggccgaaaagtaacacttagaatttggactcctggtcaagatttagcaaagacagcgcatgctatgtattctcttaaagcagctatgaagtgggatgaggaggtttttggccttgaatatgatcttgatttgttcaatattgttgttgttccagatttcaatatgggagcaatggagaacaagagcttaaacatatttcaatctagacttgtgctggcatcaccagagacagctactgatggggattatgctgcaattttaggtgtcgttggacatgagtatttccacaactggactggtaatagagtgacttgtcgtgattggttccagctcactctgaaagaaggattgactgtattccgggatcaggaattctcatcagatcttggttgtcgcacagtaaaacgtatagccgatgtttctaaactcaggacctatcaatttccacaggatgctggccctatggcgcatcctattcgtccgcattcgtatatcaagccaccatacagatctgatattaattcttctaattttactggcagatggacaatttttataccggtttatgaaaagggcatggatctttacttccaaaggcacgacgggcaagctgtgacttgtgaagacttttatgctgcaatgtgtgatgcaaataacacccagctgccaaactttttacaatgtcaagaagtgccacctacccctggccaaccagttaaagagccgatgttcattcctattgctgtcggacttgttgattctaccggaaaggatatgcccctaacttccatttacagtgatgggatgctccaatcactcactagtgatggccagccagtcttcactactgttcttcaatttaataagaaggaggaagaattcatatttaacaacatacctgagaaaccagtgccttccttgttgaggggatacagtgctcctgttcgtcttgattctgatctgactgagagtgacttgtttttcctacttgccaatgattcggatgaatttaacaggttgctctctgtttcctgttttaagtcatcttctcttttattggagatttttaatctgagaattcttgcattccttaggtgggaagctggtcaggtgctgtcacgtaaactgatgctcagtcttgtagctgacttccagcaacagaaaacactggccctgaaccctaaatttgttgatggacttagatcaatcctgcggaacacaagcttggataaagaattcattgcgaaagcgataactttgccgggtcaaggggagattatggatatgatgccagttgcagatcctgatgcagttcatgctgtccgtacctttattaagaaggagcttgcccttcaactcaaagatgaccttctttcaacagtgacaaataacagaagttctgaagcttatacatttaaccatgatagcatggcccgccgtgcattgaaaaacacatgccttgcttatcttgcatctctgaatgaaccggacaccactgaacttgcatttgttgaatacaagtctgctactaacatgacggagcagtttgctgcactagcagcattgtctcaaaatccaggccaagttcgtgatgacacccttctggacttctataacaaatggcagcatgattatttggttgtaagcaagtggtttgctcttcaagctacatcagacatccctggaaatgttgctaacgttcaaaagttacttggtcaccctgcttttgacatgaggaatccgaacaaggtggcctcccgcatggtgtcagctttctctcggtggaggcgatatgatgagagcagacaagctcttgctaaggctcagctggagatgatcgtgtcagccaatgggctatcagagaatgtgtacgagatagcttcaaagagcctggcagcttga

SEQ ID NO: 4450 - DNA, 876 bp, Oryza sativa
atggggtcgcggtacgaggtggaggtgacggtgtcgtcggcgcgggacctcaagaacgtcaactggcgcaacggcgacctcaagccctacgccgtgctctgggtcgacgacggcgccaagtgctccacccgcgtcgacctcgacaacgccgacaaccccaactgggacgacaagctcaccctccctctccccccctcctcccgcctcgacgacgccctcctctacctcgacgtcgtccacgccaacgccgccgagggcgtcaagccgctcgtcggctccgcccgcctcccgctccgcgacgtcctcgacgacgccggcgtaggcgcccgcgtctcccgctccctccgcctcaagcgcccctccggccgcccccagggacgcctcgacctccgcctcgccgtccgcgagtccgcgcgctactacgacccctcgccctacccggctccctacggccaacccgccggaacacgcgacccctatggcgccccgcctccggcctacagctccggctcaggcgggcagtacccgtacggtggtggctacggctcaggcgggtacgcggcgccgccggcagggtacccgagcgcctacggggcgccgccacagccagcgtacggcggcgcgcctcctgtggcggcgtacggtgcagcaggtggggcgccggtggttgtggaggagacgaagaagaagagcaagatggggatggggacagggctggcggtgggcgcggcggcgggcgtgctgggagggctggcgctggccggcggcgcgagctacctggaggacaagttcgaggagggcgtggcggagaaggtggaggacgatctcgacagagacgacgactacgccgccggcggctacgacgacgactattaa

SEQ ID NO: 4451 - DNA, 980 bp, Oryza sativa
atgagagcgctcgctgtggtggccatggtggccacggccttcctcgcggcggccgtgcatgccgagcagtgcggcagccaggccggcggcgcggtgtgccccaactgcctctgctgcagccagttcggctggtgcggctccacctccgactactgcggcgccggatgccagagccagtgctccgccgccggctgcggcggcggcggcccgaccccgccgtccggcagcggtggcagcggcgtcgcgtccatcgtgtcgcgctcgctcttcgaccagatgctgctccaccgcaacgatgcggcgtgcccggccagcaacttctacacctacgacgccttcgtcgccgccgccagcgccttcccgggctttgccgccgcgggcggcgaagccgacaccaacaagcgcgaggtcgccgcgttccttgcgcagacgtcccacgagaccaccggcgggtgggcgacggcgcccgacggcccctacgcgtggggctactgcttcaaggaggagaacggcggcgccgccgggccggactactgccagcagagcgcgcagtggccgtgcgccgccggcaagaagtactacggccggggtcccatccagctatcctacaacttcaactacgggccggcggggcaggccatcggcgccgacctgctcggcgacccggacctcgtggcgtccgacgccaccgtctccttcgacacggccttctggttctggatgacgccgcagtcgcccaagccgtcgtgccacgcggtcgccaccggccagtggacgccctccgccgacgaccaggcggcgggccgcgtgccgggctacggcgtcatcaccaacatcatcaacggcgggctggagtgcggccatggcgaggacgatcgcgtcgccgaccggatcggcttctacaagcgctactgcgacatcctcggcgtcagctacgacgccaacttggattgctacagccagaggcccttcggctccta

SEQ ID NO: 4452 - DNA, 3465 bp, Oryza sativa
atgaaccggcgcagccagatcctgcgcctgttgatgcgctaccgccattcaggcgtgttttccggcatgaacctggatgccgcgggcaatccggccgacgtaccggcagatggcaacccggaacagttcgtcagtgacctggaagccttggggcccaccttcgtcaagctgggccagatgctctctacccgcccggacatggtgccggtggagttcgccacggcgctggagcgcatgcaggagaaggtggccgagattccggtcgagcgcatccatgccatcgtcgagcaggaactgggcgccccggtgaacaagctgttcgctgcgttcgatcccgagccactgggctgcgcgtcgatcgcgcaggtgcaccgcgcggtgctgcacgatggccgccaggtagcagtgaaggtgcagaagcctgaagtcgccgcgcagctgcgctcggacctggaggcgctgcgcagcttcgcgctggccgccgaccacctgacccaggtcggccgccgcgtccgcctgcgcgactggctcaacgagttcgccaagaccctgatgcaggagctggactaccacgccgaggccgagaacctggcccgtttcggccgacacctgaagccgttccgccgcctgtggataccgcagccgctgtgggactacagcagccagcgcgtgctgaccatggaactggccaccggcgtgcgcgtggatgcgattcccgatgtgcgccgcaccgagcaatcgatggatccgctggcggcggcgctgatccgcggctacctcgaccagatcttcgtgcacggcgagatcacgccgacccgcaccccggcaacctgcggcatcagcacgcggctggaggcgttcgacgaggaacgttatctgcgcgagaccggccagttgatcgcgcgttacgccgccagcggcacgttctccgaaggccgcgtggtgctggacatggtgcgcatcgccaccgcctgcgggctgcgcacgccgccggagctgagcctgctgggcaaggcactgctcaacctggaaaccgtgtgccggctgctggcaccagagctggaaacacgtcgcatcgtcgagcgccagctgcagcacgtgatgcgcgcacgcctgaagaaatcgctgtctgccgccaacctcgccagcgaggcgatggagctgcagcagctgctgcgcgatgggccgcgcaagctgtcggacatcatggccctgctggccgaaaaccgcctgcagatgaaggtgaccggcctggaagaatcgcggttgatggagaacctgcagaagatcgccaaccgcgtcgcggccggcatcatcagcgccgcgttgatcatggccgccgcgatgatgatgaagatcgacaccggctggcatctgttcggctacccgctgattgcgctgattctgttgttcatcggcgtgtgggtgtggtggaaggccagcgcattctcgctgctgctgctcatgctcagcgcatggtggctgatcgacaagctgtccggtgatggactcaacgctgcaaccctgtaccacctcggcgccgacatggaaggcgccggtgtctccgacttcaagggctacatcgccggcttcatcgtgctggcgctggtctcgctgctgccgctgttcgccacgcgggtgaagcgctggcgccggcccggccacggtggcgcgttgttcgccggtttcgcggccgtgtgggtggccacgatcatgatcagcccactggcccgcgacggccagcgcctctaccagcagctgcgcccggtcgacttcgcgcgcatcgcccccgagtaccaggtgccgacgcagccgctgcagcgcccgcgcaacatcgtctggatctacggcgaaagcctggagcgcacctacctggatgagaacgtgttcccgggcctgatgcccaatctcaaccggctggccacaaagtcgctggacgtgcgcgggctggcctcggccgaaggcagcggctggaccatcgccggcctggtgtcgtcgatgtgcggcttgccgttgaccacctcgcagggcgatgagaacagcatggaccgcatgggcagcttcctgcccaaggcggtatgcctgggcgactacctgaagcagcagggctacaccaaccactatctgggcggtgccaacggccagttcgccggcaagggccagttcctggccagccacggtttcgatgtagtgcatgacctggcctggttcaagcagcagaagaagatcggccgcatccactactcggcctggggcgtgcacgacgacgtgctgctggacaccgcctaccagcgcttcgagcagctctcgcgcgccggctcgccgttcatgctcaccacgctcaccatggacacccaccacccggcgggccacctgccggtgtcgtgcaagggcgagcgctaccagagccagtacggcaacatcaacatgctcaacgcgctcaaatgcagtgaccggctgatctcgcagctggtcgaacgcatccaggccagcccgtacggcaaggacacgctgatcgtgatcgcctccgaccacctggcgatgcccaacgatctgacccacatcctgacccggcagaagcgcgagaacctgctgctgttcctgggcgatggcattgcgccgcagcagctcagcgccgacgccggcaccacgctggattcgggtgcgactctgctcagcctgctggacccgaacctgaagacgatgggcttcggccgttcactgatcgacccgcaacgcgcgcccagcgccagtgtggccgcgcgacgcgaccagggtcgcgactacccgcagtatctggcgttcgcccgttcgctgtggctgggtgaacctacgcgtgaactgaagatcgacggcgacgaccaggtggtggtcggcctgcagcacgtgcagccaccggtgctgctggagtacgacaaggactggggtttgaagtcggtctacctggagaacacctcgcgccagttcgatgacgcggatccggacaacacgctggcctatgttgatcgctgcaccgcgttcgaggacggctcggccgacggcgactggtgtgcgctgctggtcaaccgcgacaacggcatcaagctgtaccgcgacaacgacctgcgtgccggcatcgccgtggatgcgccgctggatgcgttccagggaccgcgaccgagcgtgcgccaggcgcacatgatcacccagaagggccgccgtacccgtgccggccagtacatgttgcagctggtggcgagcacgcgcccggatcgcggcttctggatcgaagcagtgtcgtcgcagcgcaaggtggtgctggcccagcagtgggtgcagcccgatgccgacggcaagatcaacgtgacgttcgggctggaccacgaagtggatgatctggagatccgcgcgtggttgaaccatgccgagaagctggcggtggatacgttcgcactggtgccgtcgcgcagccgaccgcgagggtag

SEQ ID NO: 4453 - DNA, 1992 bp, Oryza sativa
atgcagcggcaggggaggagcctgcagaggtcgggctcgaagcgtgtgctcgaccccaccggcggcggcggcggcgacgacgacgaccatgcggccaagcggcctcgcgtgcccgctctcgcaaggagtgagtgcaggctgcctcagaaatgctatgcaaaattttccaaggttaaccatcaacattttgttgaattaaaaggcaatgatctcacaaccattgtcattgtggaagctcttaaggtggatagtttgcagaagctttgttcatcactggagccaattcttcgtagagttgtaagcgaagaggtagagcgtgctttagccaagttgggtcctgccagaattcagggaaggtcctctccaaaaagaattgaaggacctgatgggagaaatcttcagcttaaatttacaactagattatctctaccactgtttactggtggaaaagtagaagggcctgaatcgtgtgcaaaactggatgttcttgtgcttgagggtgacttcaacaacgaggaagatgaggattggacggaagaggagtttgagagtcacattgtcaaggagcgtgaagggaagagacctcttttgacaggtgaccttcaggtgacccttaaagaaggtgttggaaccataggggagcttattttcactgataactccagctggataagaagcagaaaattcaggcttgggctgagggttgccccagggtcttttgaaggtattcgtgttagggaggcgaagacagaagcttttactgttaaggatcacagaggggaattgtacaaaaagcactatccacctgccctaaaggatgatgtttggagattagaaaagattggcaaggatggtgcattccacaagaagttaaatgcaagtgggatttatacagttgaagattttctccagcttcttgtcaaggatcagcagaggttacggagtattcttggcagtggaatgtcaaataagatgtgggaaagccttgttgagcatgcaaagacttgtgtcttaagtggaaagcactatgtatattatgctattgactcaagaaatgtcggtgcaatattcaataacatctatgagttcactggtttgattgctgacgaccagttcatttcagcagaaaatctcactgacaaccagaagatctatgcagatggattggttaagaaagcatatgaggattggatgcatgttgtagaatatgatggcaaggcactcctgagcttcaagcagaaaaagaaatctgtcacaacaagaagtgacacggctgcagcagcaacaaacagccctgtttcctatggttcatccaacacacacaaacaattgtctcaaccagcaaaagcagggcaaacttctacaggcactacaagtgaagcagatggatctacaagtgcatacaatggaaatcaggcaggacgatatgcagtcaattctcaaagcatacctgcaaacgtcactacacaatatgagcggagttcactgacacctgaaagccagttcaatggttccgcactgcagaatcaagtttctaggggctccaatatactggcattgggaccaccacagcaacaacatcagcaaaattttgaattctcagcactaggtggccagtccatgcagcccaccggcttgaatcctttcgatgactggtcgcaaccgcaggagaaccggagtggggttgacgactacctgatggaggagatcaggatgcggagccacgagatattggagaacgaagagatgcaacagatgttgcggattttgagcatgggtggcgcgtcaaccaacctgacggaagacggcttcgcatttcctaactacatgccatcaactccccccaacttcaactttggggatgaccgtgcccgcccacctgggaaagccgtcgtcgggtggctcaagatcaaggcagctatgcgctggggcatctttgtcaggaagaaagctgccgagagaagagctcagcttgttgagctcgaggactag

SEQ ID NO: 4454 - DNA, 1596 bp, Oryza sativa
atggggcccggaacctggcgcaaggcctacggcgcgctcaaggactccaccaaggtcggcctcgccaacttcaacagcgagtacaaggatttggatatcgccattgtgaaggcaaccaaccacgtagagtgcccgcccaaggagcgatacctcaggaagatactctttgcgacctcggcgaatcgaccgcgatccgatgttggttactcaatatgtacattggctaggagattatccaagaccaagaactggattgtcgcattaaaaacattgatagtgatacatagattgctcagagaaggtgatgggacatttaaagaagacttcttgaactattcttatagaggaactattttgcagattccacaattcaaggatgattcgagccctttagatgaacgggtcgagtgctttagaattctaaaatatgatgttgaagcggatcgcctggtgaaattaccccaagcttctggcaagcctgaaggtgcagcctgcacaaattatcttgtacaatatgcattggcccttgttttgaaggagagcttcaaaatatactgttcgatcaatgatggcatcatcaatcttgttgatatgtatttcgatatgcaaaaatatgatgctatcaaggcacttgaaatttataaacgagctggctatcaggcagaaaagctttctgctttttatgagcactgcaaacgtcttgaattggcaaggactttccagtttcctactttgaggcagcctcccccttcattccttataacaatggaagagtacatcagagaagcaccccgtgtcagcatagcaagtaaaagtttggaaagcgaggagcagaattcacctagtgataacgaagatgaagctccacaggaaacagagaaaccagtggatgaggaggaacaagaaccttcagagcctgaagaagagccacagcctacagctgagtccgtggaaggaacagagccggtaccactagcaactactggggatctgttaaatttcgacgaagaagtaaaccccctgattgcaaatattgaagaaagtaatgcactggctcttgcaattgtggcaccagggaatgaaaacaaggcctcagcttcacaagatttgtttgcgctggacaagtctgggtgggaattggcactggttaccgcaccaagtacccacacaagtcgaccagttgacaatcagttggctggaggatttgacaagctactgctagacagcctgtatgaagatgaagcaaggaggcagcaaatagccagtgcaacctacaacggcagcgttgcaggaaacccatttgatcccaacgatccatttgcaatgtctaataacttcgcgccaccgtcgaatgttcagttagccatgatgcaacagcagcatcaggattatcaggagcagcagcagcagtattatcagattcagcaacagcagcaaatggtgacgttgccgccgcaaacataccatcagcagcagcagacacagtattctgctcttccttctcatgatggattatccaatccatttggtgatccattcggtggccttgttgcgatggctaatcctccaaagcaaaacaattcaaatttagtctga

SEQ ID NO: 4455 - DNA, 1443 bp, Oryza sativa
atggaaggggagatggatactgtggtgggttcatcatccaagccatgcgggccgctgacggattaccgcattccggattacatcctgaggccggatgcgcagcgggtgcttcttgatcatgcgcccccgtgccccgtgctggtgttcatcaattctggatctggtggtcagctcgggagcagcctgatcaaaactaccgtgaacttctcggttttcgatgtctccgaagaggctccggataaagtgttgcaccgtttgaatgtcaaccttgagaagctcaagatggatggagacattcttgctgttcaaatttggagaactctcagaataattgttgcaggtggcgatggtacggcaagctggctgcttggggtagtcagtgatctcaagctttcacaccctcctccaattgctactgtgcctctgggaaccggaaacaaccttccattttcatttggatggggaaagaagaatccttgtactgaccaagagtcagtaaaatcattccttgggctagtgaggcatgcaaaagagatgaaaattgatagctggcatatcatgttgaggatgcgagctacaaaggaaggtccatgtgatccaatcgcccccttagagttgcctcattcattacatgcatttcaccgtgtgtcaagtagtgattccctcaatatggaaggttaccacacattccgtggaggattttggaattactttagtatgggtatggatgcagaaatttcttacggatttcattctgaaaggaagaaaaatccagagaaattcaaaaaccagctgacaaatcagattctgaattactcgaatattgctcaacttgcaagtgtgaaaatcatgaaaagagccggtagccactggcaagaacttaacattcaccacagcattcgatcaatcgtctgtctcaacctgcctagtttctctggaggtctgaatccttggggcacacctggcacaaggaaagtagaagagagggagctgacggcaccttttgtcgatgatagacttattgaggttgttggattccgtgatgcctggcacggacttgtcttgctggccccaaatggacatggtacccgccttgcgcaggcccaaaggatccgtttcgagttccacaaaggcgcagcagagcacaccttcatgaggatcgatggggagccatggaagcagcccctcccaaaagatgacgacaccgttgttgtggagatctcccaccttggtcaggtcaccatgcttgccaacgagccctgcaagtcgaagagcgtccatgacgaccaatcctcccacgcacaacacagcggccatggcaacaacgacgacgacaaggacagcatggaggacgaagatgagtgggaggatggcaggaggaagtttggtgccgcagatacattcaagatccctgacgaggttgacattgctcacctcagctga

SEQ ID NO: 4456 - DNA, 1662 bp, Oryza sativa
atggctgggggtggaacgagcatcaggaagtatgttggagccctaaaggacacaacaaccgtaagcatagcaaaagtgaacagcgattataaggatttggatattgctattgtgaaggccacaaaccatgtcgagaatctaccaaaggagaagtacataagaggtgatatcttttatcatctctctgctggaagggctcgagcagatgtagcatactgcatccgtgctcttggtaggcgtctttcaaagacacgcaactgggcggttgcacttaagaccttaatcgtcatacaccgtgccctacgggaagttgatcccactttccgtgatgagctcattagctatggaagatccagtacacatatgcttcatttgtcctactttaaggatgattcaagtgcagaagcttgggattattctgcatgggttcgcaattatgcattgtacttagaagagagactagaatctttccgtgtactgaaatatgacgttgaaaaagatccaccgagaactcgagacctcgacacggttggtttgcttgaacaactgccagcactacagcagcttctttttcggctactcggttgccaggttgctctagagagtgttaggatccatacagctatcaacgatgggatactgaatctggttgacaagttctttgagatgcaaagggatgatgctcttagagcccttgacttattcaaaagagcaattaaccaggcgggacaactttctgaattttatgaaatgtgtaaaaccatacatattgggcgtggcgagaggttcttaaaaattgaactgcctccgacctcattcctgcaagctatggaggagtatgtgagagatgcaccccttgcttcaataaaccaaagaaatcaggctgtactagcaatagagtacaaaagaaaaccagaggatgaagaatcatcaagttcagctcctctgccgccgcctccagtatcaacttcagaatctgaacctgaacctgagcctgagccagttaaagaagtctcacccgtacatgagccaaccgatttgctgggaatgaatgaaccgacccctgacgtgtcaaaaatcgaccaaaagaattctttggctttagcaattgttcaaccagacaatacaccaaaagccgctgctcctactactgaaaacgttgccactagctgggagttggcacttgtcgccgcgccaagttcaaatggcaatgctgccacctcgaacaaactggctggtgggctggacttgctcacccttgacagcctatacaacgaggcgcaccgacaagcgcaacagaacgcaagctacaacccctgggaggcagcagccccagcatcatctggcccaatgatgcagcagccaatgcagaacccgttctacgcctcgaacgccattgctccgcccttaaacgtgcagatggccgccatggcgcagcagcagcagcatatgttcatgctccagcagcagcaacaacagtatgatcagcagcagcagcagatgatgatgatgatgggaaggcaaccgtatgatcagcagcaaggctcttcttccaatccgtttgctagtccatacatgtctgcaggagttcacccgtacggtccggggatgcagctccatgccggcaattcgtacacatactctgggacaggcatgatgtag

SEQ ID NO: 4457 - DNA, 4986 bp, Oryza sativa
atggacggggggacggggccgggggcggagctgctctcgccgggggaagccgagtggccgcccgagctccgcctcccgcctccgccgccgccgcatcctcctcctcctcccccgctcgagccggctccgccatccactccccagctccgcggcgaggcgtccccgcccccgcctccgcctccgcccgtgggaccacccggcgcggcggtggtggccgccgccgcgaggaaggaggcgtccgcgtccgccgaggggtttgatgactcgcacttcctcggatcgatcatgggggcgcccgcgcaccagcaccagcaccagcaccagcagccgcctgccgtggggccgccggtggtggtgaagaggaagagagggaggccgccgaagaacagggatggagcggcgccgcctccgccgcccaagccggtgaagaagagggaggacgacgaggacgtggtgtgcttcatctgcttcgacgggggcaatctcgtggtctgcgataaaaagggttgcacaaaagtctatcatcctgcttgcatcaagcgcgacgaatcattctttcgatctcgggcgaaatggacatgtggttggcacctatgcagcacctgtgaaaaggcagtacagtacatgtgctatacttgtacatactccctctgcaaaggttgcatcaaacaaaagccagtcaaattctttggtgtcagagggaataagggcttctgtgatacctgctatagcactatactgttgatagaatccaaagatgatcgtgccaaggctaaggtggacttcgatgataaaaataattgggaatatctcttcaagttgtattggttggatcttaaagggaaacactctctaacattggaagaacttgtcaatgccaaaagctgttggactgttcgtagcacttccgctaggagagaaaaggaagattcatccaatgacctctatgatgcaaattttgaccttgatgccagttctgatggcgcctcaagaaaacgaagacggaatagtttttccagggaaaaggggacggaaacgccaaaacaatggaaaccacatgttggccactttgagatgttaaagcttttggaaatgcattttcatgcgaaggagacggtaaatggtgatggccaaaaaggcattgactcagattcagctcaaatagacagtggaggatatagtgatatgccaagtaaattatgctctgataagaggaggaagattcataagaagattgagagagaatcaccagctaatctagaggattatgcagcgattgacatgcacaatatcaatttgatttacttgcgccgcagcttgctagaggatcttattgatgataatggcacgttctctgacaaaattactggtgctttcgtgaggataaggactccttgtgttggccaaaagcaagatatttaccgcctggtgaaagttcttggtacacataaagtagcagaacggtacagcgtcggtaagaagacaactgatcatgcgcttgagatattaaatttagataaaaaggaggttatcacgatggatacaatctcaaatcaagatttcacagaggaggaatgcaaacgcttacgccagagcatgaagtgtggtttgattacccgactaaaagtggtactgttgatcaagattcattatacgggagacatccatgagaaagccaaaatattccaactgctgcgagttaatgattggttagaaaatgaaaagcagagactgagccatctacgtgatcgtgctagtgaaactgggcgcagaaaacaatatccttttaacttaatcaaagatttgcatgcctatggtcatcatagattaatctatgaagcgttcaattcataccatcattgcgaaattattatttgcatgaggatacatttcttcatgcatactttactaatggagtatgtggagtgtgtagagaagttgcaacttctgggcactcctgaagaaagagcacgcatcattaatgaagatccagaagtacatgttgacccatgtatgtctcctgattatgaatctgctgaagaattggatgttaagaaagctgttgattcgacaagtaggaatggatcagacctgttatttcttggaagaaaaggaatcgaaacaaactctctgcagaatcatagacaaaattgttctgccactagtcatcacacgactacaagtccacctactgagggtatgactcatggacaaggagaagaagcatcgtttgcatcgtcagaaattgtatcaggtgacatggaaccagaaaaagtatggcactacaaggatccttcaggaagtgttcagggcccattcacacttttacagctgtccaagtgggcagcttatttcccacgtgacctgagaatatggctaacatttgagagtgaacaaaactcactgcttttgactgaagttctctcgaaacaacaaaaagatttcattcagccttctcccaaagttgacaataataggtcaacatgggaaggcgttgggcaagatagagttgactcaagtttgactggaaataactcttcctctcctattggttataatgtgatctactcttctcggttgcctagcccatctgctgactattgtgcatcagctagagaaggcccaaaccttccgagtggaaccttgccattcatgacaagccagaaaacacaaaaggatcctcagatgttgcatggccaggcacagcatcagggtgattattcatgtaccatcccgtcatctgtggtttcatatagaccagctggttctcatgatgagtggccccctcgaggcaacattggtgaatggaacaatagtcaggatagtggtggtatgtggagcccaaccacacctcacatgagtcggagcaatttggagcatcagcctgacaggtgtattacgaagaagcaattgcagaatgattccaaacgtaatacgctagcaggatctgcagaaaatctaaattcccaaatggattttggttcacagaaagtacacattcctactccacaacaacctgagagagatcttgccacttctgttggtacttcaaggcaatttgagtttaaaacttgtcatcaggaaggctctcactggagttcaacagcagactccattactcatgatgggcttcaattatctcttgcttcagcaaagcctgagagctgctctgcagtaaatcctattagagatggagattccagttcagcttctcgtgtgcctaatcaatcaggagctcatgtctatagcccaccacacccagctacaactaatttaagcaagagtgaggagactatgaatcagtgtaaatcgtgtgagcctgaagcatcaaataaatcacgcaagcctgatgcatcacatgctccagttaatcaacatcctaagcctgaaagtgatccattgttacctgatactcaagattttgagcgcacgcatcctagcccaagtactgaacatgacacaaaggagccattgaaggatcaatcgaggtcaacatcagtagcacctgaagggtcgggtacaatggcacatggacagtcttccatagcttttatatcagaagcatctggcccactttctagtaaaattgttggcttgcaaccacccaaggatacatcatttcttgtcgaaaaagatataaaagatggaggttccattacacaaacagagcaacaaaaagaagagagtacagcatttaagaaagagaacgtagctgttgatcctatctctgacagtgaagcaatagtatctggtgtgttggaatctttgacagagacatataatctgcatgaagaaaccgctttggaaaatttcacgccaacatctgccgaggaagaacaaccgcaatgctctacccctattgcattatctccttgggatgaaacaagtgactatcaaggtgaagctgttgattctgctctatggggtgtccaagatgaccaaaacaatgaaatgtggtcattgtcttcaccaacacctactctccaaccttcaggtattggagctgataccaaaggtgcttcctgtgctatagaagaggtgatagtagcccaaggaaatagtggtgttgttgaaccgtcaccagcactggagaagaaaaggattgaaaaagtaccaagtgcttccatagatcgtggagtaccagagcaggtaaaaccaaaatcagatgctgcattatctccagaagagagcagaaaaccttcaggtttgcaactatcaagcacatatctacaagggagcacaaaatcttcaggtttgccaccgtcaggcacatctctagatgggggcatagaaccttcaggtttgctaccttcaggaacttctttggagtggggtacaaaaatttcaggtgtgcaatcctcggcctcatctctagaggggagcaaaaaggcttttgttaggcaaccatcaggctcttcactagagggaaacacaaaagcgtcagaaaagcttcagcatggcaatcatcaggttcttcgcctgttgcagggagctcaaaagcatcaggttggcagccatcacctcgcgagagctcgaaatctaagcctaattccacatggggtgccggccaaagccgcaactcgtcttcgcaccaatcaacaacaccaacagctaaatactcatcagaaaccccaaggagacaaggaaacaacaacacaaattctgctggctggggagactctctcggaaacaagagctggcattcaccctcaggcaatgcgagcagccgaggcagccattctagccaccaccatgaccggcacaatcagagcagcgaaccatggcgtggtggctcaaatcattccaggagatcagatcatcgtcaagaacatggcaacggtggctcgtcgagatcatcgtcgtcgagggggcaatctcaaagggggatctgtagatactacgagaatggctactgcaggaagggcacttcctgccagttcctccaccgttgaaaacgccctcacatttttgtacagccctaaatga

SEQ ID NO: 4458 - DNA, 1452 bp, Oryza sativa
atggaggcggacgccgggaagctgttcatcggcggcatctcgtgggacaccaacgaggaccgcctccgcgagtacttcgacaagtacggcgaggtggtggaggccgtcatcatgcgcgaccgcgccaccggccgcgcccggggattcggcttcatcgtcttcgctgaccctgccgtcgccgagcgggtcattatggagaagcacatgatcgatggccgcatgattcatgatgatgatgatggtgtgctagatccatccatggtggtggaggcgaagaaagctgttcccagggacgatcagcacgctcttagcaagagcggcgggagcgctcatggatcgccggggcccagccgcaccaagaagatattcgttggggggctagcgtccaccgtgacggaggcggacttcaggaagtactttgagcagttcgggacgatcaccgatgtcgtggtgatgtatgatcacaacacgcagcgtcccagaggttttgggttcattacgtacgattcggaggatgctgtggacaaggcattgttcaagaccttccatgaactgaacggtaagatggttgaggtcaagcgcgcggttcctaaggaactatcacctgggcctagcatgcgttctcctgtcggtggattcaactatgccgtgaacagagccaataacttcctcaatggatacacccagggttataatccgagcccagtcggtggctatggaatgaggatggatgcaaggtttgggcttctatcgggtggccgtagtagttatccttcttttggtggtggttatggagtcggtatgaattttgatccagggatgaaccctgctattgggggaagctcaagcttcaacaacagtctccagtatggaaggcagcttaatccatactacagtggaaattctggtagatacaatagcaatgttagctatggtggagtcaatgacagtactgggtcagtgttcaactcgctggctcgtaatttatggggtaattcaggtcttagttactcttccaactctgcaagctctaattccttcatgtcatctgccaatgggggccttggtggaattgggaacaacaatgtgaattggggaaaccctcctgtgcctgcacaaggtgctaatgctggcccaggctatggcagtgggaacttcggttatggatccagtgaaaccaactttggtctcggtaccaatgcttatggaaggaatgctggatctggtgttgttaatacattcaatcaatcaaccaatgggtatggaaggaactttggagattcatcaggaggagttgccgttgttgccgtggctccatctatggagacacaacttggagatccggatcttctgagcttgatggaaccagcccatttggctatgggcttgggaatgcagcttcagatgttacagcaaagaactcagcaggttacatggggcattaacaaatag

SEQ ID NO: 4459 - DNA, 2532 bp, Oryza sativa
atgctcctcgtcggcgtcctcctgctgctcttcttcaacctacatctccccacggccgccattgacaccctcacgctaggccagtctctgctgtggaaccagacgctggtctccaatggcggcaacttcgagctcggcctcttctcgccgggaaagtccaacaagcactaccttggcatctggtacaagaagatctccaagaagacggttgtttgggttgccaaccgtgagcgcccgattcttgagccgtcgagctgccacctcgagctgagcgtccacggcgatctgcggctgttctcgacggcgccgtcgaacaccttgctgtggtcgtcgaacgcgtccgcgtcttcctcgccgtcgcccccgcgcaccaccgtcgccacgctccaggacgacggcaacctcgtggtgaacagcaacgcgacgcggtcgcggtcgcgatcgccgtcgtcgactacgacgacgcacgtggcgtggcagagctttgatcacccgaccgacacatggctccccggagccaggctcggctacgacaggggccgcggcgtccacagcttcctcacgtcgtggacggactccgagaacccggcgcccggcgcgttctccatggtgatcgacgcgcgcgggctggccaagttcgacctcctcgccggcggcgagcaccggtactggacgaccggcctctgggacggcgagatcttcgcgaacgtgccggagatgcggtccggctacttcaccggcgtcccctacgcgccgaacgccagcgtcaacttcttcagctaccgcgaccggctgccgggcgccgtcggcaacttcatgctggacgtgaacgggcagatgcggcggcggcagtggagcgagacggcggggaagtggatcctcttctgctcgttgccccacgacgcgtgcgacgtgtacggctcgtgcgggccctttggagtctgcagcaacgccaccaacccggagtgccggtgccccgccggcttcgagccgcggtcgtcggaggagtggaggctggagaacgccgccggaggctgcgtgaggcggcaccctctcgagtgtcacggagacgggttcctggcgctgccgtacaccgtgcggctcccgaatggctccgtggaggcgccggccggagctgggaacgacaaggcgtgcgcgcacacctgcctggtcgactgctcctgcacggcctacgttcacgacggagcgaagtgcctcgtgtggaacggcgagctcgtcaacatgaaagcctacgcggctaatgagaatggccaaggcgatcctggcctcgccggagcggtgcttcacctccgtgtcgcccactcggaggttccggcgtcgtcgacggagcactcgtggaagaaatcgatggtaatccttggaagcgtcgttgcggcggtggtgctgctcttggcgagcctcgtcaccgtggtggcggtggcggcggtgttgcggatgcggcgtaggaggggcaaggtgacggcggtgcaggggtcgctgctgctgctcgactaccatgccgtgaagaccgcgacgagggacttctcggagaagctcgggagcgggagcttcggcacggtgttcaaaggcgcgctgccggacgggacgcccgtggccgtcaagaagctcgacggtctccggcaaggcgagaagcaattcagaacggaggtggtgacgctcggcatgatccagcacgtcaacctcgtccgactccgtggcttctgctgcgagggaaacaagagggcgctcgtgtacgactacatggccaatggctcgctggactcgcacctgttcgtcatgagcggctccagctccggccccgactccaagcaggtgaccctgacttggagccaacggtacaacgtcgcggttggtgtggcacggggcttggcttacctgcacgagaagtgcagggagtgcatcatacactgcgacgtcaagccggagaacatcctcctcgatcaggagatggcggcgaggctcgcggacttcggcatggccaagctcgtcggccgcgacttcagcagcgtcctgaccaccatgcggggcacggtgggatacctcgcgccggagtggctagccggcacgccggtcaccgcaaaagccgacgtgtacagcttcgggctcctgctcttcgagctcgtctcgggccggcggaacagcaccgcgccgtcgtcgtcgtcggagggcggccctgggatttacttcccggttcatgccgtggtcaagctaaacgaaggcgacgtggccgggctggtcgacgagagggtggccaaggatgccgacccgaaggaggttgagagactctgcaaggtcgcgggctggtgcattcaagacgaggaaggcgaccggccgaccatggggctcgtcgtgcagcagctcgaaggcatcgccaacgtaatgttgccgccgatcccttctcggcttcatatcctggcgattgagaacgaatgggtcagaggtgttccagaggatgagcgctgctcaaagagcggtagtaaaccagaaacagaagcaatagaagaaatgtag

SEQ ID NO: 4460 - DNA, 1035 bp, Oryza sativa
atggccaccgtctccggcaccgaccgcctccgtgacctccacgccttcgacgacaccaaggccggcgtcaagggcctcgtcgacgccggcgtcaccaccgtcccctacttcttccgccaccaccccgaccccctccccgtcgccgcgccgtcggaggccgcctcggccatcccgctcatcgacctcgccaaggccgacgtcgaccggggacgggtggtcgccgaggtgaggrcggccgccgagacggtcggcttcttccaggtggtcaaccatggcgtcgccggggagctcatggacgagatgctcgcggcggtgcggcgcttcaacgaggagcccctggaggcgaaggtgccctactacaccagggacgtcgccagcaaggtccggttcaactccaacttcgacctcttccgttcgccggcggccaactggcgggacacgatgttcgtcgagatgttcccggaggtgccctcgccggaggagatcccgccgccgtgcaggggcgtgctggaggagtacgccgcggcggtgcggcggctcggggaacggctgttcgagctgctgtcggaggcgctgggcctccctgcggggtacctcggccgcgacgccgggggcacggacgggctgagcgacgagtccggcgggctccaggcggtgctcccgcggcccccggaggagcggtgggtggatgtgcccccggtggccggcgcgctggtggtgaacgtcggcgacctcctccagctggtgtcgaacgagaggctccggagcgtggagcaccgggtgctgcccaccggcgccgccgggccggctcgcgtgtcggtggcgtgcttcttccgcctcgcgtactcgtcgacgaggccgtgcgtcccggtcgtcggcggcggcagcggggcgcgggcggcggcggtgtacaggagcacgacggcgggggagttcctggcgcactacaacgggaaggggctcgacgggcggtcggcgctggaccacttcaggattccggcggcggcggcgtctcctcctcctccaccacagtag

SEQ ID NO: 4461 - DNA, 2960 bp, Oryza sativa
atggggtctggctcactcctcctctccctcttgctggtgctcgtcgtcgtcaatgtcggggtggcggtgaaccaggacgggctgtccctgctcgacgcgaggcgcgcgctcgccgccccggatggcgcgctggcggactggaacgcgcgcgacgccacgccctgcagctggacgggcgtctcctgcgacgccggcgtcggcggcggcgccgtgacggggatctccctcgcgggcctcaacctcaccgggtcgttcccggcggcgttgtgccgcctcccgcgcgtcgcgagcatcgacctgagctacaactacatcggccccaacctgagctccgacgccgtcgcgccgtgcaaggcgctccggcggctcgacctgtcgatgaacgcgctcgtcggcccgctccccgacgcgctcgcggccctcccggagctcgtgtacctcaagctcgacagcaacaacttctccggcccgataccggagtcgttcggccggttcaagaagctcgagtcgctctccctcgtctacaacctgctcggcggcgaggtcccgccgttcctcggcggcgtgtccacgctccgggagctcaacctgtcctacaacccgttcgtggcggggcccgtgcccgccgagctcggcaacctctccgctctgcgcgtgctctggctcgccggctgcaacctcatcggcgccatcccggcgtctctcggcaggctcggcaacctcacggacctcgacttgtcgacgaacgcgctcaccggctcgataccgccggagattacgcggctgacgagcgtcgtgcagatcgagctgtacaacaactcgctcactgggccgattcccgtggggttcggcaagctcgcggagctccagggcgtggacctcgccatgaacaggctcaacggcgccatcccggatgacttcttcgaggcgccgaagctggagagcgtgcacctgtacgccaactcgctgacggggcccgtgccggagtcggtggcgaaggcggcgtcgctcgtcgagctgcggctgttcgccaaccggctgaacggcacgctgccggccgacctcggcaagaacagccctctggtgtgcgtggacatgtccgacaactccatctccggcgagatcccgccggcgatatgcgaccgcggcgagctcgaggagcttcttatgctcgacaataagctctccggtcgcatccccgacgggctcgggcgttgccggaggctgcggcgggtgcggctgtcgaacaacaggctcgacggcgacgtgcccgccgcggtctggggcctgccgcacatgtcgctgctcgagctcaacgacaaccagctcaccggagtgatctctccggtcatcggcggcgcggccaacctgtccaagctggtgctgtccaataaccggctaactggtagcatcccgccggaaattggctcggcctcgaagctgtacgagctctccgccgacggcaacatgctctccggcccgcttgcccatgggtactcttgtcagctgctccggggaatcaattcttggaagaagcttagtgagctcaacctcgccgacaatggctttaccggagcaattccagcagagctcggcgatttgccggtgctgaactaccttgacctctccggcaaccgtctcaccggtgaggtaccaatgcaattggagaatctgaagctgaaccagttcaatgtctccaataaccagctcagtggcgcgcttccgccacagtatgcgacggcggcatatcgaagcagcttcttgggcaacccggggttatgtggagataatgccggtctatgtgccaattcacagggaggtcctagatcccgcgctggcttcgcctggatgatgcgctcaattttcatatttgcggctgttgttctggttgctggagttgcgtggttctactggaggtaccggagcttcaacaattctaagctaagtgccgaccgttcgaaatggtcattgacatcattccacaagctctcattcagcgagtatgagatcctggattgtcttgatgaggataatgtgattggtagtggcgcatccgggaaagtgtataaggcagtgctcagcaatggtgaggtggttgccgttaagaagctttgggggttaaagaaggggacggatgttgagaacgggggtgaaggatccacagctgacaacagctttgaggcggaggtgaagactcttggcaagattcgccacaagaacattgtcaagctctggtgtagctgcacgcacaatgacaccaagttgctggtgtacgagtacatgcccaatggtagcctaggagatgtgctacacagcagcaaggctggtttgctggattggtcgacgcggtacaagattgctctggatgcagcggaggggttatcctatcttcaccatgactacgtccctgcgatcgtccatagggatgtcaagtcgaacaacatcctcttggatgctgaattcggtgcccgtgttgcagactttggggttgccaaagtggtagaagccactgtccggggccccaagtcgatgtcagtgatcgcgggttcatgtggttacattgcacctgagtatgcatacacactccgcgtcaatgagaagagcgacatatacagcttcggagtggttcttcttgagctcgtgacagggaaaccgccagtcgatccagagttcggcgagaaggacctggtgaagtgggtgtgcagcacaattgatcagaagggggtagaacatgtcctcgacagcaaactcgacatgaccttcaaggatgagatcaacagggtgctgaacatcgccctcctctgctcgagctccctaccgatcaaccgcccggcgatgcgcagggtggtcaagatgctgcaagaagtgcgcgccgaggccacaaggccaaggctggagaaggacggcaagctgtcgccatactactacgaggacacctccgatcaagggagcagcgtgta

SEQ ID NO: 4462 - DNA, 960 bp, Oryza sativa
atggagatgatggttcatgggaggagagacgagcagtatggcgggctcaggctcgggcttgggcttgggctcagcctcggcgtcgccggtggtgcagccgacgacgagcagccgccgccgcgccgtggtgccgccccgccgccgcagcagcagctgtgcggctggaacggcggcggtctcttctcctcgtcttcctccgatcatcgggggaggtcggcgatgatggcgtgccacgacgtcatcgagatgccgttcctgcgggggatcgacgtgaaccgtgcgccggcggcagagacgaccacgacgacggcgagggggcccagctgcagcgaggaagacgaggagcccggcgcgtcctcccccaacagcacgctctccagcctcagcggcaagcgcggcgcaccatctgccgccaccgccgccgccgccgccgccagcgacgacgaggactccggcggcggatcccgcaagaagctccgcctctccaaggaccaagccgccgtcctcgaggacaccttcaaagagcacaacaccctcaatcccaagcagaaggcggcgctggcgaggcagctgaatctgaagccgcggcaggtggaggtgtggttccagaacaggagggcgaggacgaagctgaagcagacggaggtggactgcgagctgctcaagcgctgctgcgagacgctcaccgacgagaaccgccgccttcamcgcgagctccaggagctycgsgccctcaagctcgccamcgccgccgccgcgccgcaccacctttacggcgcccgcgtcccgccgcccaccaccctcaccatgtgcccctcctgcgaagcgcgttgsctycgsagccaccaccacccgcaacaactccggcgccgcccccgcgcggccggtgcccacccgcccgtggccgccggcggcggcgcagaggtcgtcggcgtagagaccccactactgattaattag

SEQ ID NO: 4463 - DNA, 1470 bp, Oryza sativa
atggcggccggcgtcgcactgcacctgcacctacaagggatgaaggtgaaggcaattagagtccacaagattggtggtccagaggtgctaacttgggaagaggtggagattggggagcccagcgagggggagatccggatcaagaacaaggctatcggtgtcaactatgtcgatatttattaccgtactgggttgcatcaagaacctctcccgtttgttcctgatctggtgtatggggattctgataacaaaattccaacttactttgttaaatctaatgtcagttcatggcccggagaaaattcttggttgccatctgagcttatagagtatactggcaaggaagcagtaggagtagtgtctgctgttggacctggggtaacaggtatcgaagttggcgatgtagtcggctatgctgatactccaatgggcacttacactgaagaacagattataccggcaacactggccattcctattccaccttcagtggaccacattactgcagcatctgttttactcaagggaatgactacatatgtccttgtgaaacaagcctttaagattcaggcaggccatactgtcctagtccatgctgctgcaggaggagttggctctctcctttgtcagtgggcgaatgcccttggtgccaccgttatcgggaccgtttcgacacaagagaaagcaatccaagcagccgaagacgggtgccatcatgtgatcatctacaccgaggaggatttcgtagcccaagttgctgaaatcacatcgaggaagggtgttcatgttgtttatgatgctgtcggtaaagacaccttcaagggatcaatggagtgtctgatgccgcgtggatgcatgatctcttatgggcaatgttcagggaggcctgaccctgtaccagtgagtgatctggcgtccaagtccctgatcttgggcaggccagggatgaggcactacaccgccacccgcgacgagctgctgcacgccgccggcgaggtcttcgccggcgtggcggctggcgttctgcgcgtccgcgtcaaccatgtctacccgctgcatgaggcggctcgcgcgcacgcggatctcgaggcacggagaacctctggatctgtgtggtatcagagcccaaggtttggaacctggaacaatttccatgggtcacatggtggagaggccaggcccaatgtgacctgggtggcctacggttggtgggccgggctgcgcactccaacaagtggtagactaacctttataacaagtggtgagaacaatttccatgggtcacatggtaacaaagtggtatcagagcccaaggtttggatcccggaacaatttccatgggtcacatggtggacaggccagttgcgactaataagtacaggcaaacgagatggaggtgatcatcattctgataaacctcatgctggcatgtcatttcaagcggtgaacttgaaagatttaacagtttag

SEQ ID NO: 4464 - DNA, 2157 bp, Oryza sativa
atgacccaagctcactcaaaatcttgcttccaccagttctgggatggactccagatcaagaggagcagcgatagcttcactgtagagctactgccatcccttggtgcaactataaaccactccaacaagttgcagaagttcatcatatcgccttatgatccccggtacagatcctgggagctgttccttatagtcctagttgtttactctgcctggatttgtccgtttgaactagcattcctgagggacttaccatctaagcttttgctagttgagaacattgtggatatattctttgccattgatattgttttgacgttcttcgttgcttatgtcgatagcaaaacacatcttcttgtggatgaccgaaagagaattgcaatgaggtacctatccacttggtttaaccttgaagtatgttcaacagcaccatttcaaccaatcatccttctatttacacacaaggggaatgacattgctttcaaggtactcaatttgctcaggctgtggcgtcttcaccgagtcagttcactatttgccaggctggagaaagacatccgattcaactatttctggactaggtgctcaaaacttatttctgtgaccctcttcgcagtacattgtgcaggatgcttcaattatatgattgctgacagatatcccaacccagagaaaacatggataggagctgtgatgtcaactttcagatcagagagcttatggactagatatattactgctctttactggtccattacaacactgacaacaacaggatatggggacctacatgctgaaaatccaacagagatgctatttgatattgtctatatgatgtttaatctgggcttgacagcttatctcattggcaacatgaccaacctagttgtccatgggaccagccgcaccaggaaatttagggactcaatccaagcagcatcagagtttgcagcacgcaatcagctacctgagaacataaagcagcaagtgctatctcacttctgcctacaattcaagacagagggactcaaccagcaggtcatgttagactgtctaccaaaaggaatccgctcaagcatagcatacagcttattctttccgatcatccggcaagcctatctcttcaatggagtatctggcaatttcattgcagaactggtcatggaagtgcaggctgagtacttcccaccaaaggaagatataatattgcagaatgaaggagaagcagatgtttacatagtagtttcaggagcagtgaatataataacaacaatacatgggaatgagcaggtatatgagaaaattgcagagggagaaatgtttggagaggttggttctttatgtaacataccccagccatttacttgccgcacagcggagctatcacagcttttaagaataagcaaaacaaggcttagagagatcattgaagaaaacagggaagacagtaacattctaatgaacaacctagttcagaagctgaagctacgagaaagtttacctgacatgaatcaaccagaccgaagattcttgagcaagtatgagctattccacgttcctcgagaagcatggctgctgaaaaagtcacaactacattacacagagcacacaagtagggattctagtaacaacactccagtatttggaggtgacagatattccagacagttacttggagaagcaacccgatcttcggcatcagaaaacgaaaatagcagtatgacagataaagaagagaaccatgatgaagttcacacaaactgtgagatcaaaaaaagaacggaagagcactgtatccagataaactctgaagatagcagctccacatacagtcagcgaacaatgaatgcaacagtgcagacagggtctccacataaaacagaagaaaacataacaagaagaattccagatgagtactacataaaagaagcaaacaaaagagttacaattcacaaatatcgtcataactcaacagtctctgctgcgcaaaatggaaagcttatcaagctgcctacatcattggaggaactgttcaaaattggcagtcagaagtttcaaggttttcatcctagaaaggtggtcagtagagattatgctgaaatagatgatgtcagtgttatccgcgatggcgaccatctattccttcttgagatgtag

SEQ ID NO: 4465 - DNA, 699 bp, Oryza sativa
atggaggggtcaacgagtcaagaccatgtgattgggatcccggtgagcaacaccgcctatggcatagaggagccggacttcgcagcggaggagacgaccacccctgatcatgccggtttcgttgttggttccttccaattcaacaacgatgcgaatagcccgacgacgacgacgacgacaaccgatcgggcgagcaaatatggcaggaagggggacaagattgcacagggcatcaaagaacatgtgaccctcgggccgaagctatcggaaacggtcaaggggaagctcacgctgggcgcccggatcctccaggccggcggcgtggagaaggtgttccggcagtggttctccgtggacaagaacgagaagctgctcagggcgtcgcagtgctacctgtcgacgacggccgggccgatcgccggcatgctgttcgtgtcgacggagcgggtcgcgttccgcagcgaccggccgctggcggtgtccgccccgggcggcgacaaggtgcgcgtcccgtacaaggtgaccatcccgctgcggaaggtgaaggccgccaagccgagcgagaacaagcacaagcccgagcagaagtacatcgaggtcgtcaccaacgacggcttcgagttctggttcatgggcttcgtcagctaccaccgctcgctgcaccacctggagcaggccgtcgcgcaggcgcggcgatga

SEQ ID NO: 4466 - DNA, 1599 bp, Oryza sativa
atggtgaacaaaatctcaccctgggatcaacaagagaagatggccttgagaagtaatggagcattggtgaagtcactgagcttcaaagaatgggaaggaggtgaacaaaccaaaacaaattcagtgaaccacaagaacaggccgagcctgatcaacgtcgtcgtcgacaaccggagaaattcagacattttcatggcagaatcaagccccatagtgtcttccagccccaaatgtgagcttgatgctgcagcagtgaaggttcagaaggtgtacaagagctaccggacgcggcgaaacctcgccgattgcgcggtcgtcgtcgaggagctatggtggaaagcattggactttgcatcgctgaagcacagctctatatcattcttcaatggcgaaaagcccgaaaccgcggcgtcgcggtgggcaagagcaagaacaagagcagccaaggttggaaaggggttatcgaagaacgggaaggctcagaagctggcattgcagcactggctcgaagctattgatccgaggcatcgatatggccacaatttgcatatttattatggtgtctggtccaggagtgagagtacagagccattcttttattggttggacattggggagggcaaagaagtaaatcttgacaggtgtcctaggaacaagcttcagagccagtgcgtcaagtaccttggaccaaaagagaggcaggagtatgaggttgttgtggagagtggcaggcttgtttacaaacagtctggagtttttgtccacacttcagatgattccaagtggatctttgtcctcagcacaaccaaggcattgtatgttggccagaagaagaaagggtcatttcagcactccagctttctggctggtggagcaatcacatctgctgggagattagtggtcaaagacggaatcctcaaggcaatctggccttacagtggtcactacctcccaaccgaggagaatttcagagagttcatcagctaccttcaggagaacggcgtcgaccttgccgatgtcaagagatgtcccatggacaaagacgacgagtacccattgctgacaaagcctgacgtcaccgccgcctccattgccgccaccaagaacgtcgagaaggtcgccgccgccaccgcagccgcagccgagcggctgaccgagaccgtctccgacgacacggaccacgccgccgtcgacgaagacggcagcatgagcgaaggcgaggacgaagacgccgacgtcccaacggcaaccaaagaagacgagcacaaggcgacctcctcgtcggcggcgagcaccaccgccgccgccgccgccgcagagaaccacctgccgtgcaggtggtcgacggggacggggccgaggatccggtgcgtgcgcgactacccgcaggacctgcagtcgagggcgctggagcacgtcaacctgtcgccgcgcctcgccgccgccggggtkgcgccggcgacgaggaagagggacccggtgccgtcgccgcggccgagccccgggatgatactgtcgccgcggctggcctccgtgggcttccggccgccggtggtggcgctcacgctgccggacttcaagaggagcagattgcagtga

SEQ ID NO: 4467 - DNA, 1542 bp, Oryza sativa
atgaacggcaataagcagtccctgatatacagcttcgtggccaagggctccgtcgtgctggccgagcacaccgccttctccggcaacttcagcaccatcgccgtccagtgcctccagaagcttccccccaacacctccaagtccacctactcctgcgatggccacaccttcaacttcctcgtcgaccgcggcttcgtgtttctcgtcgttgcggatgaggccgttggaaggagcgtgccgtttgtgttcctagatagggttaaggaagacttcatgcagcgaccgaggctgaaggatcacatgctgtattgtattaatcatccagaggaaattagcaagctctccaaagtgaaagcacacctcacggaggtcaaagggattatgatggacaacattgagaagatattggaacgtggagagaagattgagcttttggtcggcaagactgaaaccttacaatcacaggctgacagcttccacaggcatggaagagagctcaggcgtaagatgtggcttcagaacctgaggtttaagttgatgcgttgcgagtttgagcacttctctctgaaacaacgaagtgagccgcagatgcaagcctttagggatgtggtccagagatgtgaactccatgatctggggttctcgggggtgccatacacttacgataacaggagagaaagccgcggcaatgttaaagtgtgcctagaccgcgcccttgcagatgatgggtkgargggactgttctctacagcacaggtgtttcatctgtcctctcctagatcagaccattgccccatccttgtcaaattttattctgaagatcttcgcaggaattttgcgaagtgtgtccattatgaaatttattgggaaagagaccatgcaatctctgaagttatagcagaatcttggggcgtttccggagctaagcaggatctgagcgacattaatcaagctctgtttaggatgatgtctaaccttcgcccatggagtaagaaaaagttcaggaatgtcagccgggagattgagaaaactagaaagaaactatctgaacttcttctaagtaataccgacagcagggaaataagacgggtgtctgatcaaatgaacgaacttctgtaccgtgaggagatgatatggctgcaacgatctcgaattgcttggctgaaagaagtcactagcctgataaagccgaaagtcacggatgcgatgaatgaggaactatgcaaaaccgtcagtgaagaggaaattgcaaatgccctgttccaaattggtccattaaaagcacccgggccagatggattccctggtcggttctatcagaggaattgggctatactaaaggacgacattgtgcgagcagtacaagaatttttctcttcgggtaccatgccttcgggggtcaatgagactgccattgttctgataccgaaaactgagcaaccacaggaactaaaggatttcagacctatcagtttgtgcaatgtggtctataaaatagtgtctaaatgttttggtgaacagactaagaccaatcctggatga

SEQ ID NO: 4468 - DNA, 594 bp, Oryza sativa
atggaaggcgagcagcagcagcagcagcagcagagcgtcgcggcggtgaggccgtcgctggggaaagcgccgtcgccgtcgttccggctccggaacggcagcctcaacgcggtgcgcctccgcagggtgttcgacctgttcgaccgcaacggcgacggcgagatcaccgtggacgagctggcgcaggcgctggacgcgctcggcctcgaggccgaccgcgccggcctggccgccaccgtcggcgcccacgtccccgacggcgcggcggggctccggttcgaggacttcgagtccctccaccgcgccctcggcgacgcgctcttcggctcgctggacgtccccgaggacggcggcggcggcggcggcggcgacgaggagatgaaggaggcgttcaaggtgttcgacgtggatggcgacgggttcatctccgcctccgagctgcaggaggtgctgaagaagctcgggatgccggaggccggcagcctggccaacgtgcgggagatgatctgcaacgtcgaccgcgacagcgacggccgcgtcgacttcggcgagttcaagtgcatgatgcaggggatcaccgtctttggcgcctga

SEQ ID NO: 4469 - DNA, 822 bp, Oryza sativa
atggcgtcgccgccggggaagaagggggaaggcggcggcgatggcggcggcgggaaggcggagtggctgatctacgcgttcgtggcgcgcggcacggcggtgctggcggagtacaccgagttcaccggcaacttcccggcgctcgcggcgcagtgcctgcagcggcttcccgcctcgggcggcggcggctccggcggtggcgcgccggcgcggttcagctacgcgtgcgacgggcacaccttcaacttcctcctccaccgcggctacgcctattgtgtagttgcaaaggaatctgtcccaaagaatgtctcggtggcttttctagaaaggttgaaagatgacttcatgaagagatatggaggtggtaaagctgatacagctcttgcaaaaagtctgaataaagaatacggaccagttataaagcagcacatgcagtatgttcttgatcattcagaagaaatagagaagacattgaaagtgcaagcccaagtttctgaagttaaaaatatcatgttagaaaacatagagaaggtgtggtccacatttgcagttggttgccctctgttttttaccgagttaatcttaatgggcttcctctttaaaaagactttgggtcgtggagaaaaactgagtgaacttcaagataagacttccgatctacaaagtcaggcccaggaattcaaaaagaagggagtgaaaattcgtaggaagacatggttgcagaacatgaaaatcaaattggtggttcttggaattcttttgcttcttgtaataatcgtatgggtgtctgtttgtcaagggtttgactgcaccaagcactga

SEQ ID NO: 4470 - DNA, 1023 bp, Oryza sativa
atggcgggtgcttggcggcggtggccggtggtggtggcggcggcggtcgtgctggccgtggcggcgccggtgcaggcggcgccgcaggtgccgtgstacttcgtgttcggggactcgctggtggacaacggcaacaacaacgatatcgtgtcgctggcccgcgcaaactacccgccctacggcatcgactttgccggcggcgccgccaccggccgcttcagcaacggcctcaccaccgtcgacgtcatctctaagcttctggggttcgaggacttcatcccgccgttcgccggcgcgagcagcgaccagctgctgaccggcgtgaacttcgcgtcggcggcggcggggatccgggaggagaccgggcagcagctgggggcgcggatcagcttcagcgggcaggtgcagaactaccagtcggcggtgcagcagctggtgagcatcctcggcgacgaggacacggcggcggcgcacctgagccagtgcatcttcaccgtcgggatgggcagcaacgactacctcaacaactacttcatgccggcgttctacaacaccggcagccagtacacgccggagcagtacgccgacgacctcgccgcccggtacgcgcagctcctccgcgccatgtacagcaacggcgccaggaaggtggcgctcgtcggcgtcggccaggtcgggtgcagccccaacgagctcgcccagcagagcgccaatggcgtcacctgcgtcgagcggatcaacagcgccatcaggatcttcaaccagaagctcgtcggcctcgtcgaccagttcaacaccctccccggcgcacacttcacctacatcaacatctacggcatcttcgacgacatcctcggtgcacccggatcccacggtttgaaggtgacgaaccaggggtgctgtggggtggggaggaacaacggtccaggtgacgtgcctgccgttccagacgccgtgcgccaacaggcacgagtaaaggccatatacggcccaactagtttaggccatttctctgtttcctga

SEQ ID NO: 4471 - DNA, 8298 bp, Oryza sativa
atggcggaccgggctccagcgaagggtgggcagcgtgccgcaggcgccccggaagcggtgcaacaacgcagagggagaccgttcttgagcaacgaacacggcacacaggggcagaggccggcgccggacggtgcagccgccatcgcccgcgccttcaccgatgcacgccgcgcaggcaaggccctgcccgcgttccccggagagatccccgtcgatctggtggctgcctaccacgtgcaggaccaggccattggcctgtggagcgatacagtggtcggctggaaggtgggttacatcgctgccgagcgccgcgacggctccggcgatgagcgcctgctggggccgatcttcaaacgtcagctctggaatgataccggtggaacaaccgacatcccggtcttcgtcgggggcttcggcgcagtcgaagcagagtacgtgctggagctgttggaggacgcgccggccggacagctggactggtccccggaacaggccgaagcgctgcctgcgcgcctctatatcggcgtggaagtggccagcagcccgctggccaccatcaacgaacttggtccgcgcgtggtggtgtccgactttggcaacaacaacggcctggtgctgggcccggagatcgtcgactggaccgcacgcgacgaaaactcgctgcgtgccgagacactgatcgaaggtgaggtggtcggcaccggtggcgccacccgcctgcccggtggcctgcgcgcggcctatgcctttgcgctgtcccgttcggccctgcgtggccggccgctgcgcaagggcgacctgatcgccaccggcaatgccaccggcatccacgatatcgaggcaggacaaacggcgctgatgatcacacgacgtaacttcctggccgggggcgctgctgccctggccaccccgatgctcgccgcctgtggccgcgggccgggcggcgatatggccggtggcgcgctgttgaccgccaccgacgtgcatgtggccgactaccctaccgtcaccgcggtgaagtggatcggcgaaacgctgcagcgcgaaaccaacggtcgcctgcgcctgcgccagtaccactccggccagctgggccgcgaatccgaggcgatcgacatggcgcgcttcggtgccatcgatatcacccgcgtgtatgccggtgcgctgaacaatgcctttccgctgacccaggcgctgtgcctgccctacgtgttcacgtcggtggcgcaccagcgtgccgcgttggatgacggcgtggccgaagccgtgctgcgcggcttccagggccgcggcctggtcggcctggcgatctacgattccggtgcacgctgcttctacaacaccaagcaccccatcgtttcgcccaaggacctgcacggcctgaagctgcgcgtcgcctcatcggacatcttcatccagctgatgcgcctgctcggcgccaacccgacgccgatgtcgctgggcgacacgttctccgggatggaaacccacatgatcgacggcgccgagaacaacatgcgcagcttccattccagccgccacttcgaagcggcgcactactggtcgcagagcgaccattcgtacgcgccggatgtgttgctgatgtcgcgtgccagtttcgaacgcctgtcgcctgacgaccgccagctgctgctgcagatcgcgcgcgcgtcggtgaaggtgatgcgcgagcagtgggatgcgtcggaggacgccgcacgccgcgccgtgctggcctatggggtgaaagccaacgaggtggacatgcccgccttccgcaccgccgcccagccgctgctgcagcagtacctgcagcagccggagatcgccgcgctgcgcctgctggaccgcatcgccgacatcgccatctacggcgccgttgctgccctgctggggctggtggtggtgcagggctggcaggtgttcgcgcgctacgtgatcaacgattcgcccagctggactgagccggtcacgctgctgctgctggccacggcgatgagcctgggtgccgcctgcggtgtgcacaccaaccgccacttcggcttcttcctgctgcatgcctacctgggccccggcctgcgccgtgcggtggacgtgctggtgcagctggtggtggcggtgctgggaggcttcatcgccttctggtcgggtgatctgctgctcgacggcctggacatcaagaccgccggcgccgatctgccgcagagcatcaactacctgccactggcgcagatctcggccggtaccggctcggcctcgctgatcgccattccgttgttcatcttcgcgggcgagatcatgatgcgcggcggcatctccgagcgcctgatcgccttggcctcgtcgctggtggggcgcttgcgcggtggcctcggccaggtctcgatcctgtcctcgctgttcttcggcggcgtgtccggctcggccattgccgacgtttcggcggtcggcggcacgatgatcccgcagatggtcaagcgcggctacgaccgcgatttcgccgtcaacgtcagcatcaccgccgcgctggtggcgctgctggtgccgccgtcgcacaacctgatcctgttctcggccgctgccggtgggggcctgtccatcgccgatctgttcgccgccggcattgtccccgcgctgctgatgacgttggcgctgatggtcaccggctatgcggtggcgcgccgccgcggctatggcgtggaggtctttcccggctggcgcgccgtggccctgcgcatcgtctccgccctgcccggcctgggcctggtcgcgctgatcttcatcggtatccgtgccggcatcttcaccgcagtggaaagcgcagccatcgccgtggtctacgccttgctggtgaccaccgtgctgtaccggcaactgcgctggcgcgagttcttcgacaccgtcatccacgcggcgcgcagcacgggcgtgatcctgttcgtgatcgccaccgccgccgtgtttggctggctgctggcctacctgcaggtgcccgcggccgccgtcgagttcctgcagtcgttcgcgcacagccagttcatggtgctgctgatgatcgtggtgatgctgctgctgctgggcaccttcatggacctggcgccgatgatcctgatctgcacgccgatcttcctgccggtggcccgcgcctacggcatcgatccgatccacttcggcctggtgctggtgctcaccggtggcctgggtctggtcacgcccccggtgggctcggtgctgttcatcggcacggccatcggcaagatcaacgtgggccagagcatgcgcacgatctggccgttctggttcgccgcgctcgccgtgctgctggagactgccatgcgtgcactgtgtatcgccgccaccatcactctgctcgtgctgttgctgccggcacggcctgcacccgcggcggagcccgcgcgcgccccggcgcagtgggcccgggggctggaacaccagcgccaggcggaccggggcgatggcacgttcctcaatccggtgctggccggtgaccatccggatccctcggtgctcaaggacggggacgattactacctcacgctgtcgtcgttcgacgcytaccccgggctcccgatctggcaytcgcgcgacctggtgaactggcagccgctgggacatgcggtcacccgcaacgtgggggcgatctgggcgccggacatcgtcaagcatcgggggcgctacttcatctacttcccggcccgcaccggcgagcgccgcagcaacttcgtggtctgggccgatgacatcaagggcccgtggagcgcgccgatcgacatcggcctgggtggctacatcgatcccggccatgcagtgggtgaagacggcaagcgctacctgttcctcagtggcggtgattacgtgcagctggccgacgacgggttgagcgtggtcggcacgccgaaacacgtctatgacggctggcgctacccgcaggactgggacgttgaggcctacgcgcaagaaggcccgaagatccacgtccgcgacggctggtactacatgaccacggcagtgggcggcaccgccggtccgccgaccgggcacatggtgatcaccgcgcgctcgcgttcgatccacggaccatgggagaacgcgcccaacaacccgatcacgcgcacgcagtcggcggccgagccctggtggtcacgcggccacgcgacggtgatcgaagggaccgatggacgctggtggatgatgtaccacgggtacgagaacggcttctggacgctgggtcggcaggccctgctcgaaccgatcgaatggaccgctgacggctggttccgggccacgggcggagaccttggtcagccactgcgcaagccggccggacaggcgctgtcgccgcatggcatggcgctgtcggatgatttccgcggcagcacgcttggcccgcagtgggcgttcttcaacccggcgcaggatgagtaccgccggctgggtttcagtggcaacggccttgtcctgcagggcaagggcagcacgccgcgcgacgcctcgccgctgaccaccatcgccggcgaccgggcctatcagttcgaggtggagatggagatcgcccccggtgccgtgggcggcgcgctgctgttctacagcgaccggctgtacgcgggcgtgggcagcaacggcgagtcgttcatcatgcatcgctacggcgaggagcgccctgcccgaccggccccgggccgcggcggccggctgtggttgcgggtgaccaamaaccgccacatcgtcaccttccactccagcaccgacgggcacacttggcagaagtatccggttcagatggaagtgtccggttaccatcacaatgtcgcgggcaggttcctggcgttgaaccggcgcttgcgcaacaagaacgatgccgctacgccggcattggcgaagggcaaggcagccaccatcaacgacatcgcgcgactgtcgggtgtatccaagaaaacggtttcaagaatcatcaacaactcgccactggtgcgcaaggacacgcgcgacaaggtggaagcgttgatgcgtgaagtgggctacacgcccgatccactggcccgcgggctggcgttccgccgctccttcctgatcggcatggtctacgacaaccccaccgcgcagtacatcgtggacatgcagtacggcgcgctggatgcattgcgtggatccagtttcgagctggtggtgcatccctgtgacagccgcagccccggctacatcgaaggcgtgcgtcgcttcgtgcagcagcagaagctgcacggcgtcatcctagtgccgcgtgcctcggaagaccaggcgctggcggacatgctcgatgagatcggctgccggtttacccgcgtggcagcgctgccgctggacgaaagctcgcagatggtggttacccatgaccgcgatggtgcggccgaagccgccgactacctgctctcgctcggccaccgtgacattgccctggtgaccggtcccagcgcctaccgttcggcccatgaacgtaccgccggcttcatcgacgcactgtcgcaacgcggtatcgagctgccgaaggaccgcatcatcgaggccggctacaccttcgaatccggtgtcgccgctgccgagaaactgctgctgggcaagcgccgcccgaccgccatcttcaccggcaacgatgaaatggccgccggtatctacaaggtggcgctgcgcgcgggcatcaacattccgcgccagctgtccattgtcggctatgacgacagcccgcttgcctcgcgcctgtggccctcgctgacctcgctgcgtgacctgtacctgctcgatggcctgttcaacgccggtgcggtgaccctcaagtacacccactacgagcgcttcgtgattggtggcgccgccccggtggacgcaccgcttgcgctgccgacccagaccgaacccgcttcggccgcaggccacccgttcctggagcgccgggaactgggcgtgatcaacgtcggcagcggcactggtacggtcaccgtggatggcaccggctacacgctgggtccgaaggacggtctgtacgtggccatgggcagcaaggaggtcgtgttcgcctcgcaggacgccgccaaccccgcccagttctatctggcctcgaccccggcccatgcccgcttcgaaaccaggcagctgtccatcaaggacgccgttgcactggaccgcggcgcgctggaaaccagcaacgagcgcaccatctaccagtacatcgtgccggccacctgccagtcctcgcagctgctgctgggcctgaccgtgctcaagccgggcagcgtgtggaacaccatgccgccgcacctgcacgaccgtcgcagcgaggtctacttctacttcgacctgggtgacagcgaccgcgtctaccacttcatgggcgagccggccgcgcagcgtcacatcgtgatccagaacaacgaagcggtagtgtcgccgccgtggtcgatccacatgggcgccggcaccagcaactacgccttcatctgggcgatgggtggcgagaacctggactacaccgacatgcacgtgctggacatctgccagctcaacctggaaggcaaggtcgctctggtaaccggtggcaataccggtctgggccagggcatcgccgtggcactggccgccgctggtgccgacgtcgccgtggccggcatcgccccgcccaccgataccatcgaaaagatcaccgcgctgggccgccgctgcctggccatcgaagccaacctgatcagcatcgagccggtggcgcgcgtggtccgcgagaccatcgaaggcctgggcgggttggacatcctggtcaacaacgccggcctgatccgccgcgccgatgcggtggacttcagcgagcaggactgggacgacgtgatgaacgtcaatctcaagtccgcgttcttcatttcgcaggccgccggccgccacttcatcgaacagggccacggcaagatcatcaacatcgcttcgatgctgtccttccagggcggtatccgcgtgccgtcgtacaccgccagcaagagcggcatcgccggcatcacccggctgctggccaacgagtgggcgggcaagggcatcaacatcaatgccatcgccccgggctacatggcgaccgacaacaccgcccagctgcgcgccgacgaagcgcgcaacaaggcgatcctggagcgcatcccggccggtcgctggggcacgccggatgacctggccggtgcggcggtgttcctggcctcgtcggcgtcggattacatcaacggcgccgtgctgccggcggcgcccgtgcgggtcttcattgccggtgactccactgcggccgcatacggccccgagcgcgcgccgcaggccggctggggccaggcgctgcagagctacctggacccggcgcgcttggaggtgcacaaccacgccaagggcgggcgcagcacgcgcagtttcatcgaggaagggcgcctggaggccatcgccgccgagctgcgccaaggcgacgtgctgctgatccagttcggccacaacgatgcgaagttcgaagaccgcacgcgctacaccgatccggacagcgactacccacgcctgctgatgcgttacggcgccacgccggtgctggtcacgccggtggcgcggctgctgtacgacttcggttcactgctggatacgcatggccgctacacgcagtcgatgaaggcgttggccgcgcgcgagcagattgcgctgattgatctgaatgaccgcagcatgcgctgggtccgcgcgctgggtgaggagggcgcgcgaccctacttcctgttcgtgcccgaacagaacaaggccgacggcacccatttcagcgtggccggcgcacatgcggtggcctgcctggtattgcscgaggcggtgccgctgctacccgcgctgcagccggcgctggtgcgggatatcgactgcgacgtggtggcggaagggcagggtagcgacccagccctgccctcgcaggtggtgcacgaagacagtgttgtgcgcacgcaagcaggcccgcacggcggtgccggcccgaccacggcgtatccgttcttcgccgatgccgaagggctgccgttcgtgctgcgcaagcgtgtgctgcacaaaggcgcgggcatcggcctgcatccgcagcacaaggacgagatctattacatcgtcagtgggcagggcagttatgtgctggatggcaggcagtacgacgtgcacgccgggcacgcgctgctgacccgcaagggtagccaccatgcgctgcagcaggtgggtgaggaggatctggtggtgctgctggtgtacccgcgctga

SEQ ID NO: 4472 - DNA, 2877 bp, Oryza sativa
atggccgcttccgtgcagccgcggcagttcggccacctcgagccgggctccgcgccggtgtgcggcgccgcatcctcgaacggcgccaaggcgtaccctcccgcgaacggcatcccgcgccgcgccgactcaccggtgcgcgggtgcggcttccctcccctcgtctcgccaccttcgcggaagccgcccagcgatgggtcggacgacgaggaggaggagcaggaggactggcgggagctgtacggctcgcacctgcagctggaggtggaaccgtcggtgcgcgacgcgcgcaacgagggcaccgccgacgcgtggatcgagcgcaacccgttgctgatccggctcaccgggaaacacccgctgaactgcgaggcgccgctggcgaggctcatgcaccacggcttcatcaccccggctgcgctgcacttcgtgcgcaaccacggcgcagtgccgcggggtgactggtcgacgtggaccgtcgaggtgacggggctcgtcaagcgtcccatgcggctcaccgtggacgagctggtcaacggcttccccgccgtggaggtccccgtcacgctggcctgctcggggaaccgccgcaaggagcagaacatggtgcagcagactgtggggttcaactttggcgccgccgccgtgtccacgtcggtgtggcacggcgcccgcctccgcgacgtgctccggcggtgcggcatcatgcccagcaagggcggtgcgctcaacgtgtgcttcgagggcgccgaggacctccccggcggcggcggctccaagtacggcaccagcatcacacgccagtgggcgctggacccgtcgcgggacatcatgctcgcctacatgcagaatggcgagccgctgctccccgaccacggcttccccgtccgcgccatcatccccggctgcaccggcggccgcatggtcaagtgggtcaagcgcatcatcgtcaccaccgccgagtccgacaactactaccattacaaggacaaccgcgtcttcccgtcccatgtcgacgccgagctcgccaacgccgatgcgtggtggtacaagccggagtacatcatcaacgagctgaacgtgaactcggtgatcacggcgcccgggcacgacgagatcctgcccatcaacggcatcaccacgcagcgcggctacaccatgaagggatacgcctactccgtgaatagtggtaatcaaatccaacaaatatcttctgaattttctgacagaataataccccatcagcatatggagtacatagctaaagtactgtactacatatttcgagctatcaaaatttttgttgtaagatttaagtacccaaggcggcggcaagaggatcacgcgggtggaggtgacgctggacggccggcgagacatggctggtgtgcgtgctggacctcccggagaagccccaccaagtacggcaagcactggtgctggtgcttctggtccgtcgaggtcgaggtgctcgacctcctcggcgccaaggagatcgccgtgcgcgcctgggaccagtcgcacaacacccagcccgagaagctcatctggaatctcatggggatgatgaacaactgctggttcaaggtgaaggtgaacgtgtgccggccgcacaagggtgagatcgggctggtgttcgagcacccgacgcagcccgggaaccagaccggcgggtggatggcgaggcagaagcacctggagacggcggaggcggccgcaccggggctgaagcggagcacgtcgacgccgttcatgaacaccaccgacggcaagcagtttaccatgtccgaggtgcgcaagcactcgtcgcaggactcggcgtggatcgtcgtccacggtcacgtctacgactgcacggccttcctcaaggaccaccccggcggcgccgacagcatcctcatcaacgccggcaccgactgcaccgaggagttcgacgccatccactccgacaaggccaaggcgctcctcgacacctaccgcatcggcgagctcatcaccaccggcgccgggtacagctccgacaactccgtccacggcgcgtccaacctctcccagctcgcccccatccgcgaggccatcaaggcgccggcgcccgtcgcgctctccagcccgcgcgacaaggtcccctgccaactcgtcgacaagaaggagctctcccgcgacgtccgcctcttccgcttcgcgctgccgtcctccgaccaggtgctcggcctccccgtcggcaagcacatcttcgtgtgcgccagcatcgaagggaacrctgtgcatgcgggcgtacacgccgaccgagcactggtcgaccgacggtgtacttcaacgaacgagcaccccaagttccccgatggcgggctcatgacgcagtacctggactcgctccccgtgggcgcctacatcgacgtcaaggggccactcggccacgtcgagtacaccggccgcggcgagttcgtcatcaacggcaagccgcggaacgcgcggcggctggcgatgatcgccggcgggagcgggatcacgcccatgtaccaggtcatccagtcggtgctgcgcgaccagccggaggacacgacggagatgcacctggtgtacgcgaaccggacggaggacgacatcctcctccgcgacgagctcgaccggtgggcggcggagtacccggacaggctcaaggtgtggtacgtcatcgaccaggtgaagcggccggaggaagggtggaagtacggcgtcgggttcgtcacggaggaggtgctgcgggagcacgtgccggagggcggcgacgacacgctcgcgctcgcctgcgggccgccgccgatgatcaagttcgccgtctcgccgaacctggagaagatgaagtacgacatggccaattctttcatcgtgttctaa

SEQ ID NO: 4473 - DNA, 1479 bp, Oryza sativa
atggtgctctccaaggccgtctccgagagtgacatgtccgtgcactccaccttcgcctcccgctacgtccgcgcctccctcccaaggtaccggatgccggagaactcgatcccgaaggaggcggcgtaccagatcatcaacgacgagctgatgctggacggcaacccgcggctgaacctggcgtcgttcgtcaccacgtggatggagcccgagtgcgacaagctcatcatggccgccatcaacaagaactacgtcgacatggacgagtaccccgtcaccaccgagctccagaaccggtgcgtgaacatgatcgcgcacctgttccacgcgccgctcggggaggacgagacggcggtgggcgtgggcacggtgggttcgtcggaggccatcatgctggccgggctggccttcaagcggcggtggcagaacaagcgcaaggccgaggggaagccgttcgacaagcccaacatcatcaccggcgccaacgtgcaggtgtgctgggagaagttcgcccgctacttcgaggtggagctcaaggaggtgaagctccgcgacggctactacgtcatggaccccgagaaggccgtcgacatggtcaacgagaacaccatctgcgtcgccgccatcctcggctccaccctcaacggcgagttcgaggacgtcaagctactcaacgacctcctcgacaagaagaacaaggagactgggtgggagacgccgatccacgtggacgcggcgagcggcgggttcatcgcgccgttcctgtacccggagctggagtgggacttccggctgccgtgggtgaagagcatcaacgtgagcggtcacaagtacgggctcgtctacgccggcatcggctggtgcatctggcgcaacaaggaggacctgcccgaggagctcatcttccacatcaactacctcggcaccgaccagccaaccttcaccctcaacttctccaagggctccagccaggtcatcgcccagtactaccagctcatccgccacggcttcgaggggtacaggaacatcatggagaactgccacgagaacgcgatggtgctgaaggaagggctggtgaagacggggaggttcgacatcgtgtccaaggacgaaggggtgccgctggtggcgttctcgctcaaggaccggagccggcacgacgagttcgagatctccgacatgctgcgccgcttcggctggatcgtgccggcgtacaccatgccgcccgacgcccagcacgtcacggtgctccgcgtggtcatccgggaggagttcagccgcaccctcgccgagcgcctcgtcctcgacatcgagaaggtgatgtaccagctcgacgcgctcccctccaggctcatgccccccgtgccgccggcgccgctgctggtggtcgccaagaagtcggagctcgagacgcagcggtcggtgacggaggcgtggaagaagttcgtgctcgccaagaggaccaacggcgtctgctag

SEQ ID NO: 4474 - DNA, 2322 bp, Oryza sativa
atggcggcgtcgctgcttctccgagccgcccgccggcgagacctcgcctcgcccctcggaacgttgaccgccaatgctcaatcggcatattctgcgaatatttgttcacaatggggtagttttgcaagagctttcagtgtaaaaccaactggaaacgaggttattggaattgatttgggaacaactaattcttgtgtttctgttatggagggaaagaaccccaaagtgatagagaattcagaaggcaccaggacaacaccatcagttgtggcctttaatcagaagggagagcgacttgttggaactccagccaagcgtcaagcagtgaccaacccacaaaacactttctttggcacaaaacgtctgattgggagacgctttgaggatccacaaacacagaaagagatgaaaatggtaccatacaaaattgtgaaggctccaaatggtgatgcttgggtggaaacaacagatggcaagcagtactcaccaagtcagattggcgcatttgttttgaccaagatgaaggagactgctgaatcttaccttggtaaaactgtttcaaaggccgtgattacagttccagcttattttaatgatgctcagcgtcaggcaaccaaggatgctggtcgcattgctggacttgatgtccagaggatcatcaatgaaccaactgctgctgctttgtcttatggaacaaacaacaaggagggtttgatagctgtgtttgacctgggaggaggtacctttgatgtctcaattcttgaaatctccaatggggtgttcgaggtcaaagcaacaaatggtgacacttttctgggaggagaagactttgataacactcttttggagttcttggtgagtgaattcaagaggagtgaagctattgatctggcaaaggacaggctggctctgcagaggttacgtgaagctgctgagaaggctaaaattgaactctcatcgactgcccagaccgagattaaccttccattcatcacagctgatgcttctggagctaaacatttgaacattacacttacaagatcaaagtttgaatctttggtgaatagcctcatcgagaggaccagagagccatgcaagaattgcttgaaggatgctggtataactaccaaggaggttgatgaggtccttcttgttggtggaatgacaagagttccaaaagtgcaggaaattgtttcagagatttttggcaagtccccaagcaaaggggtcaacccagatgaagctgtagccatgggtgcagccatacagggtggtattctccgtggagatgtaaaggagctgcttctccttgatgtgacccccctttcacttggtatcgagactcttggtggtatcttcaccagactgattaaccggaacactacaatccccacgaagaaaagtcaggtgttctccactgctgctgacaaccagacacaagtgggcattcgtgtcttgcaaggtgagcgtgagatggcgacagacaacaagcttcttggtgagtttgatcttgttggcattccaccagcgccaagaggtatgccacagatcgaggtcacatttgacatcgatgccaatggaattgtgacggtctctgcaaaagacaagtctaccgggaaggagcagcaaatcaccatccgatcctccggtggcctctcagaagctgagattcagaagatggtccaggaggctgagcttcactctcagaaggatcaggagcggaaagccctcattgacatcagaaacaacgctgacactaccatttacagcgttgagaaaagtctgggagagtacagggacaagattcctgcagaggttgccactgagattgagacagcaatcgccgatctccgctctgtgatgacctcagatgacatcgagaagatcaaggccaatatcgaagcggccaacaaggctgtttcaaagattgggcagcatatgtctggtggtggtggtggcgcaggcggttcagagacaggaggatctcagggcggaggcgagcaggctccagaggctgagtacgaggagcggttgatgtttgtttcaaaatattctgggtgggatcttccgcggcgaaaattaggtacagtgacagggtcaaacacaagtgctactacgtgttcatcttatctacgtgttccaggatgtagctgcaactgcaagcgcggaaaaagggtcaggcgcggaaaccgtaggttaggagagaaaggtatcgaggctgggaaggagagtgtcaatggagatgatggcaagaagcgcactcaaacccttgcagaaaagaggagggaagatagtggaacgagagaatgcaaccgggaatag

SEQ ID NO: 4475 - DNA, 1857 bp, Oryza sativa
atggagggaagtggacaaagtgataagggtggacatgttacatggacatcttcaatgtctacctacatgcttgaatacctcgagggtattgttgctagtgggaacaaaacttcctcggggtttaagcaagtccacttgaaggcttgtgctaaagctttgaatgatcacttcaatattaatttgacttcagatcagattactaatcacataaggacttggaaaaggaaatattctaagatagctgatttgaggaagttgagtgctgctctttgggatgatgaaaattttatcatatcacttgatcataaacattatgcagaccacatcaaggatcacaaggctgatgctgaatatctgaacaaacctattcacaactatggcaagatgcttgtgatatttggcaatagcttggctacaggaaaatatgcaaaaggatctggtgatcctctagccactgaatctattcccattgatgatgatgaagaagaagaaattggtattggaagtgctgcagcaactggatcagctagtagagttcatgcccttaatgaggaaaatggtgcatcatcttcagcacccaaacccaagaaagctaagactgatgctgcaattgaagaggaagggctgataggcgcatttaaatctgttggtgacaagcttgctggagcaatagttgaagctggaaaagaggctgcaaaatctaacaaagagctgcccgataacctatatgagagtgtgcatagcattccagggtttgaagatacacatcttgctcattaccatgcacatctagttgacaatcctccaactgcaagagtgtttgttacccttgaatttgctcacaaggtagacaacaaatacgtgatgcagttgattatttgtacatgcaactatccaattttcccaagtataccaggtaggagtgtgggactgggagcggcggcggcgtcggaggcaatggacgcttcgtcggtggcgctctacggccagctcaaggctgctcaaccattcttcttgttagctgggcctaatgtgattgaatcagaggagcatgtcctgaagatggcaaaacacatcaaaggcatcacaaccaagcttggtctgccacttgtgttcaagtccagctttgataaagcaaatcgtacatcatcaaaatccttccgtggtcctggtctggaggaaggcctgaagatacttgaaaaagtgaaagcaacatatgacattccagtggtcactgatgtgcatgaaagccaccaggcatgtcccagtcgtttttgccagtttgaatatcatcagaaaaacaagactgatcttctagtggctgctgccaagactggaaaaattatcaacatcaagaaaggacaattctgtgctccttctgttatggccaactctgcagagaaaatcagacttgctggaaatcaaaatgttatggtctatgatctaattgttgatccaaggaattttgagtggctgagagaagctaattgtccagttacctttgaattagctatcaactatggtatagtacgtggaccattgatggatattacatttcaggtagctgatgtaacgcatgctctacaacagcctgctggaaaaaagcttgatggtggaggtgttgcaagtgggggcttacgagaactaataccatgcatcgcaaggacttctgttgctgtcggagttgatggtattttcatggaggtacatgatgatcccttgaacgcaccttgtgatggcccaactcaatggccactgcgcaatttggaggagctattagaggagctgattgcaattgctcgagtcaccaagggaaagaagccactcaagatcgatctcacccccttcaaagaataa

SEQ ID NO: 4476 - DNA, 1233 bp, Oryza sativa
atggacggtaccattgccgatgctgtgggtgcgccgggtatagagaaagaggtcaatggaaagcctgcattgcctgatagcatggaggagcatgaggaagcacatgaggtgcaagccaatggtgaccattccggggagagcgatgtgatcaacccgcccgaagaggcgggcsgggaatccacctcgcatcttgatggcaagaagcctcgccctgccaaggcaacccaaagtcatggtcctaaggttgtaaagtctaggagcccgaagagtggaggcgagggtcaagctaggagaagcactcctagttccactctttctaaagcaccggttgctcgagtctctcatgcagattcaagtactggatcaaagatcaatggtgactccagtgttgataggaataaagctgagaagcaagagcctcgctccagtactaaggrgacatytctcgrggactcaaaggagaaaaggaaaacacaaaagccattaggccagaattcttctgtcaaaaaggatgatgagtcaaatcctgaatcacgaaaggctggaggcactcctgcctacgggttctctttcaagtgtgatgagagagctgaaaaaaggaaggagttctattcaaagctcgaggagaagattcatgccagagaaatggaaataagcaatttgcaagcaaaatcaaaggagactgaagaagctgaactcaaaatgcttaggaagagtttgaacttcaaggcaacaccaatgcccagcttctaccaggaaccaactcctccaaaggtggagttgaaaaagatccctcccacgagagctagatcaccaaagctcggtcgctccaagaacaaatctgcgggagagaccgaggaaactgtcactcccccaggacgtccggtccgtctgagcctcgacagcctcgacgaaaaggtttctcaaaacggtgtaaagaaagcaaacccatcaaatgctgtgaagaagccccagaggaagtcactccccaaattgccatcggaggaaacgggtccatttgattcaagtcatctgaagaacactgaactgagcacagtgaggctccagttgtccttcgctgtgtctatttactcctttgcttttgaggtgctacttgacggcttaggcagagtcagagtcattccgacaggcgattcgttctactatgacggatggaagaagtcagttaagcctgacaacctgccaacaatgtggtcaagacatgtcaactga

SEQ ID NO: 4477 - DNA, 1059 bp, Oryza sativa
atggctccagccattgccaagcctctcctgagcgatctggtggcacaatccgggcaagtcccctcgagccacattcgtccggttggcgaccgcccggacctcgacaacgtcgaccacgagtccggcgccggcattccggtcatcgacctgaaacagctcgacggcccggatcgccgcaaggttgtcgaggccatcggttcggcgtgcgaaaccgacggttttttcatggtgaagaatcacgggatcccggaggaggtggtggaagggatgctgcgcgtggcgagggagttcttccacatgccggagtcggagcggctcaagtgctattccgacgaccccaagaaggcgatccggctgtcgacgagcttcaacgtgcgcaccgagaaggtgagcaactggcgcgacttcctgcgcttgcattgctaccctctcgagagcttcatcgaccagtggccctccaacccaccctccttcaggcaagtggtcggcacctactcgagggaggcgagggcgctggcgctgcggttgctggaggcgatatctgagagcctcgggctggagaggggccacatggtgtcggccatggggcggcaggcgcagcacatggcggtgaactactatccgccatgcccacagccggagctcacctacggcctgccggggcacaaggaccccaatgccatcacgctgctgctccaggacggcgtctccggcctgcaggtccagcgcaacggccgctgggtggccgtcaaccccgtgcccgacgccctggtcatcaacatcggagatcaaatccaggcgctgagcaacgaccggtataagagcgtgctccaccgggtgatcgtgaacagcgagagcgagaggatctccgtgccgacgttctactgcccgtccccggacgcggtgatcgcgccggccggcgcgctggtggacggcgccctgcacccgctggcgtaccggcccttcaagtaccaggcctactacgacgaattctggaacatgggcctccagtccgccagctgcttagaccggttccggcctaacgatcaggccgtctga

SEQ ID NO: 4478 - DNA, 740 bp, Oryza sativa
atgcctagaagtctacaacaaccgagcaatacagttcaatcacgtagaagactaatcaccctaccagagacatgcatgaacttgcgagatttttactcgagacaaatcgtggaaaaggtaaaccgcacccttgacctcgcaaaaagaaggggaccgattcttcatcgggagattatgagcacgtactgccgagaagtccggcaactggggctccggcttctcggcgccatctctgtcagcctcggcctcgaggaggactacatcgagaaggtgctcggcgagcaggagcagcacatggctgtgaactactacccgcggtgtccggagccggacctgacctacggccttcccaagcacacggaccccaacgccctcaccatcctcctccccgatccccatgtcgccggcctccaggtcctcagggacggcgaccagtggatcgtcgtcaacccacgccccaacgctctcgtcgtcaacctaggcgaccagatacaggctctgagcaatgacgcgtacaagagcgtgtggcaccgtgcggtggttaacgcggtgcaagagcgcatgtcggtggcatctttcatgtgtccgtgcaacagcgcggtgatcagcccggcgaggaagctcgtcgcggacggggacgcgcccgtgtaccggagcttcacctacgacgagtactacaagaagttctggagcaggaacctggaccaggagcactgcctagagctcttcaaaggccagta

SEQ ID NO: 4479 - DNA, 1038 bp, Oryza sativa
atgggctcccgcgctgctggatcagtcctcctccgccacctctgcccccgagtctccagctcgacctctgcggctgcgcatgcgcatgcgcagcggcctccgttagccggcgccggcggagggggcgtggccttgtgggcgcgacttctgtccacctccgccgccgcggcgaaggaggagacggccgcgtccaaggagaacaccgggagcaccgccgccgcgaaggcgaaggcgacgaaggccgccaaggaagggccggccagtgcgactgcgagtcccgtggcgagcagctactggggcatcgaggcktcgaagctcgcgaccaaggacggcttcaagtggaagtggtcttgcttcagaccatgggagacgtactcgccggacacgacgatcgacctgaagaagcaccacgagccgaaggtgctgctcgacaaggtcgcctactggaccgtcaaggcgctgcgcgtgcccactgacatcttcttccagaggaggtacgggtgccgcgcgatgatgctggagacggtggcggcggtgccggggatggtgggcggcatgctgctgcacctccggtcgctccgccgcttcgagcacagcggcggctggatccgcgcgctgctggaggaggccgagaacgagcggatgcacctcatgaccttcatggaggtggccaagccgaggtggtacgagcgcgcgctcgtgctcgccgtccagggcgtcttcttcaacgcctacttcctcggctacctcctgtcccccaagctcgcgcaccgcgtcgtcggctacctcgaggaggaggccatccactcctacaccgagtacctcaaggacatcgaggccggcaagatcgagaacgtccccgcgccgccgatcgccatcgactactggcgcctccccgccggcgccacgctcaaggacgtcgtcgtcgtcgtccgcgccgacgaggcacaccaccgcgacgtcaaccacttcgcgtcggatgttcattttcaggggatggatctcaaggatatccctgccccgctcgattatcactga

SEQ ID NO: 4480 - DNA, 1146 bp, Oryza sativa
atgcagatctttgtgaagactctcactggcaagaccataacccttgaggttgagtcctcggataccattgacaatgtaaaggccaagatccaggacaaggagggaatcccaccggaccagcagcgtctcatcttcgctggcaagcagcttgaagatgggcgcacgcttgctgactacaacatccagaaggaatccaccctccaccttgtcctccgcctccggggaggcatgcaaatctttgtcaagaccttgactggcaagactatcacccttgaggttgagtcttctgatactattgacaacgttaaggcaaagatccaggacaaggaagggattcccccggaccagcagcgtctgatctttgctggcaagcagctcgaggatggtaggacccttgctgactacaacatccagaaggagtccacccttcaccttgttctccgcctaaggggaggaatgcagatcttcgtgaagacccttactggcaagaccattacgcttgaggttgagtcatcagacacgatcgacaacgtgaaggcgaagatccaggacaaggagggcattcccccagatcagcagcgtcttatttttgccggcaagcagctggaggatggcaggaccctcgctgactacaacatccagaaggagtccacccttcaccttgttctgcgcctaaggggtggaatgcagattttcgtcaagactctcactggcaagactattaccctggaggttgagagctcagacaccattgacaacgtgaaggcgaagatccaggataaggagggcatccccccggaccagcagagactcatcttcgctggtaagcagctggaggatggccgcacccttgccgactacaacattcagaaggagtctaccctacacttggtgctccgcctcaggggtggtatgcagatcttcgtcaagactcttactggcaagaccattactctggaggttgagagctccgataccatcgacaatgtgaaggctaagatccaggacaaggaaggtattcccccagaccagcagcgcctgatcttcgccggcaagcagctggaagatggccgtaccctcgccgactacaacattcagaaggagtctaccctccacctggtgctccgcctcaggggtggtcagtaa

SEQ ID NO: 4481 - DNA, 1389 bp, Oryza sativa
atgctgccctccccaccactcgccgcgctctccaaagccgccgccgccgccgccgcccgccgcgccgccacggtcgccgcgcgcagccgccgccgcctcctcgtcctccccgctgtcgcctcgctggtaccggggccacctcctgtgctctgccgtcgcgtccgcctcatgccgcagctggagggcccgcgcgctcccccgccgccgcacggcaggggcttcgccgcggccgccgccggtggggatggggctacactggatgctggtgattcggagctggtggtggtctccttctacaggttcgccgacttccccgaccacgccgagctgcggtggccgctcaaggagctctgcgaggagttgcgtgtttcaggtggtattatccttgcgccggaagggatcaatggtagtatatgtggaacaccagaagctgtggagaaagtcttgaacttcattcaatcagacgaccgcttgaaagggttacggatgatccagtctcctgttactccggaagacgaggctatccatcatggacataccagtcaatctcctgttggtgctggggaagatgcacccttccggtgggatcatgtccgtgtgaaattgaaaaaggagatagtcgcacttggagatcccggtgtcatgccaactaaaacagttggaaaatatgttaagccaaaagactggaatgcattgataagtgacccagatactgttgttattgatgtgcgcaacatgtatgagatacgcataggaaaatttaagagagctgttgatccatgtacgaactcattcagagagttcccatcttgggttgatgatcagtttcaattggctgaatctgacagtcaactgtgctcagaaaataatgacaatacaattggcagacagtcggaagatgtgaattcaagcaaacccaaagagttaccacgagttgctatgtattgcactggtggcataagatgtgaaaaggcatcaagtttcctccttagcaagggctttaaagaggtttatcacttggagggtgggatattgaagtacctagaggaaatccccaaggcagaaagcttgtgggagggtgaatgctttgtgtttgacaaacgtgtctcagtggagcacggattagcccaaggaacccacaaactttgttatggatgtaagaaaccagttagtgatgaagacatggaatctcctgagtgggagtatggtgtatcatgtccatattgctttgcaaccaaatccgaggaggagaaggaaagggcaagggcacggcagagacagtttgagacatggggagttattggcggccctgataaaggaagaagtccaaaaaggctggaagctaatcacacagctgaagagcccaaacagttgtcgagctcagtctaa

SEQ ID NO: 4482 - DNA, 1524 bp, Oryza sativa
atggggaaggcggcggcggtggggacggcggtggtggtggccgcggcggtcggggtggcggtggtgctggcgcggaggcggaggaggagggacctggagctggtggagggagccgcggcggagaggaagaggaaggtggcggcggtgatcgaggacgtggagcacgcgctgtcgaccccgacggcgctgctgcggggcatctcggacgccatggtcaccgagatggagcgaggcctgcgcggggacagccacgccatggttaagatgctcatcacctacgtcgacaacctccccaccggaaatgaacaggggttgttttatgcattggatcttggaggaaccaacttccgcgtcctgcgagtccaactcggtggcaaggagaaacgtgtcgtccaacaacagtacgaggaagtctcaattccaccacatctgatggttggaacttccatggaactgtttgattttattgcttctgcattgtcaaaatttgttgatactgaaggtgatgatttccacctcccagaagggagacagagagagctgggcttcaccttttccttcccagtgagccagacatcaatatcgtcaggaacgctcatcaagtggacaaagggtttctccatcaatgacgcggttggcgaagatgttgtatctgagttgggcaaggccatggagaggcagggattagatatgaaaattgcagcattggttaatgacactgtcggcacattggctggtgggaggtatgcggataacagtgttgttgctgctataatattgggcactggtacaaatgcagcatatgttgagaatgctaatgcaattcctaaatggaccggtttactgcctaggtccggaaatatggtaatcaacacagaatgggggagctttaaatcagataagcttcctctttcagaattcgataaagcaatggattttgaaagcttgaatcctggagagcagatatatgaaaagttgatttctggcatgtatcttggagagatagtgcgaagaatcttgctgaagcttgctcatgatgcagctttgtttggggatgttgttccatctaagctagagcaaccgtttgtactaaggacaccggatatgtcagccatgcatcatgactcgtcacatgaccttaaaactgttggagctaagctaaaggatatcgtcggggtcccagatacttccctggaagtaagatacattaccagtcacatttgtgacatagttgcagagcgtgctgcacgcttggctgctgctggcatatatggggtcctaaagaagctaggtcgggacaagatgccaaaagacggcagtaagatgcctaggactgtcattgccttggatggtgggctctatgaacattacaagaagttcagcagttgcttagaatcaactctaacagaccttcttggggatgatgtctcgtcttcggtggttaccaagctggccaacgatggttctggcattggagctgctcttctcgcagcctcgcactcccagtatgccgagatcgactag

SEQ ID NO: 4483 - DNA, 1698 bp, Oryza sativa
atgaactcggagggagggattggcgctggcataaccaatcgcccgtcgcagcaatgctcggccgccgcggcggaggacggggacgactacgagaggccatgcccatggatccccgggaagaagaagaagaagaagatcacgtgcctcgccatttgcctcatcgcgtcgccgatcttgatcctcctggttagccggcgaggctcgccgttcccgtccatgtccggctgggcgtcgccgtccaggatgtacgcatcgaaagggtccaagagagacgtgctcatgggcggcctgctcgtcccgggactcgacgagcggacgtgcgccagccggtacagctcggcgatgtaccgcaagaacacggcgcgatcaccgtgccgtcacctcgtcaagcggctgcgggagcaggaggcgctgcagcggcggtgcggcccgggcacggcggcgtactggagggcggcggagcggctgggctcccggcggaacggcacggccggcgccgacgacgaagggtgcaagtacctcgtgcttgtgccgtacaggggcctagggaacaggatgctggccatggcgtcggcgttcctctacgccatgctcaccggccgcgcgctgctcgtcgacaggggggagtcgctggccgacctgttctgcgagccgttcccgggcacgtcgtggctgctgccgccggagttcccgatcaagaacctccaggacttgaccggcgaggcgccggagagctacaggaacctggtgcagagcgaccggccggccacgtcggtgtcggagctcccctacgtcttcgtcgacctcgaccatggctgcacctaccacgacaagctcttctactgcgacgacgaacgccatttcctccaccgggcgccatggctgctgatgaggaccgacggctacttcccgccggcgctgttcctcaacccggcgtaccaagacgagctcgaccggctgttccctcggaaagactcggtgttctacctcttggcgcactatcttctccatccgacgaacaaggtttggggattgatcacgaggttctacgactcctacctgagggattcggacgaacggctcggcatccaggtcagggtgttcgacggggacaccccgttcaagcacatcttggatcagatcaccgcttgcacgtcacaggagcggttgctaccggaggtggtggagcaagaaccgtcgtcgttcccagctccggcggcggcggcgacggcggcgcggtccaaggccgtcctgatgaccggcctgaactcgtggtactacgacaacatccggtccaggtactggcagtcaccgacggccaccggcgaggtggtgcgcgtgcaccagccgagccacgaggagcaccagctgtccgggagcacgacgcacgacatgaaggcgatggcggagatgtacctgctgagcatgaccgacgccatcgtcaccagcgggtggtcgacgttcgggtacgtcggccacggcctcggcgggctctcgccgtgggtcatgttcaagccggagaacctcacgacgccggacccgccgtgccggcgcgccgtgtccatggagccgtgcttgcacgggccgcccttctacgactgcagggtgaagcgtggcgccgacacggggaagttggtcccacatgtcagacactgtgaggacatgagctggggactgaaacttgttcacccagagtga

SEQ ID NO: 4484 - DNA, 2163 bp, Oryza sativa
atggggaagccgagctcgagctggttcagagcagcttcaggctcgggcatggcgtcggtgggcttcactggagtggtggcgatgctgctcatggccacagcgttcttgggggtcactgccgacactagctcagacgacgtgactgccctaaacacgttctacacaagtctgaactcgccctcgcagctgacaaactgggtggcgcagaacggcgacccttgtggccagtcttggcttgggatcacttgctctggatcaagggtgataacaataaaattacccggtatggggctcaaggggaccttggggtacaacatgaacgtcatgactgcactggttgagcttgatgctagcaataacaatcttggaggaggtgatatcccttataatctccctccaaatcttgagaggctaaatcttgagaacaatagcttcactgggactttgccttactccatttcccaaatggcctcactgaagtatctggacctctctgacaacaccttctctggcactctgccagacagcttcagcaacttgacaagtctgaccatgcttcatttgcaggataatcggtttaccggtaccatagatgtcctatctgatctccctctaactgacctcaacgttcaaaacaatcaattaagtggagcaattcctgataagctaaaaggcataagtaatctgcagataagtgggaactcctttagcaacagtccagtcagtcctgcaccatcatctccaccatccactacttcacaatccccgccacgacagccttctaccagaaatcctcgtaaccgtaacagaaatccaccaattggaagcaatggtgataacggtggcaatggcgatggcagtggcggtgacggtggaggcagaagttctaagataggaggtggggctgttgctgggattgtcatatctttggtggttcttggagcaatggttggattctttgtgttcaagagaaagtcaacgaggcatcaacatggaggagatcctgagaagaatgaacctctcactcttagaccaattgcttcaggaaaattcaatcagctgagaacaataagcatcatatcaccaactgcaaaggaaggattgcagaagactgtctcaatgaacctgaaaccgccatcgaaaatcgatttgcacaagtcctttgacgaaaatgatctcacaaacaagcctgttttggcaaagaatgtagacctttcttccatcagagcaactgcgtacactgtggcagacctgcagatggcaacggagagcttcagtgctgacaatcttatcggtgaaggctcttttggccgggtttacagagcagagatctcagatgagtcagatcataaggtactggctgtgaagaaaatcaatgtatctgcctttccaagcaaaccatccgatttctttattgatttggtagcaaagatttcaaaattaaaccatccaaacctctcagagcttgacggctactgcttggagcatggacagtatttgctggcatatgaattttacagaaacggttctcttcatgacttccttcacctgtctgatggatacagcaaaccactgtcttggaatagccgtgtcaagattgcattaggatctgcaagggcattagagtatatgcacgaaacttgctcaccgtctatcatccacaagaatttcaagtcatctaacatactgttggataatgagcttaaccccccatgttttccagattgttgggaatcagatgagaactcaggatatagagctcccgaggtgaccatgtctggacagtactctcaaaagagtgatgtgtacagttttggagtcgtcatgctagagctcctgactggcaggaaagcatttgacagatcccaaccatggccacagcagtcgctagtccgatgggcttctccgcagcttcatgacatcgatgcgttagatcagatggtagatccagcactggaaggactgtaccctgcaaaatccctctctcgattcgccgacgcaatcgcgctctgtgtccagcctgagccggaattcaggccaccgatgtcggaggtcgtccagtccttagtccggctcgtgcagaggtcaagcatggggtcagtcctcagtggtggcgagagcatttcgcgacgatacgacaactccggtgactacacattctag

SEQ ID NO: 4485 - DNA, 2328 bp, Oryza sativa
atggatcttgagtttgggagaggcatgagatccccacagagggactcatggaagacaaccttgctcctggcgtaccagagcttgggggtggtttatggagacttgagcatatctcctctctacgtgttcaagagcacttttgctgaggacatccagcactccgagacgaacgaggagatctttggtgtgctctctttcgtgttctggacactcaccttgatccctctaatcaagtatgtctccattgtcctacgagctgacgacaatggcgagggaggaacttttgctctgtactcgctaatttgccggcatgccaatgtgagccttcttcctaataggcaaattgctgatgaggagctttccacttacaaattggaatgctcttctgagagaaccgataagtcctgcatcaaggtctggcttgagaagcacaagaagctgcataccgccctgctgatcatggttttgattggtacatgcatggtgattggggacggtgttctcacgccagctatatccgtgttctcggcagtttcaggtcttgaattctccttgtccaaagaccaccgtgaatcattacggtactcatcgggttggatttctcttgccccgatagttctagcctggctaatctgtatgagtgctcttggactttataatattatacattggaatcctcatgtctaccaagctctaaatccctgttacatgttcaagttcttaaaaaagacaagaaaatatggttggatgtcacttggtgggattttactctgcatgacaggatcggaagcaatgtttgctgatcttggacacttctcatatagtgcgatccagcttgctttcacttctttagtgtaccccgctctcattctggcatacatgggtcaagcggcttacttatcaaagcatcatgacttttactcgaactcccaagttggattttacatcgcagttccagataaggtgagatggcctgtgcttgtactggcgattttagcttcagtggtcggaagccaagcgatcatcagcggaacattctcaatcatcaaccagagccagtccttaagttgtttccctcgagtgaaagtcgtacacacgtctgataaaattcatggccaaatatatatccctgagattaattggttgctcatgatcctctgcattgctgtgactgttggatttagagacacaaagcacatggggaacgcctctgggttggctgtgatcacagtgatgctggtgaccacctgcctgacgtccctggtgatcatgctgtgctggcgcaggccgccggtgctggcgctgtgcttcctcctcttcttcggctccgtggaggcgctctacttctcggcgtcgctcatcaagttcctggagggcccgtggctgcccatcctgctggcgctcttcctcatggccgtcatgctggtgtggcactacaccaccatcaagaagtacgagttcgacctgcacaacaaggtcaccctggagtggctgctcgccctcggcgacaagctcggcatggtgcgcgtccccggcatcggcctcgtctacaccgacctcacctccggcgtgccggccaacttctcccgcttcgtcaccaacctcccggcgttccaccaggtgctggtgttcgtctgcgtcaagtcggtgccggtgccgtacgtgttccccgccgagcgctacctcatcggccgcgtcggcccgccgggccaccgctcctaccggtgcatcgtgcgctacggctaccgcgacgtgcaccaggacgtggactcgttcgagacggagctcgtcgagagcctcgccaccttcatcaagctcgacgcctcgtaccggtgcagcgacgcgagcggcggcggcggcgatcacgaaccggaggaggagcgggggacgcggctcgccgtgatcgggagcagccacgccagctacgacatccaggacagcgtccagcactcgtcggcggcgtccgtggagacgacgacgacgcgccgacgaagcggcggcggcgacgacgacgggagccccggcggcggcggcgggcgggcgaagcaggtgcggttcttcatcgacagccacgtggcgagcccggaggcggcggacaacaagcaggtggcggaggagctggaggcgctggcggcggcgagggacgccggcacggccttcatcctgggccactcccacgtgcagtgcaagcccgggtcgtcgctgctcaagaggctcgccgtcgacgtcggctacaacttcctccgccgcaactgccgcggccccgacgtcgccctccgcgtcccgccggcgtcgctgctcgaggtcggcatggtctacgtgctatga

SEQ ID NO: 4486 - DNA, 828 bp, Oryza sativa
atgcattcgagtactcgagctcgcctcctcctcgctgccgccgtactcctgctctcggctgctccggcggccagagctcaggaaaccgacgatgaaaggaagtttggttacgtccccggcacggaaaacgggccggggaactggagtaggctcgatccgagatgggccaagtgcaacacgggcaacatgcagtcgcccatcgacctctcccacgaacgcctgatgcgcaacctcggctacctcgactactcctacctcccagccgaggcctccatggtcaaccgcggccatgacatcgaggtgaagtttatgggaaacgccgggagagtggtgatcaacggcaaggcgtacaagctcaagcagctgcactggcacacgccctccgagcacaccgtcaacggccgcaggtatgacatggagctgcaccttgtacacgacgacggcaacagcaacacggcggtgatcggcaatctctaccaaatcggcaaccccgaccccttcctgctcatgctggagccattcattagaaggatagcagatacaaaagataagtcagagccgatcggtgtggtggatccacagctagccaagagcccagacgccgtgtactatcgttacatgggctccctcacgacaccgccttgcacggagggagtgatctggacggttttcaagagggtttttcttttggcccagactgtggcacagtatcagcttgatcttctcagggaagccgtggctgacggttatgagaacaacgcaaggccccttcagaaggtgaacaacagaaacatcagcattttcattccagaccctaagaaggactaa

SEQ ID NO: 4487 - DNA, 2139 bp, Oryza sativa
atggcgtcggccgccgccaacaacagtagctcggccgcctacgatgcggcggagacaggcggcctcctccgccgccgcaacaccaccgccgccgcccgcggcaatgcgggggaggaggaggaggaggcggaggcggtggcgccgtccgtggagcaggcgttcgcggacaagcccgtgccgtcgtggagggagcagctgacggtgcgcgccttcgtggtcgggttcctcctctccatcatgttcaacatcatcgtcatgaagctgtccctcaccaccggcgtcatcccctcgctcaacgtctccgccagcctcctcggcttcttcctcgtccgcctctggacggcggccatcgagagggtgggcttcctcaagcagcccttaacccgccaggagaacaccgtcatccagacctgcgtcgtctccgcctacggcgtcgccttcagcggtgggtttggcagttacttgtttggtatgagcgagaccatagctaagcaagcaacagaggctaatgatccgatgaatatcaagaatcctcaccttggatggatcatcgggttcatgttcctcgtcagttttgttgggctatttgcactggtgcccatgcgaaaggtgatgattgtggactataaactgacctacccaagtggcactgcaactgcttaccttattaacggattccacacacctgagggtgctgatcttgcaaagaaacaagtccggacattaggcaagtacttttcgattagcttcctctgggctttcttccagtggttctacactgctggggacaactgcgggtttagctccttcccgacatttggccttgaggcttttaagaacaggttctattttgatttctcacctacctatgttggtgttggaatgatctgcccctatatcgtgaatgtgtctcttctcattggtggcatcatctcatggggcataatgtggccactcataagcaagaagaaaggaagttggtaccccgagacacttccagaaagtagtctacttggactgcaggcttacaaggtgttcataaccatagcagtaattcttggggatggcctttacaactttgtgaaggtcttcggctacacaatcaaaggcttcatagttatgtataagaacaaaaactcaaacacgcttcctatctccgacaatggcactcctgccaacgccactgaagaggagtcatttgatgacaagcgtcgcaatgaactattcctgaaggatcaaattcccaagacagttgcgattgggggctatgttgttcttgcagttataacgagtggttgcctccctctcattatcccacagctcaagtggtactatatattgattgcatatatatttgcacctataatggccttctgcaatgcctatggaagtggcctgacagattggtccctcgccaccacctacggtaagcttgcaatatttgtgtttggtgcgtgggcaggcgcttcgcatggtggtgtgcttgtaggactggctgcctgtggtgtcatgatgaacattgtgggaacagcttctgatcttatgcaagacttcaagactggatatatgactttagcctcgccaagatccatgtttgtcagccaggtgataggtactgccatggggtgtgttattgcaccctgcgtcttctggctgttctacaaatcctttaatatcggtgcaagtgatggtgcttacccagcaccttacaccattatgtaccgtaacatggcgattctgggtgtcaatggattatcctcattgccaaagtactgccttacactatgctacatagcctttgttgctgccttcatcatcaatctgataaaagacctggtaccagagagagtggcaaagtacatcccgatccccatggcagcagcaattcctttctatcttggaccatacttcgccattgatatgttcatgggcagcgtaattctctatttctgggaatggaggaacaaagatgaagcgcagtcgttcggtccagcagttgcgtcgggcttgatgtgcggtgatgggctatgggccctacctcaggctgttctttctcttgtcaacgtgaatcctccgctttgcatgaagttcttatcaagggctgccaatgccaaagtggatacattcctcggtaactaa

SEQ ID NO: 4488 - DNA, 2019 bp, Oryza sativa
atggcgtcgcacgcgaacgcctccggcggcggcggcgacgaggagatggtggaggcgagcacgctccgccaccggcacggcgccggcaaggatgccaacggcgtcggaactgagcggcagctggcggcggcggcggcggaaggggagraggaggggcctcgtcggtggagcgcgcgttctggacagggcgtgccgtcgtggcgggagcagctgacggtgcgcgcgttcgtggtgagcttcttcctctccatcatgttcagcatcatcgtgatgaagctgaacctcaccaccgggatcatcccgtcgctcaacgtctccgccggcctcctcggcttcttcttcgtccgcctgtggacggcggccatcgagcgggtggggctcctccggcagccgttcacgcgccaggagaacacggtcatccagacctgcgtcgtcgccgcctacggcatcgccttcagcggtgggtttggcacatacttgtttggtatgagtgaaacaattgctaagcaagcaacagaggctaataatgctcagaatgtcaagaaccctcacatcgggtggatgattggattcctcttcctcgtcagttttattgggctacttgctcttgtgcctctgagaaaaattatgattgtcgactacaaactgacctatccaagtggcacggcaacagcttatcttatcaatggcttccacaccccagagggtgcaaagcttgctaagttttactttgatttctcccctacctatgttggagtagggatgatttgcccccacattgtgaacgtatctgttctattgggaggcatcctctcatggggaatcatgtggcccctgataagaaacaagaaagggagttggtatgctgcctctctctcagaaactagtcttcatggactgcaaggctacagggtgttcatatccattgccttgaattcttggaaacggcctgtacaacttcgtgaaaggtgctcatccggaaaaaccgctggcttcgtcgtgatgatgaagaagaacagcacgcttccggtctccaacaatggcagcccgatggtggccactgaagccatctccttcgacgacgagcgccgcaccgagctcttcctcaaggaccagatccccaagacggtcgcgttcggggggtacgtcgccgtcgccgccgtatcgatcggcacgctcccgcagatcttcccgcagctcaagtggtactacatcctggtcgcctacgtcttcgcgcccgtgctggccttctgcaacgcctacggcgccgggctgacggactggtcgctcgcgtccacgtacggcaagctcgccatcttcatcttcggcgcgtgggccggcgcgtcgaacggcggcgtgctggtcgggctcgccgcctgcggggtgatgatgagcatcgtgtcgacggcgtccgacctgatgcaggacttcaagacggggtacctgacgctggcgtcgccgaggtccatgttcgtcagccaggtgatcggcacggcgatggggtgcgtcatcgcgccgtgcgtcttctggctcttctacaaggccttcgccgacatcggcgtgagcggcaccgagtacccggcgccgtacgccatcgtgtaccggaacatggccatcctcggcgtcgacggcttctcctcgctgcccaagcactgcctcacgctgtgctacatcttcttcgccgcggcgatcgccatcaacctggcaagggacctggcgccaagcaaggtggcgaggttcatcccgctgcccatggcgatggcgatcccgttctacatcggctcctacttcgccatcgacatgttcatcggcaccgtcatcctcttcgtgtgggagatggtgaacaaggccaaggcggaagcgttcgcgccggcggtcgcctccggcttgatctgcggcgacggcatctggacattgccgcagtccatccttgccctcgccaaggtgaagccgccgatctgcatgaagtttctgtcgcgatcggtgaatgcgcaagtggatggtttcctgggtaactag

SEQ ID NO: 4489 - DNA, 2175 bp, Oryza sativa
atggcgaccgttcctacgccgagcgaggcccacggcggcgcgacgccgacggccgccgacgtggagatggtggaggcgagcgagctccgtcggcggggcaagcccagcggcgaccgtgcgacggggccgtcccgagacggggccgccgcggcggcggaggaggcggcggcgccgtcggtggagcgcgtgttcgcggacaggcccgtgccgtcgtggcgggagcagctgacggtgcgcgcgttcgtggtgagcttcttcctggtcatcatgttcagcgtcatcgtgatgaagctgaacctcaccaccggcatcatcccgtcgctcaacgtctccgccggcctcctcggcttcttcttcgtccgcctctggacggcggccatcgagagggtggggctcctccggcagccgttcacgcgccaggagaacaccgtcatccagacctgcgtcgtcgccggctacgacatcgccttcagcggcggctttggtaactacatattgtccatgagtgaaagaatcgctgggctgggaaccgaggcaaataatgctcaaaacataaaaaatccccatctaggatggataattggttttctgttcttggtcagcttcattgggctctttggtcttgtgcccttgagaaaggttatgatcattgactacaagctaacttatccaagcggcactgcaactgccttcctcataaacggctttcacacgccccatggagccaagattgcagcgaagcaagtaaagaaactcggtatattcttcatcctcagcttcttctggggtttctttcagtggttctacacagctaccgatgattgcggattccataaattcccatcactaggccttcaagctttccaacacaagttcttctttgacttctcacctacttatgtcggagtgggaatgatttgcccacacattgttaacgtatctgttctccttggagggatcctctcatggggcatcatgtggcctctcatagccaagaaaaggggagattggttttctgctgatctccctgacggtagtcttcatggaatgcaagggtaccgggtcttcatagccattgccttgattcttggggatggcctctacaactttctcaagatgattattctcacagccttctcgctaagatctcaaatcaagaagaaaaatgctagtacacttccagtctctgatgatggcatggttaccactactgcagctgtctcatacgacgaggagcggcgcaacgaactctttgtcaaagatcaaattccatggtacgttgcatatggaggctatgctgttgttgctgccatttctatcggtactgtcccgcagataatcccacagctgaagtggtaccaaatcttggtagcctatatcgtcgcgccaattcttgccttctgcaatgcctacggaactggcctcactgactggtctcttgttacaacctatggaaagcttgcaatctttgcatttggtgcatggaccggtgcttcacatggtggtgttcttgctggcctggctgcctgtggtgtgatgatgaacattgtgtctactgctgctgacctgatgcaggacttcaaaacagggtacctcacactggcctcacccaggtcaatgttcgtcagccaagtcattggcactgcaatgggctgtgtcattgctccctgtgtgttctggcttttctacaaggcctttgataatattggcatcagtggcagcgattacccagcgccaaatgctgccgtcttccggagcatagcgatactaggtgttgatggcttctcctcgcttccaaagaactgcctcaatctctgttacgcgttctttgctgctgcaattgtcgtcaacctgataagagatcttgtgccaaaggtgtcaaggtttataccgatcccgatggctatggcgatacctttctacataggatcatatttcgcgattgatatgttcatcgggacagtcatattgtttgtctggcaacgagtggacagggcgaaagcagacacgtatggacctgcagtcgcttcaggcatgatatgtggtgatggaatttgggttttgcctcagtcggtgcttgctcttgccaaggtgaagcctccaatctgcatgaagtttctgtcgagaaggacgaatgacaaagtggatgcttttcttacaacattgggaaaataa

SEQ ID NO: 4490 - DNA, 1047 bp, Oryza sativa
atgggcgaggaggagaagaaggaggcggcgaaggccaaggaggaggagaagcccaagcaggaggagaagcccaaggagcaggaggaaggcaagaaggaggagaagcccaaggaggaaggggagaaggggaaggacggcggcgrcggcgaggagaagaaggacggcgaagcggctamcgcgcsgamgatatattctaaggttgttttcagaagaattcatgtggtttcatggtgggatttggaggggaggttaggtgggggagtggaggatgtgatcgccgactcgaaggcgcacaaggtgttggtgaaagggaagaaggcggctgcagacccgatgaaggtggtggagcgagttcagaagaagaccggccggaaggtggagctcctgtcgccgatgcctcctccaccggaggagaagaaggaagaggagaagaaagaggaacctgagcctccaaagcctgaggagaagaaggagccgccggtgatcgcggttgtgctgaaggtgcacatgcattgtgaggcctgtgctcaggggatcaggaagaggatcctcaagatgaaaggggtacaatcagctgagcctgacctgaaggcgtcggaggtaaccgtgaaggccccttcccgagaaaggtggcagcccgaaggtggcgatgagaagaaggcagccgaaggcggcgatgagaagaaggacgagaaggaggagaagaaggatggaaaagaggaaggtggcaatggtggcggagatgagaagaaggaagagaaggagaaggagaaggagggtggcaatgccgatggcgaggagaaggacaaggacaaagagaaagaccccgccgccattgccgccgcgaacctatacctgcattatccaaggttcgcattccctgccggatactacccgcccgggccgggttatgcctacccaccgccctaccctccatcctacccgccaccataccagccatcctacccgccatacccgtcgcacccttcgcaccacccgtcgcagatcttcagcgacgaaaacccgaatgcctgctctgtcatgtaa

SEQ ID NO: 4491 - DNA, 660 bp, Oryza sativa
atgacgccggtgaaggtgtttgggccggcgcaatcgacgaacgtggcgagggtgctgttgtgcctggaggaggtcggcgccgagtacgaggtcgtcaacgtcgacttcacggtcatggagcacaagagccccgaacacctcaaacgcaacccgttcgggcaaatcccagctttccaggacggggatctgtacctctttgagtcccgcgctattggaaagtacatcctacgcaagtacaagacgagggaagctgacctactccgggaaggcaacttgagggaggcagccatggtggatgtctggaccgaggtggagacacaccagtacaactcggcgatttcaccgattgtgtacgagtgcatcatcaacccagccatgcgtgggatcccaactaaccaaaaggtcgtggacgagagcgcggagaagctgaagaaggtgctggaggtgtacgaggcacgactgtcacagagcacgtacctcgcaggtgacttcgtcagcttcgccgacctgaaccacttcccctacaccttctacttcatggggacaccgtacgcgtcgctgttcgactcgtaccctcatgtgaaggcatggtgggagaggctcatggcgaggccgtccgtcaagaagctcgccgcggtcatggctcctcagggggcgtag

SEQ ID NO: 4492 - DNA, 1626 bp, Oryza sativa
atgggttgcttcactgtcctgagatccaagaagaagaagcctcttgctctcaccaagaaatcggttgatgcaagggaaagcacgtcctcaagactcccagagccagaagcgcatgtgccatcgttacaatctgctcctcctagttttaggaacaaggctaaaatccaccaatcggaaaagaaagcttcttacagcagagcgcgcgtgctgtctgctccttccagcctaattgtggttgatcaggatggtcttccatatgccgaattcgatgatcaagatgactccaggggcaagggaggttctataaagggccaccgtttctctaatccactgccccttcctctcccatcaccagaaggaaaatcattgaggaactttggcagcttcaaagccatcaatgcaagtggaccactcgatgcttcaggccctctgccacttcctccaaagaagtgtgatgggcttaagaatttctcctatgaggaactttcatcagcttgccaatggttttctggtgaccagtgtgtttccgaaagtttgacatcaacatcatacaaggcgtcctttagggatgattttaccgacccaaagaccattgaagcaatagtatctcggttgctctcctccactcagagtttgaaagagtttaaaacacaagtgaataccttggcatcacttcagcatcccaacttatgtaaactaatcggctttcacgcaagagaagaatctaatgaaaggatgttggtctatgagcgactccatcatggcagcttagataaactactctttggaagatcggatggtcgtttcatggactggtcagcacgtttgaaggttgctcttggtgctgctagaggcctggctttcctacatgatgaagggccttttcaggccatgtacaatgacttctcaacctcaaacatccaaattgacaaagatttcactgcaaagctatcaggatatggatgtgttggattcaataccgaggaggaaatatcaaatgcatctgtggctgctgcaaacctctcagtggaaaccttggagaaaggtgtactgactcccaagagcaacgtatggtgctttggagttgtcctgctggagctaataacaggaaggaagaaccttgatgtccgttcctcaaaagaagaacgcaatattgtcaagtggagtaggcctttcctcaccgatgatagtcgcctatcgttaatcatggactcccgtataaaaggacgcttccctaccaaggctgctcggattgtagcagatatcatattgagatgccttaataaagatccatcagagaggcctaccatgagggccgttgtggagtccctagcaagcgtccaggacataaaggttccatgtcgatatcctttgcaagagccatctgctgccccaagaaaggtgatgttaaaatctacaagtctcaatggcatcattcatcaccatcctgtcgtaaccttctcaccgtcacctccttcgcgaaaccaacatttgctctcgccaaggtcatccacgtctgcactgcttcctccaaggaccagctgtgctctggatgaccctagagtaagctctatcaagaaatcgccttcccctattttacggagatctggtgttgagggtttttga

SEQ ID NO: 4493 - DNA, 3525 bp, Oryza sativa
atggtcggcgtcctgctcctccttagcatcatgccgctcgccgccggcgaactactggcgcagctctgcggcaacggcggcaactacacggccaacggcacctaccagtccaacctcgcgcgcctcgccgccgccctcccgagcaacgcctcctcctccccggaccacttcgccacggccaccgccggccaggcccccgacgcggcgtacgcgctcgcgctctgccgcggcgacgtcgccaamgccaccgcctgcggcgactgcgtcgcggcctcgttccaggacgcgcggcggacgtgcccgagcgacaagtcggcgaccatctactacgacgactgcctcctccgcttcgccggcgacgacttcctcgccgcgcccaacatcacggagaacgccacgctcttccaggcatggaaccagcagaacatcaccggcgacgccgccgtygccgccgscaacgtccgcgagctgctgacggtgacggcccggacggcggcggcggcggcgaggcggttcgccacaggcttcatggacggaagcagcgagtcgaagcagacgctctactcgctggcgcagtgcacgccggacttggccgccggcgactgcctggcttgcctccagcgcctcatcgccatggtgaactccaccacctccgtgcgcttgggaggacgcgtcctcttgctccggtgcaatctcaggttcgaggcctttgtcttctacgccggcgagcccacgcggcgtgtcagcccgccgggctcaactccggcgccggattccatcgctccgaccaaaaacagaaagaagagcaaatcatgggtaattgctgctattgcagctcctgtagcggcagtagttctctgcttgatcgtctgttactactgtcgttggtcaagaaggttcagaaaagatagagtgagattgcgagaaaagcgtagtcgcaggttccgaggagatgaactaatttgcgaaatggagggagagatttcagagttttcggttttcgagtttcgtgaggttatcaaggctacagataacttttctgaagaaaacaaacttggagaaggtggatttggccctgtatataagggcctgttttctgagggattggagatagcagttaagagacttgcttcacattcaggacaaggtttcctagagttcaaaaatgaagtccaactaattgccaaactccagcacaggaatttagttaggctcttgggatgctgctctcaaggagaggagaaaatattggtctatgaatacttgccaaacaaaagtttggacttctatattttcgatgaaaggaaaaaagatttactagattggaacaaacgtctagtgataatcgaaggaatagcacaaggactgctttatctacataagcactcccgattgcgtgtgattcatcgagaccttaagccaagtaacattctcttggacagcgaaatgaaccccaaaatttcagatttcgggctagcaaaaatatttggctcaaatagcaatgaaggaactacaagaagagtggttgggacctatggttacatggctccagagtattcttccgagggcctcttctctccaaaatctgatgtattcagctttggcgttataattctcgagatcattagcggaaaaagaaatgccagtttagatcaatgtgaagacttcatcaatctccttggatatgcatggaagttgtggtcagaggaaagatggcttgaacttcttgatgcatcattggttacaaattggcagtcatcgtgtatgttgaggtgcattaacattgcgttgttgtgtgtacaagagaatgcagttgatcgaccgaccatgtcaaatgttgttgcaatgctaagtagtgagagtatggtccttgatgagcctaagcatccagcatatttccatcggcggcggttgcggacatccccggcggcgccggcgccgccgccggtgcttccgccggacaacgacgacctcatccaggagatcctcctcggcttcccctcgcatccctcctccctccccggcgcctccctcgtctgcaagcagtggcgccgcytcgtctcggacccggctttcctcsgccgcttcggcgccggccacggggatccccccttcctcggcgtcttcaaggacgagctccaccacccggtcttcagatccgtcctcgacccgccggatctcatcccgcccgaccgcttcgcgctgcggctcgacgactaccgcgccgcgagcctcctcggctgccgcaagggcctcgtcctcatcttcaactacaacacctgcgagttcctcgtgtgggatcccgtttccggcgatcgccgccgcgtggccgttccgcaggagctcgacggtggggagagatccgtcatgaacggcgcggtgctttgtgccgccggcgacgacggccacgtgcacggcggcggcttccggtcctgccacttcaaggtggtcttgatcggcgccagcaagatggatgggcgaatcttcgcctcaatttactcatcggtgaccggcgaatggggtgatgccatcttcacagggcctgtatccaccatctactattttggttcacctgccatacttgttggcaactcactctattggttgctatctgtgtgggggcctcacattcttgagttcaatctcgagacgtcgaccctagctgtgatcgatggcaattggccacagatgaatttttctagcgattgccactattgtatcatgcgtggggaggatggtaatgtcggccttgccattctgtcgtaccgcggattccaaatgtgggagaggaaggtcactcttggaggtgccgcgaaatgggtgctgtggaagactgtcaagctgcatgacattcttgggctgagttctgctgtgcagagagagaaaacagatatcgtgggatattccgaggatcctaatgcgtttattttagtggtggatacggatttctacatgttccgagttgactcaatgcagtccaagaaactttttgattgcaatgtcgtcacccgctgtcatcccttcacaagtttctacactgcaggtttggatatggagcatgtcgtatcagcagtaaccggtgaactggtcacccggttcatctcctacctcatgagcaagtactcaagaagacatgaaatctcagaggagaagcagctgaaaagactgcagcagcttctcctacgagtttccatggttgtcgaggaggcagatgggcgatacatcaccaactccgggatgctgatgcagctgaaggcacttgctgatgccatgtacagaggccaccatgtcctggacatgttcaggtgcaggaccctaattcaggaggatcccatcaaggaggttagcaacccatttcctcccctcaaacgtttttgcaaaattgttgatgcttctggaaaggacaaggccaggcaccttgagttgcacagaactttggaaatattagaaactgctgttgatcacatggcagaatttgttggtycttttgggtggatgcgatcggatgtcaaggagaccatatga

SEQ ID NO: 4494 - DNA, 876 bp, Oryza sativa
atggggctgaaggggttcgtggagggcggcgccgcctgcgtcgtggccggcagctgcacccacccgctcgatctcatcaaggtccggatgcagcttcacggcgaggggccccctgccccagcgctcgcgttccccggcagcggcgcgcaccaccaccaccaccaccacctgctgcagcagcagccgccgcgtakgcccgggccgatcgccgtgtgcgcgcagatcctccgcgcggaggggccaaccgggctgctctccggcgtgtcggcgaccatgctgcggcagacgctctactccacgacctgcatggggctgtacgacacgctcaagaggaggtgggagcgtgacgacggcggcggcggcggcccgctgccgctgcaccggaaggtcgcggcggggctcttctccggcggcgtcggcgcggccgtggggaacccggccgacgtggccatggtgcggatgcaggcggacgggcggctccccgcggcgcagcggcggaactaccggagcgtcgcggacgccatcgtccggatgcccggacgagggcgccaaggaggccatcctggcgcgcgcggccagggcgccgacgggctcgcaacgcacgtcgcggccggcctcgccgccggcctcgtggccgcgtcggcgtcaccccgtcgacgtcgtcaagaccagggtcatgaacatgaaggtggtggccggcgcgcgcagccytactccggtgcgctcgactgcctgatcaagaccgtgcgttcggagggggcgatggcgctgtacaaggggttcgtcccgacggtgacgaggcaggggcccttcaccatcgtcctcttcgtgaccctcgagcaggttcggaagctgttgaagggcgtcgacttctga

SEQ ID NO: 4495 - DNA, 3702 bp, Oryza sativa
atgaagcgttacctgtccgccctggccgtaatggccaccctggccgccgccacaccggcactggccgataccctgcttgtcgaccgtgcccgcgagaagccggccggtgccctgcccgtgcgcggccagagcatgcagcaggtgcaggcgcagttcggcgcgcccagcgaacaactgcagccgcgtggcgggcagaagcggcagtggccgaccatcaaccgctgggtgtacccgcagttcaccgtctacttcgagaagcagaagtgggaagcccagagcggcgtcctgattgcctggcctaccgccgacaccgactgggccgaccgcctgggccaggtggaagagacctacatcgccctggtcgcggccatcacccgcttccagccggtgctgatctgcgtggccgacgacgatgtggagacctatgccgaaatgcggctgcgctccaaccgcatcgacatggacaaggtccacttcaccacggccgcctacgacgatacctggctgcgcgactccggcccgatcaccctgcgccgcgccgacggcggtttccagctgctggacttccgcttcactggctggggcggcaagttcgacgccaccctggatgatcagctggtgggcgtgctcgaccaggctggcgtgttcaacgacgccccggtgcgcagcattccgttcgcgttggaaggcggtggcatcgagaccgacggcgaaggcaccctgctgaccacctggaagtgcctgcacgaacgccacccggaccgcgaccgcgccagcctgagcgccgacctggccgactggctgcagcaggaccgcgtgctgtggctggaccacggctacctggaaggcgacgacaccgacgcccacatcgacaccctcgcccgcttcgcctccgctgacagcatcgtctaccaggcctgcgacgacgagagcgattcgcactacgccgagctgcaggcgatgggcaacgagctggccgcgctgcgcaccaaggacggccagccgtatcgcctgttcccgctgccgtgggcgcggccggcgccgktgctgatgccggcctatggcgacccggccgacgacctggcccgtgatgtgctggcccaggcgcatccgggtcgcgagatcgtgcaggtgccttgccgctcgctgatctggcagaacggcagcctgcactgcatcaccatgcagctgccggccgggttgttgaaggagcgcaaccacggtgatgccgccgccaacctggcggtgatcgaagcacgcgtggccgaggcggctgcgcagggtgccaagctggtgctgctgcaggaactgcacaacggcccgtatttctgccagcacgaatcggtggatgaattcgacctggccgaatccattccgggcccgagcaccgagcgcttgggcgcactggcgaagaagcatggcgtagtgctggtcggctcgctgttcgagcgccgcgctgccggcctgtaccacaacaccgcggtggtgtttgaaaaggacggcagcctgctcggcaagtaccgcaagatgcacatcccggacgacccgggcttctacgagaagttctacttcaccccaggcgacatcggcttcaagccgatcgatacttcggtgggccgcctgggcgtgctggtgtgctgggaccagtggtacccggaagcggcacgcctgatggcgctggccggcgccgagctgctgctgtacccgaccgcgatcggctgggacccggacgacgtgcaggacgagaagacccgccagcgcgacgcctgggtgctgagccaccgtggccacgccgtggccaacggcctgccggtgctgagctgcaaccgcgtcggccacgaggcgtcgccgctgggcgcgtcgggcatccagttctggggcaacagccacgtgctcggcccgcagggcgagttcctggccgaggccggcaccgaggccaccgtgctgctgtgcgacgtcgacctgcagcgcagcgagcatgtgcgccgcatctggccgttcctgccgctacatcgactgagccggagcccgcgcatggccgtcctcatccgtgatgccggtccggccgacatcgacgcaatcaccgccatctatgcggtggaagtgaccgatttcgtcaacacctacgagtacgacatcccggacgcgaccgagatgctgcgccgcatgcgcgacatcatcgatcgtggcttcccctacctggtcgccgagatcgacggccagggcaagggtgtcggcaccggcctgctgcaggccttgatcgacgcctgcgtggcacgtggctaccggcagatggtggcggtgatcggcgaaccgaccaacaccgcctcgatcaagctgcacgaacgcttcggctttcgcgcagckgtgggsgtgtgtcgcgcggcctcggccgcaagcatggccgctggctcgacaccgtgcagatgcagcgcgcgctcggcgatggcgccgacaccgcaccctccaatgaatgaacccatgaccgaaacccttcccgagaccggcgacgacctgttcgccggccagccggtgcgcgtcgtcgaacgcgacggcgtgcgctacaccctgctgggcaccgcccacgtctcccgcgccagcgtcgaggccgttgaaaaagccatcgacagcggccgcttcgatgccgttgccgtcgagctggacccgcagcgcctgcaggcgctgagcgaccccgacacactcgccaagctcgacctggtcgaggtgatccgcaagggccgcgtcgccctgttcgccgccaacctggctctgtccgcctatcagcgtcgcctggccgagcaactcgacatcgagcccggtgccgagctgaaacgtgcggtggaactcgcccgcgaacgcaacctgccggtgcacctgatcgaccgcgaggtcggcttgaccttccgccgcgcgtcgcaacggctgggcttcttcggcaagctgaagctggttgccggcctcggcgccggcctgttctcgtccgaagaagtgggcgagaacgagatcgagaagctcaagcagggcgacatgctggaatcgagcttcggtgagttcgccagcgagagcccggcgctgtacgagaccatcatcggtgagcgcgaccgctacatggccacgcgcctgcgcgaagcgcacgacccgcagcagcgagaagtgctggcggtggtcggtgccggtcacctggccgggctggcgcgctatctggaaaccgataccgaggcaccggcgccgctgcgcgccgagctggaggcggtgccgaagaagcgcaacatcccgtggttcacgctcggcatcctggcgatcgtggcgaccggcatcggtgtgggcttctaccgcggcggcctgggcgtgggcaccgagctgctggcgacctgggcaatgtataccggcggcctggcgggcctgggctgcctgctggcaggcggtcacccgctgagcatcctcaccgcgatcgcggtggccccgttcaagccgttccgcctgagcatcccgaccggcgcattctcggcgctggtggaagcgcgcctgcgcaagccgacctacgaggacttcctgaagctgcgcgacgatgcgcagagcctgaagggctggtaccgcaatcgcgttacccgcgtggtgctgaccttcatgctgaccaacatcggcagcatgctcggcctgtggctgaccaccttcaaggtgtggggcaaggtggcggggtaa

SEQ ID NO: 4496 - DNA, 390 bp, Oryza sativa
atggctcagggaaggggcagtgctgcaggacgacgcaacgccgccgtgctggcgatggtcctcctctgcgtgctcctccacggcgagctcgccgagtcggccgtgtacaccgtcggcgaccgcggcggctggggcttcaactccggcggctggctcaggggcaagcgcttccgcgccggcgacgtgctcgtgttcaagtacagcccgtcggcgcacaacgtggtggcggtgaacgcggcggggtacaagtcgtgcagcgcgccgaggggtgccaaggtgtacaagtcgggcagcgaccgcgtcaccctggcgcgcggcaccaactacttcatctgcagcttccccggccactgccaggccggcatgaagatcgccgtcaccgccgcctga

SEQ ID NO: 4497 - DNA, 2000 bp, Oryza sativa
atgatggacggcgccgcgcctctgcttcccgagacgagccccgagagccgccagcaacgtgatccggagagggggaagaggcggacgccggtcctcccggccgtcgtcgcgtccgccgtggtccttctcggcctcgcggcgctcttcctggtgtatggatttcacgacggtggagacgggagggcggccgtactcgcgcccggcaccgtggaggtcgcggcctcgtcgtcccgcggcgtcgtggagggcgtctcggagaagtccaccaccccggcgctgcgcctcggcggcggcgcggtccgggactacgcctggaccaactcgatgctgtcctggcagcgcacggcgttccacttccagccccccaacaattggatgaacgatccgaacggtccactgtactacaagggatggtaccatctgttctaccaatggaacccggactcggccgtgtgggggaacatcacctggggccatgccgtgtcgcgcgatctcatccactggctgcacctgccgctcgccatggtgcccgaccactggtacgacatcaacggcgtctggaccggctcggcgacgcagctgcccgacggccggatcgtcatgctctacaccggcgccacggaggagtcggtgcaggtgcagaacctggccgagccggccgacccgaacgacccgctgctgcgggaatggagcaaggcggaggcgaacccggtgctggtgccgccgccgggcatcgggctgacggacttccgcgacccgacgacggcgtggcgcaacccggccgactcggcgtggcggatcaccatcgggtccaaggaccgcgaccacgcggggctggcgctcgtgtacaagacggaggacttcctgcactacgacctgctgcccacgctgctgcacgtcgtcaagggcaccggcatgtgggagtgcgtggacttgtacccggtgtccacctcgccggccgtcgaggacgggctcgagacgtccaccccgccggggcccggcgtgaagcacgtactcaaggccagcctcgacgacgacagaaacgactactacgccatcggcacctacgacggcgagaccgatacctggacgccggacaacgccgacatcgacgtcgggatcgggctccggtacgactacggcaagttctacgcgtccaagacgttctacgaccccgtcgggcggcgtcgcgtgctatgggggtggatcggcgagaccgacagcgagcgggctgacatactcaagggctgggcctcccttcaggtgagcatgataatttttatattaaacgcaaacgaaaacaagggtgaaaagtcaattccgaggacagttatgctggacacgaagactggcagcaacctgctccagtggccggtggtggaggtggagaacctccgtatgcgcggcaagagcttcgacggcctcgacgtctctcccggctccgtcgtgccgttggacgtcggcaaagcaacacagctggacatcgaggccgtgttcgaggtggacacttcggcagccgacggtgtcgtcacggaggctggagcagcagcatacagctgcggcacgggcggcggtgcggttggccgtggcttgatgggcccgttcgggcttctcgtgctggccgatgatcagttgtcggagcggacggctgtcttcttctacctggtcaagggagtcgacggcaaccttacaaccttcttctgccaagacgagctcaggtcatcaaaagcaaacgatctagttaagagagtctatggcagcttggtacctgtgctagatggcgaaaacctgtcaataaggattttggttgatcactccatagttgagggcttcgctcaaggagggaggacatgcattacctcgcgtgtgtatcccaccaaagccatctacgagtcggccaaaatctttcttttcaacaatgccacaaatgttagagtcactgccaaatcgctaaagatttgggagctgaactctgcttacatccgtccatatgtagacta

SEQ ID NO: 4498 - DNA, 759 bp, Oryza sativa
atggcggccgccactcccaacggcatcccagcttccagacctctggcttcatcagttccaattgaggcagttctgttcgacattgatgggaccttgtgcgactcagatcctcttcatcatgtggccttccaagaaatgcttcttgagattgggtataacaacggtgtgccaatagacgaggagtttttcataaacaatattgctggaaggagtgatgttgaagctgctcagaatttgttccctgattggccccttgagaaggggctgaaattcctcgaggacaaggaagctaaatacagaagtttggcaaaggagcgtttggaacctgtaaagggccttgctaaagtggttcagtgggtcaaagatcatggatacaagcgtgcggctgtaaccaatgcccccaggattaattccgagctcatgatctcccttcttggcctcacagatttcttccaggccgtcatcgttggaggcgaatgtgagaagccgaaacccgccccattcccctacctgaaggctctcaaggagcttcaggtgtctgcggaccacaccttcatctttgaggattctgcttcaggcacacgtgcaggcgttgctgctggaattcctgttgttgctgtggcaacaaggaacccagagaagtccctactggatgcaggagccacgttgatcatcaaggattatgaagaccccaagctttggagcgcacttgaagagatagacagagaggaagccaagctaaagaaagctgatgcatga

SEQ ID NO: 4499 - DNA, 810 bp, Oryza sativa
atggcgcggtgcagcaacggcctcctcggcctcctcaacgccggcgtgctggtcctcgccgtggtggtgctgggcggcgggatctggctcagcaaccgcgccgccaccactgactgcgagcggttcatggagcgccccgtcgtcgcgctgggcgtgctcctccttgcgctctccctygccggcctcgccggcgcgctctgcggcgcctcctgcctcctgtggctctacctcctcgcgctcttcctcctcatcctcgccctcttcgtcttcaccgtcttcgccttcgtcgtcaccaaccgcggcgccggctgggtcgtctccgggagagggtacagggagtaccgcctcggggactactccacgtggctgcagaggagggtggagaactccgcgaactgggccaagatccggagctgcctccaggacggcaaggtctgcgagaagcttggggccaggcgcgagaccatggaccagttcgtcggcagcaatctctccccgattcagtctggatgctgcaagcccccaacaggatgcaacttcgcctacgtgagcgagaccgtctggaccaaaccttctggctttaactctaccgatgacccggactgcacgacatggtcgaatgatcagaccgccctgtgctacgactgccagtcatgcaaagctggtgtgctcgctaacctgaagaatgactggaagaagattgcgactgtcaacatcatcttcctgatcttcctcatcatcgtctactccgttgggtgctgcgctttcaggaacaacaggcgggacaactcgtacccggcttggaaatga

SEQ ID NO: 4500 - DNA, 1359 bp, Oryza sativa
atggagaagagccctcctccggcgccgcacttcctcttcgtggtgagcgggatacagggccacatcaacccggcgcgccgcctcgccgcgcgcctgatggcgtcggcgccggccgcgcgcgtcaccttctccaccgccgtctccgcgcaccgcctcatgttcccgtccctgccgtccccggccggcgaggacgtcgacgacaccggcgtcgcgtacgtcccgcactccgacggctacgacgacgggtacaagcccggggtgcacgcgagggacgactacatggcgcgcacccgcgccgcgggcaccgagtcgctctccgccatcgtcgcggctctcgcggcragggggcscccggtgacgtgcatcgtgtacacgttcctcgtgccggcggcggcgttcgccgtgtactaccactacttccatggccatggcgaagccctsgcctcctgcgcgaamgaccctgcccgcggcgccgtcgtgcgcctccccgggatgccgttsctcaggtccgacgagctcccctccgccgtgtccatcgtctcgccggagcacaarcactacctgctgctcgccatgctgcgcgacctgttcgaggatctcgacgagctcaagcccagggtgctggtcgtcgccgtcgggccggtggtgcccgacggcgaagcgtctctgtcgagctcgagcacggacatgttccggcgagacgacgcgagcgcgtgcgtggattggctggacacgaagccggcgcgctccgtggtgtacgtctcgttcgggaccctcctgtcgatgagcaagcggcaggaggaggagatgaggcgcggccttgaggccaccggccggccgtacctgtgggtggcgcgccagggcgccgtcgatggcggcgcgaccttggacagcgcacccacccccgccgccgatgccggcggcggcggcggcgaaggggacgcgcaagggatggtggtggagtggtgcgaccagatgaaggtgctctcgcacccggctgtgggctgcttcgtgacgcactgcgggtggaactcggcgctggagagcatyacccgcggcgtgccgatggtggccgtgccgcagtggacggaccagccgacggtggcgtggctggtcgaggcgcgcatgggcgccggcgtgcgcgctcggctggacggcgagggcgtggtcgagcgcggcgagctgcagcggtgcgtggagctcgccatggcgggcggcggagacggcggtgtccgggcacgggcggagcgatggagggagcgcgccgcggaggcggtcgcggccggcgggtcgtcggagaggaatctccgggcgttcgcgtccggggccgtgacgcaggcggtgtgctcgagcaggtga

SEQ ID NO: 4501 - DNA, 3039 bp, Oryza sativa
atggtggcgatctccgagctcggatgcttgttgttggtgttggtgttggtggtggtggtgcagaatgcggccgatttgaggagggggatggggttttcgggtggatttgaggaggagatgagctcgtcgtcggcggccagcatcgggccgccgcagccgccgccgccccccgcgccgcccgaggaagagaagaagtgcctcaactcggagctatggcacgcctgcgccggcccgctcgtctgcctccccaccgtcggcacgcgcgtcgtctacttcccgcaaggccacagcgagcaggtggcggcgtcgacgaacaaggaggtggagggtcacatcccgaactaccccaacctgccggcgcagctgatctgccagctccacgatgtcacaatgcatgcggatgtggagactgacgaggtgtacgcgcagatgacgctccagccactgaacccagtaaggcgcctggggtttttgcatgatgtttgcagtgctgaggttttgatgcaggagcagaacgatgcgtaccttcccgcggagatggggataatgagcaagcagccgacgaattacttctgcaagacattgacggcgagcgacaccagcacgcacggggggttctccgtgccccgccgtgctgctgagcgcgtcttccctcctttggatttcacacagcagcctccagcccaggagctaattgcacgggatattcatgacatcgagtggaagttcaggcacatctttcgaggccaacccaaacgacacctgctaaccactggctggagcgtttttgtcagtgctaagagacttgttgctggagattctgtgcttttcatatggaacgagaaaaaccagcttttacttggaataagacgtgccagtcggccacagactgtgatgccttcctctgttctttcaagcgatagcatgcacataggtctccttgcaggcagcagctcatgctgctgctacaaacagccgtttcactattttctacaacccccggctgtttttcacacccggatatcggttgggatgcggttcaggatgttgtttgagactgaggaatcaagcgttcgcaggacatcaccccattatttatgggaattttataattgggcctctataaaaatccataatatactaatgcgcccaatgcacactttaatgaaacacaggtatatggggactataactgaagttagtgatgcagacccagtccgttggcctagttcctattggagatctgtgaaggttggttgggatgaatcaactgcaggggaaagaccaccaagagtttctttatgggaaattgaaccattgacaacctttccaatgtatccatctctgttcccactgagagttaagcatccttggtattcaggagttgcttccctgcatgatgacagcaatgctttaatgtggctgagaggagttgctggtgagggaggttttcagtctctgaactttcagtcacctggtattggctcctggggacaacagaggctccatccatccttactgagcagcgatcacgatcagtaccaagcagtagttgctgctgctgctgcttcccaatctggtggttacttaaaacagcaattcttgcaccttcagcaacctatgcagtcccctcaagaacactgcaacctcaacccattattgcagcaacaaattctgcagcaagcaagccagcaacagataattaatcctgatgcccaaaatatccaaacgatgttgagcccaagtgctatacaacagcaactccagcaactacagcaaatgcagcaagttcagaatgatcagaagcagaagattcaaccagatcaaagctaccaagttcctacaagtgcagttctcccaagtccaacatcattaccgagtcatttgcgagaaaaatttggcttctctgatcctaatgcgaattcttcaagcttcatcacctctagcagtagtgataacatgttggattcgagcttccttcagggaagttcgaaagctgtggacttatctcgatttaatcagcctgtagctagtgagcagcagcagcagcagcaacaggcatggaagcagaagtttatgggttcacagtcagtgtcttttgggggctcggttttgcataactcacccacaagcaaagatggttctgttgaaaacaaaattggtcgtgatgtgcaaaaccagtccctttttagtccacaagttgactcttcatccctcctgtacaacatggttcctaatctgacttcgaatgtttcggatggcaacttatcaacgatcccttctggatcaacttatctgcagaatgcaatgtatggttgcttggacgactcttctggtttattgcaaaatacaggagagaacgatccagcaaccagaacatttgtgaaggtttacaagtcaggttcggttgggaggtcgttggacataacccggttctctaattatgctgaacttcgagaagaactgggtcagatgttcggcattaagggtcaattggacgaccctgatagatcaggctggcagcttgtattcgtcgacagggagaatgatgtgcttctccttggagacgacccttgggaattcattaacatctatatgaatgtgagcaatgctaaaaagtcttacattatgaaacggagggagtacaatactttggtttcctggtttccacaactaatagcttatcgaggaaagactgttcttccttcaataatatgtgttggtcagtcactatatgttgatgctcagttacccaagacccttctgtatggtacatcaagatactttcacctgaggatgtgcataagatgggaaagccaggaaatgatccacggtatctgtcctgaagttagagaacatggtgccatttctgggcttccaggaggattctgcagtgcatggtggcactcttgctctcgacaatgcacgtcgtcagaagtcccaaatttgtatcttgcatgtacgccgtacatgtttccagaactctctgttacctattcggtgcaggccaccggaaccacgaaacctgatattttgtag

SEQ ID NO: 4502 - DNA, 1263 bp, Oryza sativa
atggcgccaaccacgaaccagagcagcggcggagccgtcgtcggcgcgcagctgccgacgacgtcgccgtgccgcacgcccaagtcgccgccgccgtcgtacgggagcatcgtcaccgtgctgagcatcgacggcggcggcgtccgcggcatcatcccgggcaccatcctcgccagcctcgaggagaagctgcagaagctagacggcgccgacgcgaggatcgccgactacttcgacgtaatcgccgggacgagcaccggcgggctggtgaccgccatgctcaccgcgcccaacgaccagggccgcccgctcttcgccgccaaggacatcaacgacttctacctcaagcactgccccaagatcttccctcccagaagcattccaattgtgggattgttccagagcatggcggggccaaagtacgacggcaagtacctgcactcggtggtgcagtcgctgctcggcgataagcgagttaatgagacgatcaccaacgtcgtcatccccaccttcgacatcaagctcctccagcccatcaccttctcccgattcgacgcccagatcgatgtgtccaagaacgctttcctgtcggacgtgtgcatcagcacctcggcggcgccgacgtacctccccggccaccgcttccagaccaaggacaaggacggcaagccccgggaattcaacctcgtcgacggcggcgtcgccgcgaacaacccgacgctgttggcgatgacacacgtaagcaagcagatcctgctgggtaaacaggacgacttcttcccgatcaagccggcggactacggcaagttcatgatcctgtcgctgggcaccggcacggccaagatcgaggagaagtacgacgccgttcagtccggcaagtgggggatgatcaactgggtctaccacgacggctcgtcgccgctgatcgacagcttcagccaggccagcgccgacctcgtcgacatccacgcctccgtgctcttccaggcgctgcactgcgagaagagctacctccgcatccaggacgacgagctcaccggcgacacggcgtccgtcgacgtctccacgccggagaacctgaaccggctcgtcgacgttggcaaggcgctgctcaagaagcgggcgtgcaaggtgaacctcgagaccggcaagaacgagcccgacatgagcaggggcaccaacgaggaggagctggagaatttcgccaagatgctgtcggaggaacgcaaggccaggctccagaagaaggccttccttcagtaa

SEQ ID NO: 4503 - DNA, 969 bp, Oryza sativa
atggcaccgacttcgacgttcccggtcatcaacatggagttgctcgccggggaggagcgacctgcggcgatggagcagctggatgatgcttgcgagaactggggattcttcgagatcctgaaccacggcatctcgacggagctgatggacgaggtggagaagatgaccaaggaccactacaagcgtgtgcgcgagcagaggttcctcgagttcgcgagcaagacgctcaaggaaggctgcgacgacgtgaataaggcggagaagctggactgggagagcaccttcttcgtccgccacctcccggagtccaacatcgccgacatacccgacctcgacgacgactacaggcgcctcatgaagcgcttcgcggcggagctggagacgctggcggagcggctactggacctgctctgcgagaacctcggcctcgagaagggctacctcaccaaggccttccgtggccccgcgggcgcacccaccttcggcaccaaggtcagcagctacccgccgtgcccgcgccccgacctcgtcgagggcctccgcgcccacaccgacgccggcggcatcatcctgctcttccaggacgaccgcgtcggtggcctccagctgctcaaggacggcgagtgggtggacgtgccgcccatgcgcmactccatcgtcgtcaacctyggcgaccagctggaggtgatcaccaacggcaggtacaagagcgtgatccaccgggtggtggcgcagaccgacggcaacaggatgtccatcgcgtcgttctacaaccctggcagcgacgccgtgatctcccctgcgccggcgctggtgaaggaggaggaggccgtcgtggcgtaccccaagttcgtgttcgaggactacatgaagctgtacgtgcgccacaagttcgaggccaaggagcccaggttcgaggcgttcaagtccatggaaaccgagacctccaaccgcatcgccatcgcttag

SEQ ID NO: 4504 - DNA, 3498 bp, Oryza sativa
atggggtcagaggcggcggcggcggcgagggcggtggtggtggcggtgaacggggagaggtacgaggcggtgggggtcgacccgtcgacgacgctgctcgagttcctccgcacgcggacccccgtcaggggccccaagctcggctgcggcgaaggtggatgtggcgcatgcgtggtcgtcgtgtccaagtacgacgccgtcgccgacgaggtgaccgagttctcggcgagctcctgcctgacgctgctcggcagcctgcaccactgcgcggtcaccaccagcgagggcatcggcaactccagggatggcttccacgctgtgcagcggcggctctccggcttccacgcctcacagtgcggcttctgcacgccgggcatgtgcatgtccatctactccgcgctcgccaaggctgacaaggcatccggtcgccccgcgccgccgacggggttctccaagatcaccgccgccgaggcagagaaggccgtctccggcaacctgtgccgctgcactggctacaggcccatcgtcgacgcctgcaagagcttcgccgcggacgtcgacctcgaggatcttggcctcaacgccttctggaagaaaggcgtcgacgacgagcacgctgacatcaacaagctgcctgcatactccggtggcgccgccgtctgtacgttcccggagttcctcaagtcggagataaggtcgtccatgggtcaagcgaatggtgacacttcggcggtggtggtcaccggcgacggctggttccaccccaagagcgtcgaggagttccacaggttgtttgactctaacctgttcgatgaaaggtctgtgaagattgtggcatcgaacaccggctccggagtgtacaaggatcaagacctccatgacaagtacatcaacatctcgcagattccggaactctcagccatcaatagaagcagcaagggcgtagagatcggagctgtcgtgtctatctcccaagccatcgacatactgtcggatggaggcgcggtgtttagaaagatcgctgatcacctgagcaaagtggcctcgccgttcgtccggaacacggcgaccattggaggcaacatcatcatggcgcagaggttgtctttctcgtcggacatcgcaactgttcttctcgctgcaggatcaactgtcaccatccaggtggccgccaagaggatgtgcatcactctggaggagttcttgaagcagcctccatgtgattccaggacattgctggtcagcatctctatcccggattggggttcagatgatggcatcacctttcagacgtttcgtgcggctcctcgtccacttggcaatgctgtgtcatatgttaattctgcattcttggcaagaagttcagtggatggatcatcagggagccatctcattgaggatgtttgcttggcattcggcccctttggggccaagcacgccatcagagctagggaggttgagaagttcttgaagggaaaattggttagtgcaccagtgatacttgaagcagttcgtcttctgaaaggtgttgtttcaccagctgaaggcacaacacatcctgaatacagagtcagcttggccgtcagttatctgttcaaattcctgtcttcccttactaatggcttggatgagcctgaaaatgctaatgttcccaatggttcatttactaatggaaccgcaaatggtattgttgattcctcgccagagaagcactcaaatgttgacagctcttatttgccaataaaatcaaggcaagagatggttttctctgatgaatacagacctattggaaaaccgatcgagaaaacgggagctgagctccaagcttctggggaggcagtgtatgtcgatgacatctctgctccaaaggattgcctctatggggcatttatctacagcacacaccctcacgctcacataaaaggtgtaaacttcagatcatctttggcttcacagaaggtcatcacagttatcactttaaaggacattcctaccaatggaaaaaatattggatcatgctccccaatgctaggagatgaagcgcttttcgttgatcctgtttctgaatttgctggacagaatattggtgttgtgattgctgaaactcaaaagtatgcctatatggcggcgaagcaatctgtgatcgaatatagtactgaaaatcttcagccaccaattctgacagtagaagacgctgtccagcataacagctacttccaagttcccccatttttagctcctacgccaattggtgagttcaaccaagccatgtctgaagctgatcacaagatcatagatggggaggtgaaacttgaatcccaatactatttctacatggagacacagacggccttagctatccctgatgaagataactgtataaccctctatgtgtcggcgcaactacctgagattactcaaaatactgttgcgaggtgccttggcattccatatcacaaygtccgtatcatcacgagaagagttggaggaggttttggtggaaaggcaatgaaagcaatacatstctgcaagacgaacgtctcgtcgaagtcggcgatgcgggctcccggcgacgcgcagggctcgttcatcgccgaggccatcgtcgaacacatcgcgtcyactctctcagtggacacgaacgccatcaggaggaagaacctccaygacttcgagagcctcaaggtyctcgtcaccatcttcgacaagctggcstcgtcgccggagtaccagcagagggccgccrtggtcgagcatttcaacgccggcarcaggtggaagaagcggggcatttcttgcgtgccgatcacctacgacgtgaggctccggccawctccggggaaggtgtccatcatgaacgacggctccatcgccgtygaggtcggcggcgtcgagatcgggcaggggctgtggacgaaagtgaagcagatgacagcgttcgcgctgggccagctctgcgatgatggcggcgagggcctcmtcgacaaggtccgtgtcatccaggccgacaccctgagcatgatccagggaggcttcaccggygggagcacgacctccgagactagctgcgaggctgttcggaagtcgtgcgccgccctcgtggagaggttgaagcccatcaargagaaggctggcacgcyaccatggaaatccytkattgcccaggcgtatctgtggggatcggaagccgggaagtggggcgcgaggacgcagtcgcgggagcaccgcctgcgcaggaacttgcacgcggcgcaacgccttgtcgcggagccgccgctgtcgctgctggcttccacgtcctcctcaccgggggacatgatctaccgggagatctcacggaggggagatggagatttggttcaggatctcgtggatcttggcaagattttgcatggggagattgggatttggcaaatccatggccggctctatgtatgtgcgtacgagaggagaggagacsgtggattcgtctctacatggaagtgtggcaacggctag

SEQ ID NO: 4505 - DNA, 4068 bp, Oryza sativa
atggggtcagaggcggcggcggcgaggccggtggtggtgacggtgaacggggagaggtacgaggcggtgggggtcgacccgtcgacgacgctgctcgagttcctccgcacgcggacccccgtccggggccccaagctcggctgcggcgaaggtggatgcggcgcatgcgtggtcgtcgtttccaagtacgacgccgtcgccgacgaggtgaccgagttctcggcgagctcctgcctgacgctgctcggcagcctgcaccactgcgcggtcaccaccagcgagggcatcggcaactccagggatggcttccacgccgtgcagcggcggctctccggcttccacgcctcgcagtgcggcttctgcaccccgggcatgtgcatgtccatctactccgcgctcgccaaggccgacaggtgctcgtcccgtccctcgccgccgccggggttctccaagctcaccgccgctgaggccgagaaggccgtctccggcaacctgtgccgctgcaccggctacaggcccatcgtcgacgcgtgcaagagcttcgccgccgacgtcgacctcgaggaccttggcctcaacgccttctggaagaaaggcgccgacgacgagcgcgctgacgtcggcaagctgcctgcatactctggtggcgccgccgtctgtacgttcccggagttcctcaagtcggagataaggtcatccatgggtcaagcgaatggtggcgctccggcggtggcggtcaccggagacggctggttccaccccaagagcgtcgaggagttccacaggttgtttgactctaacctgttcgacgaaaggtctgtgaagattgtggcatcgaacaccggctccggagtgtacaaggatcaagacctccatgacaagtacatcaacatctcgcagattctggaactctcagccatcaatagaagcagcaagggcgtcgagatcggagctgtcgtgtctatctccaaagccattgagatattgtcggatggaggcgcagtgttcagaaagattgccgatcacctgagcaaagtggcctcgtcgttcgtccagaacacggcgaccattggaggcaacatcatcatggcgcagaggctgtctttcccgtcggacatcgcaacggttcttctcgctgcaggatcaactgtcaccatccaggtggccgccaagaggatgtgcatcactctggaggagttcttgaagcagcctccatgtgattccaggacrttgytggtcagcatctctatcccggattggggttcagatgatggcatcacctttgagtcgtttcgtgcggctcctcgtccacttggcaatgctgtgtcatatgttaattctgcattcttggcaagaagttcagtggatggatcatcagggagccatctcattgaggatgtttgcttggcatttggcgccttcggggccgaacacgccatcagagctagggaggttgaggagttcttgaagggaaaattggttagtgcaccagtgatacttgaagcagttcggcttcttaaaggtgttgtttcaccagctgaaggcacaacacatcctgaatacagagtcagcttggccgtcagttatctgttcagattcctgacttcccttgctaatggcttggatgagcctgaaaatgctaatgttcccaatggttcatgtactaatggaaccgcaaacggtagcgctaattcctctccggagaagcactcaaatgttgacagctctgatttgccaataaaatcaaggcaagagatggttttctctgatgaatacaaacctgttggaaagccgatcgagaaaaccggagcagagctccaagcttctggagaggcagtgtatgttgatgacatccctgctccgaaggattgcctctatggagcatttatctatagcacacaccctcacgctcacataaaagatataaacttcagatcatctttggcttcacagaaggtcatcacagttatcactgcaaaggacattcctaccggtggagaaaatattggatcatgcttcccaatgcttggagatgaagcgcttttcgttcatcctgtttctgaatttgccggccagaatattggtgttgtgattgctgaaacacaaaagtatgcctatatggcggcgaagcaagctgtgatcgaatatagtaccgaaaatcttcagccaccaattctgacaatagaagatgctgtccagcataacagctacttcccagttcccccatttttagctcctacgccaattggtgacttcaaccaagctatgtctgaagctgatcacaagatcatagatggggaggtgaaacttgaatcccagtactatttctacatggagacacagacggccttagctatccctgatgaagataactgtataaccctctatgtgtcggcgcaactacctgagattactcaaaatactgttgcgaggtgccttggcattccatatcacaatgtccgtatcatcacgagaagagttggaggaggttttggtggaaaggcaatgaaagcaatacatgttgccgctgcatgtgctgtcgccgcattcaagctgcggcgtccggttcgaatgtacctcgatcgcaagacagacatgatcatggcgggagggcggcatccgatgaaggtaaagtactccgtcggtttcaagtccgacggcaagatcacgggtctgcactttgatcttggaatgaacggcggaatatcgccggattgcagcccggtgttgccagtcgccattgtcggggctctgaagaagtacaactggggcgctctctccttcgacatcaaggtctgcaagacgaacgtctcgtcgaagtcggcgatgcgggctcccggcgacgcgcagggctcgttcatcgccgaggccatcgtcgaacacatcgcgtccactctctcagtggacacgaacgccatcaggaggaagaacctccacgacttcgagagcctcaaggtgttttatgggaatagcgccggtgatccttcgacgtacagtctcgtcaccatcttcgacaagctggcctcgtcgccggagtaccagcagagggccgccatggtcgagcacttcaacgccggcaacaggtggaagaagcggggcatttcttgcgtgccgatcacctacgacgtgaggctccggccaactccggggaaggtgtccatcatgaacgacggctccatcgccgttgaggtcggcggcgtcgagatcgggcaggggctgtggacgaaagtgaagcagatgacagcgttcgcgctgggccagctctgcgatgatggcggcgagggcctcatcgacaaggtccgtgtcatccaggccgacaccctgagcatgatccagggaggcttcaccggtgggagcacgacctccgagactagctgcgaggctgttcggaagtcgtgcgccgccctcgtggagaggttgaagcccatcaaagagaaggctggcacgccaccatggaaatcccttattgcccaggcaagcatggcgagtgtgaagctgacagagcacgcgtactggacgcctgaccccacgttcactagctacttgaactatggagctgcaattagtgaggtggaagtcgatgtgctgacgggagaaaccaccatcctgaggagcgacctcgtgtacgactgtgggcagagcctgaatcctgctgtggacttgggccaggtggaaggcgcattcgtgcaagggatcggcttcttcacgaacgaggagtacacgaccaactccgatgggctggtcatcaacgacggcacgtggacgtacaagatccccaccgtggacaccatccccaagcagttcaacgtcgagctcatcaacagcgcccgcgatcacaagcgcgtcctctcctccaaagcgtccggtgagccgccgctgctgctggcgtcgtcggtgcactgcgcgatgagggaggcgatcagggcggccaggaaggagttcgccggcgccggaggctcgccgctgacgttccagatggacgtgccggcgacgatgccgatcgtcaaggagctctgcggccttgacgtcgtggagagatatctcgagagctttgctgccaaagcctag

SEQ ID NO: 4506 - DNA, 1134 bp, Oryza sativa
atggggaattgcttcggctccgatgacggcgaggtggaggccgtcaaggtgatggcccgtcatgcgctgccacaagcggcaatggcgagaccggtcatggtcgcgatcgcgcagcccaatgcacgcgtcgcgatgagcccagggcggccaccaactggtaagttgccgagccaggccacagccacaagcaccggcggcgggcgatcggtggctggtggtggaggccggacgaacgccggcggcgacgccagcgcggaggggaggatcctggaggcgcccaacctccggatcttcacgttcgccgagctcagggccgccacgaggaacttcaaggcggacaccgtcctcggcgagggcgggttcgggcgggtgcacaaggggtgggtggacgagaggaccatgagccccgcgcggagcggctccggcatggccgtcgccgtcaagaagctcgatccggagagcttacagggcgtgcaagaatggcagtccgaggtgaattttctggggagactttcacatcccaacctggtgaggctactgggctactgctgggaggacaaggagctactgcttgtgtacgagtacatggcccaaggcagcttggagaaccacctcttcagaagtgagccacgcaagggcggaagcgcgtcgcctcagcagccgctgtcgtggagcctccggctgcgcatcgccatcggcgcggcccgcgggctggcgttcctccactcgtcggagaagcacgtcatctaccgagacttcaaggcctccaacatcctcctcgacacgcaattccacgcgaagctctccgacttcgggctcgccaaggacgggccggccggcggcagcagccacgtgacgacccgcgtgatgggcacctacggctacgcggcgccggagtacgtggcgacgggccacctgtacgtgaagagcgacgtgtacggcttcggcgtcgtgctgctggagctcctgacggggctccgcgcgctcgacgccgggcggcccagcgggcagcaccacctggtggactgggccaagccattcctgtccgamcgccggaaactggctcggctcatggacccgcgcctcgaggggcagtactcgtccaggggcgcgcagccttgcggcgcagcttaa

SEQ ID NO: 4507 - DNA, 1389 bp, Oryza sativa
atggggggtaggattgcgaggagagggttgtcgaggctcgcagcggcggtggagacggccgccgtcgcgccgccgagaatggcggacttcaaccacgtcccgctcccctacgacggcccgtccgccgccgagatcgcacggaagcgcgccgagttcctcagcccgtccctcttccacttttattccaaaccactgaacatcgtggagggtaagatgcagtacctgttcgacgagcgcgggcggcgctacctggacgcgttcgccggcatcgccaccgtgtgctgcggccactgccacccggacgtcgtcggcgcgatcgccgcgcaggccggccgcctgcagcactccaccgtgctctacctcaaccacgccatcgccgacttcgccgaggcgctcgcctccaagatgcccggcgacctcaaggttgtgttcttcaccaactccggcacggaggcgaacgagctcgccatcatgatggcgcggctgtacaccggctcccacgacatcatatcgctccggaactcctaccacggcaacgccgctggcaccatgggcgccaccgcgcagaagaactggaagttcagcgtcgtccagagcggcgtgcaccacgccgtgaacccggacccgtacaggggcgcgttcggctccgacgccgaaaagtacgcgcgcgacgtgcaggagatcatcgagttcggcaccaccgggcaggtcgccggcttcatatcggaggcgatacagggcgtcggtgggatcgtggagctgtcgccggggtacctgccgctggcgtacgaggcggtccggagcgccggcgggctgtgcatcgccgacgaggtccaggccggcttcgcgcgcgtcggcagccacttctgggggttcgagacccacggcgtcgtccccgacatagtcaccatggccaagggcatcggcaacggcatcccgctgggcgcggtggtgacgacgccggagatcgcgcaggtgctgacaaggcggtgctacttcaacacgttcggtggcaacccgctgtgcaccgccggcgggctcgccgtgctccgggtgctcgagaaggagggcctccaggcgaacgcccacgccgtcggctcctacctcaaggaccgcctccgcgctctccaggacaagcacgaaattatcggcgacgtgagggggacgggtttcatgctcggcgtcgagctggtgacggacaggcagctcaagacgccggcgaaagacgagatttgccgcgccatggagcacatgaaagagatgggcgtcttggtcggcaaaggcggcttctacgggaacgtcttcaggatcactccccctctgtgcttcaccaaggaggatgccgatttcttcgtcgccgtgatggactctgcactgttcaagctctga

SEQ ID NO: 4508 - DNA, 1119 bp, Oryza sativa
atggcattattcaagcccctccacctccctcccctcttcgccgccgccgccgccgccgccgggccacgtcccctctccctctcggcgcgccccctgtaccggcagcaggacccgttattcctggcgtcgcgcgtcgcgtcaccggcgccgccgccgccgtccgccaccgccgacggcgcccggccggtggaggctgcaccggcgggcgcggcgccggaggaggcggcgaggcgggccaagatcggggtctacttcgcgacgtggtgggcgctgaacgtgatcttcaacatctacaacaagaaggtgctcaacgcgttcccttacccgtggctcacgtccacgctctccctcgccgccggctccgccatcatgctcgcctcctgggccaccaggatcgccgaggcgcccgccaccgacctcgatttctggaaggccctgtcaccggtggcgatcgcgcacaccatcgggcacgtggcggcgacggtgagcatggcgaaggtggcggtgtcgttcacccacatcatcaagagcggcgagccggcgttcagcgtgctcgtctccaggttcttcctcggcgagcacttcccggcgccggtctacttctccctcctcccaatcatcggcggatgcgccctcgccgccatcaccgagctcaatttcaacatgattggattcatgggggcgatgatctcgaacctggcattcgtgttccggaacatattctccaagaaggggatgaagggcaagtcggtgagcgggatgaactactacgcctgcctctccatgctctcgctggtcatcctcctccctttcgccttcgccatggaggggcccaaggtgtgggctgccggctggcaaaaagccgtcgccgagatcggtccaaacttcgtctggtgggtggcggcgcagagtgtgttctaccacttgtacaaccaagtgtcctacatgtcattggacgagatctcaccactgacattcagcatcggcaacaccatgaagcggatctccgtcattgtcgcctccatcatcatcttccacacgccggtccagcccatcaacgccctcggagccgccattgcgattctcggaactttcatctactctcaggcgaagcagtaa

SEQ ID NO: 4509 - DNA, 942 bp, Oryza sativa
atggggacgccggagttccccaacctgggcaagcactgcagcgtcggcgactgcaaccagatcgacttcctgcccttcacctgcgaccgctgcgaccacaattgttgcttcaataagaatgaaattgatctcagacaaaatctgaaactgggcttaagaatgcaatgggtcttttgccttcagcaccgaagttatacatcgcatcagtgtccaaatgcaaatcagaaggatgtgactgtcctcatctgcccactctgtgctaaaggagttcgcctgaacccgaacgaagatccaaacatcacctgggacacccatgtcaatagtgactgtgatccatcaaattaccagaaagtaacaaagaaaaagaaatgcccagtgcctgggtgcagagagacactgacattttcaaacacaattagatgcaaagattgcaccaaagaacactgcctgaagcatagatttggacctgatcacaagtgtccagggccaagaaaaccggaatctacattccccttcggaaatatgcttaggagaagtcagaaagcagaatcatgttcaaattcaaacagcagtagcactagttcatcctggtggagctctagtcttcttaccgcagcaacgagtttcaaatcatctgctgaagctgggatgcagaaattgagcacagcaactacccaagccatccagaaggctaaggatgggatctcgacaagcagcagtaacagcggtgatctcgtggagcaatgtgttcagtgcccagcaagattttccaccgtgggggccttaatcgagcattgcgaaaagtcccatcagagcaactcgcaatcaagtcgtagcagagtgacggtcgatgtctgcccgaaatgcagcaaggcatttcgagatccagtgttgcttgtggagcatgttgagagggaccatggaggaacgtcaagagcgtag

SEQ ID NO: 4510 - DNA, 1482 bp, Oryza sativa
atggcgaacaaggctgtcaccattggcgatctgatccaccgcgtcgccacctcctgcctctccaaccgcctccccggcagctacgcggtcagcgactccggcgacaccgacttcgacgacgacgacgacgacgaccccttcgctgacgccatctcgggggccggtggcgagcggcggcgcactccctcttcttccgaggaggcggaggcggaggcggaggctgatgatgagggggaggatggtggtgagggtggggaggaggaggatgaggagaatctgaagatctgggaggagaagaggaaggtgaaggcggcggcggcggtggcggcgagtggggctgagcgggcgagggaggcggagacgctcatggcggaggtgttcgacgcggtctccggcgtgcgccgcgcgtactctgacctccagggggcacactgcccctgggaccccgacaagatgcggagcgccgacgccgccgtcgtcgccaagctccgccacctcgcgcggctccgcgaccgcttccgccgctccgtcgccacgggggggcacatccccggccccatccccaccgcgccgccgctccgcgaggccgtcgcgccgtacgaggccgcgctcgacgacctccgccgccagctccaagccaagcaggccgaggtcgatggcctcaaggagaagctcgccgtcgcgagcaaccgccgcaactcacgccaccacccctccaagcacaatgcctccggcggcggcggcggcgccccgaccgcggagctgttcgccgcctgcgccgagcaggcccgcgccgcgatccgggcgttcgcggggcacctcctccagctgatgcgcgcggcggggcttgacctcgcggcggcgacccggtccctcaccaagatcccggtgtcctcgccgcagctggccaagcacgcgctcgaggcgcacgtcacccgcgtcctcctcgtcggcttcgagcacgaatccttctacctcgacggctccctctcctcgctgctcgaccccgccgcgttccggcgggagcggtacacgcagttccgcgacatgcggggcatggagcccgccgagctcctgggcctcctcccgacctgccccttcggccgctacgccgcgagcaagttcgcggcgctcctcccgccgcgcgtggagcaggccgtcctcggcgacggcgagcaccggagggcggtggagggcggcgcgcacccgcggacgccattctacggggagttcctgcgcgccgcgaaggcggtgtggatgctgcacctgctggcgttcgcgctcgagacgccgcccagccacttcgaggccggccgcggcgccgagttccacccggattacatggagagcgtcgccggcgggcgcggcggcggcgccgccggcatggtcgtcgggttcgccgtggcgcccggcttccggctgggcaatggcgccgtggtgcgagcccgggtctacctcgtgccgcgcggtggccgaccgtga

SEQ ID NO: 4511 - DNA, 1896 bp, Oryza sativa
  misc_feature (1)...(1896): n = A,T,C or G
atggtgggcatcgacctcaacaccgtggaggaggaggaagacgaggaggagggcggcgccaccggcaccgtcacggcgcctgcggaggcgagggccgggggcgcggtgtgcctggagctgtggcacgcctgcgctggccccgtggcgccgctgccgcggaaagggcagcgccgtcgtgtacctgccgcagggccacstcgrgcacctcggggccscgmscggntycggccccggcgccccggtgccgccgcacgtgttctgccgcgtcgtcgacgtcagcctccacgtgagtgcgctcgccgcttgctgctctcgcgcgagcgcaatgtgttcgaggcggacgccgcgacggacgaggtgtacgcgcaggtctcgttggtcgccgacaacgaggaagtggagaggcggatgcgggagggagaggacggcgcggcctgcgacggcgagggcgaggacgccgtgaagcggccggcccggattccccacatgttctgcaagacgctcacggcctccgacaccagcacgcacggcggcttctccgtgcctcgccgcgccgccgaggactgcttcccgccgctggactacagcctgcagaggccattccaggagctcgtggcaaaggatctgcacggcacggaatggaggttcagacatatctatcgaggccaaccacggaggcaccttttaaccactggatggagcgggtttatcaacaagaagaagctagtatctggggatgcagtgctattcctcagaggtgaagatggagagcttcgattgggagtgcgccgagctgctcagctaaaaaatgcatctccttttcctgcacttcataaccagatctcaaatactagtagtcttagtgaagttgcacatgctgtggccgtgaaaagtatttttcacatctactacaatcccaggttaagtcagtctgagttcattataccatattggaagtttatgagaagcttcagtcaacccttttctgttggaatgcgattcaaattgagatatgagagtgaggatgcttctgaaagaaggcgtactggaataataattggaagcagagaggcagatccaatgtggcatggttcgaagtggaaatgtttagtggtgaaatgggatgatgatgtggagtgccgtcggcctaatggggtatctccttgggagattgagcttagtggatcagtttcaggatctcatctgtccactccccattcaaaacggctgaaatcatgcttcccccaagttaatccagatattgtgcttccaaatggaagtgtttcttcagattttgcggagtctgccagattccacaaggtcttgcaaggtcaagaattgttgggtttaaaaactcgtgatggtactgttaatacagcttctcaggcgactgaggcaagaaattttcagtacactgatgaacgaagttgctctatcaacatgagtaacaatatcttaggggttccgagacttggggtgaaaactccaagtggaaaccctgggttttcctaccattgctcaggctttggggaatctcaaagattccaagaggtcttgcaaggcaaagtgctagatgagtgtacgagaaatgagaagctgcactctccagtcagtggtgctgagcatgaatcaaataacaagtgtcttaatacaaatggctgcaaaatctttggtatatcattgactgaaaaggcccaagcaggcgatgaagtggattgtggcaatgccagttatcattctcggctccagtctttaaaaccacagatgccaaaatcattgggcagcagttgtgccacgcatttccacaggctgtgctaccgcatccaggatgatgacaggggaaatgcagatgatacacgaaggatgcttgtcaagtttgttgtaatgcacttctaa

SEQ ID NO: 4512 - DNA, 885 bp, Oryza sativa
atgaggcgcagcttggtgattgtgatggtggcctgcagctgcgccacagccatagccagaggaggaggaggaggaggtctgaagctcaacttctactcggagtcggagaggtgcccgagggcggaggaggtggtgagggaggaggtgcggaggctgtacgaggagcacggcaacacggcggtgtcgtggttgagggcactcttccacgactgcatggtctactcctgcgacgcctccctgctgctccacaccaccaccaccacaggcgtctccgagcagtcctcccaccgcagcttcggcatgcgcaacttcaagtacatcaccgccatcaaggccgccgtcgagcgtgagtgccctgccaccgtctcctgcgccgacatcctcgccctggccgcccgcgacggcgtggccatgctgggtgggccctcggtggccatgcggacggggcggcgcgacagcagggagagctactacggcgtggwtsagyagtaymyccmaaccacaacgacagcgttttcaccgtgctgtcgagtggacggcagcatggaggcggcgtacggggagtacctgcgggggaggtgcccgacggctgcggcgacggaggacacgagagaggtggtgtacgcgcgcaacgaccgcgtcamgcccatgctcatcgacamcatgtactaccgcaacctgctcgccgggcgggggctcctcctggtggaccagcagctggcctccgacgcccgcacggcgccctacgtccgccggatggccgccgacaacgactacttccaccagcgcttcgccgcagcgcttctcaccatgtccgagaacgcgccgctcaccggcgcacagggggaggtcagaaaagactgcaggttcgtcaactctagctaa

SEQ ID NO: 4513 - DNA, 1875 bp, Oryza sativa
atggaacacaagggtttgtgcatcctcgccgtcgtcatcgccttccagctcgccggcggggaggccgtcaccgatgccactgcccgggcacgtcgcttcgcctgtaacgtgtcggcgccgtgcgacacgttcgtcgtgtaccggacgcagtcgccggggttcctcgacctcggcaacatctcggacctgttcggcgtgagccgggcgctgatcgccagcgccaacaagctgaccaccgaggacggggtgctcctgccggggcagccgctgctcgtgccggtcaagtgcggctgcacgggcgcgcgctccttcgccaacgtcacgtaccccatccggcctcgcgacaccttcttcgggctcgccgtcaccgcgttcgagaacctcaccgacttcgtcctcgtcgaggagctcaacccggcggcggaggcgaccaggctggagccgtggcaggaggtcgtcgtgccgctcttctgccggtgcccgacgcgggaggagctcagcgccgggtcacggctcctcgtcacctacgtgtggcagcccggggacgacgtgtccgtggtgagcgcgctgatgaacgcctccgctgccaacatcgccgcgtcgaacggcgtcgcgggcaactccaccttcgcgacggggcagcccgtgctgatcccggtgtcgcagccgccgcgttttcctccgctgacctacggtgccatcgccgccgatcccggagcgggcaagcaccgccacggcatcatcgtggcgacgagcatcgcggggtctttcgtcgcgtgcgccgtgctgtgcacggcgatcttggcgtaccggaggtaccgcaagaaggcgccggtgccaaagcacgtcagcccgaagctttcttggaccaagagcctgaacagattcgacagcaatagctccattgctcgcatgatcaatggaggggacaagctgctcaccagcgtgtcgcagttcatcgacaaaccgatcatctttagagaggaggaaatcatggaagcgacgatgaacttggacgaacagtgcaagctcggcagctcgtattaccgcgcgaaccttgaaagggaggtgttcgcggtgaagccggcgaaaggcaacgttgccggggagctgaggatgatgcagatggtgaaccacgccaacctgaccaagctggccggcatatccatcggcgcggacggcgactacgccttcctcgtgtacgagttcgccgagaagggctcgcttgacaagtggctgtaccagaagccgccgtgctcgcagccgtcgtcgagctccgtggcaactctgtcgtgggaccagaggctgggcatcgcgctggacgtcgcgaacggcttgctctacctgcacgagcacacgcagccgagcatggtgcacggcgacgtccgtgcccggaacatcctcctcaccgcgggcttcagggcgaagctgtccaacttctccctggccaagccggccgccatggtcgacgcggcggcgacgagcagcgacgtgttcgcgttcgggctgctcctcctcgagctcctctccgggaggagggcggtggaggcgcgcgtcggggtggagatcggcatgctgcggacggagatccgcaccgtgctggacgccggcggggacaagagggcggcgaagctgaggaagtggatggacccgaccctcggcggtgagtacggcgtggacgcggcgctcagcttggccggcatggcgagggcgtgcaccgaggaggacgcggcgcggcggcccaagatggccgagatcgcgttcagcctctcggtgctcggacagccgctgtccgtctccgacgcgttcgagaggctatggcagcccagctcggaggacagcatcgggattgggaacgaggtggcagctagatag

SEQ ID NO: 4514 - DNA, 798 bp, Oryza sativa
atggaattcggacgaactccagcccttcaaatcatcgttggggtcctatggtcgcagctgcagttcggcgctgaggcagtcggcacgacggtcttcacgctgcgcaacaactgcacctacaccgtctggccggccaccttgtccggcaacaccgcggtggccgtcgggggcggcgggttcgagctgtcgcccggcgccaacgtctcgttcccggccccggctggttggtccggccgcttgtgggcgcgcacggactgtgcaccctccggcaccgcgtccctcgcctgcgtcacgggggactgcggcggcgccgtgagctgctccctcggcggcgcgccgcctgtcaccctcgccgagttcacgctgggcggcaccgacgggaaggacttctacgacgtgagcctggtggacgggtacaacgtcggcatcggcgtggcggcgacgggcgccagggtgaaccgctcgacgtgcgggtacgccgggtgcgtcggcgacgtgaacgcgctgtgccccgcggagctgcaggtggcggggaaggagaacgaccagcagtccggggcggcggcgacgacgacggtggcgtgccggagcgcgtgcgaggcgttcgggacggcggagtactgctgcacgggggcgcacggcgggccggacagctgcgggccgacgaggtactcgcggctgttcaaggcggcgtgcccggcggcgtacagctacgcgtacgacgaccccaccagcacgttcacgtgcggcaccggcgcgcagtacgtcatcaccttctgccccgcgcagcagcagtga

SEQ ID NO: 4515 - DNA, 2832 bp, Oryza sativa
atggcgaggtggggcgccgctcggatggcggcgtgcgggccgtggggccgcaaccggagggtcggcgccggcgacgcgttcgaggccagcgaggtgaggcgggacgggcgcagcaggatgatgcccgcgtgcgggccgtggggggcgggccatggcggcggggacccggcgctcgagagggagctgtcgcgggacggcagccactacagcatctccagcgccatcctcccgtcgctcggcgcgcggagcaaccgccgcatcaagctccgccgcttcatcatctccccctacgaccgccgatacagaatctgggagactttcctcatagttcttgtagtctactctgcgtgggtctcaccatttgaatttggcttcattccgaagcctacgggggctctagctacagccgacaatgtggtgaatgcattcttcgcggttgacatcattctgaccttctttgtggcttatttggataaaatgagctatatgcttgaagatgatccaaagaagatcgcatggcgttatagtaccacatggcttgttcttgacgtggcctccaccatcccatcagaatttgctcgcaggatactaccttcaaagcttaggtcatatggatttttcaacatgcttcgtctgtggcgtctccgcagagtcagctctctgttttctaggttggagaaggatagacacttcaattacttctgggttcgatgtgcaaagctcatttgtgtcacactttttgctgtgcactgtgcggcatgcttctactatcttcttgctgataggtaccccgtcccaacttctacgtggattggcaattacatggcagatttccatgaacggagcttatggattcgctacgtaacatcagtctattggtcaatcaccactcttaccaccgtgggctatggggatctacatgcagaaaatacaagggagatgatcttcaacattttctacatgctctttaaccttggtttgaccgcttatttgatcggtaacatgaccaatttggttgtccatggcactagtcgtactcgaaactatagggatacaatccaagcagcaacaagctttggagtaagaaatcagctaccacctcggctgcaagatcagatgatttcacatattagcttaaaatacaggacagattcagaaggtcttcaacaacaagagatccttgattcactgcctaaagctattaaatctagcatttctcaatatctgttcttccatctggttcaaaatgtttacctgtttcaaggagtctcaaatgatctgatttttcaactgttgcgtactgttacagaatatgcttatctggttcttttacttgatttcgtttttgaggtttcggagatgaaagctgaatattttccacctagggaggatgtgattttgcagaatgaagcacccactgacttctacatcttagtttctggtagtgtggtgatacaagtggctacgtcaggagaggttgttggagaaattggggttctttgctacagacctcagctattcacagttcgaacaagatccttgtgccagttgttgcgtttgaatcgtacagcttttctcagcattgttcaatccaatgttggggatggaactatcataatgaacaaccttattcagttccttaaagagcagaaggagaacagtgtaatggctggtgtcgtaaaggagatagagagtatgctagctcggggaaatctggatttgccaattacactctgttttgcagtaactagaggagatgattttttgttgcatcaacttcttaagcgtggtatggatccaaatgagtcagataatgacgggcataccgcactgcatatagctgcttccaaaggaaacgagcaatgcgtcaggcttctattagaatatggagctgatccaaatgccagagactcagaaggaaaagttccactgtgggaagcgctgtgtgagaagcacgccgccgtcgtgcaactattagtcgaaggcggcgcggatctgtcgtcgggtgacacgggcttatacgcttgcatcgccgtggaggagagcgacaccgagctgctcaacgacatcattcactacggaggcgacgtgaacagggctcgccgggacgggaccaccgccctgcaccgcgccgtctgcgacggcaacgtccagatggccgagctcttgctggaacacggagccgacatcgacaagcaggacggcaacggctggaccccgagagccctcgccgagcagcagggccacgacgacatccagctcctgttccggtcgcgcaaggcggcgacggcgagtggccaccatcacgtcccaagctccaccaccaccagggtggcgccggcggcggcggcggcatcactgatcgggaggttcaacagcgagcccatgatgaagaacatgatccacgaagacgccgacctgcccagccgggttctccccgagaagctccggaggaagcgggtcaccttccagaactccctcttcggggtcatctcgtcgtcgcaggcgcagcgggagaccgaccacccgctctcgaggggtggcctcgcggcgacgggctccccgaacccgagcagcggcagccgcaacgccgtcatcagggtgacgatcagctgccccgagaaagggaacaccgccgggaagctcgtgctcctgcctcagacgctggacatgctcctcgagctcggcgccaagaagttcgacttcgcgccaaccaaggttctcaccgtggagggcgccgaggttgacgaggtggagctcatcagagacggcgatcatcttgtgctcgtcagtaatgaatgggatgcagagaagatgaaaggcaagagctag

SEQ ID NO: 4516 - DNA, 1134 bp, Oryza sativa
atggctccccccaccgccgtctccgcctccaccgccggcctgatctggtccttgtcgccctcgctctcgctcgtcgtcaccacctcggtggcgcttctgctcgtgctcggcggtgtgtccgggatccgcgtcaacgtcatccggctcccgtcggcgtcgccgttcccggcgttccgggaggcgccggcgttcaggaatggcgacgggtgcccgccggcgagggggtcggcggcggcggagggggggcgggtggacgtggccatgacgctcgacgccaactacctgaggggcaccatggccgccgtgttctccatcctgcagcacacggcgtgcccggagagcgtcgcgttccacttcctcgccgcgcgctccgacccggacgccggcgacctcgccgccgccatccgsgccaccttcccctacctcggcgccgccgtcagcgtctaccgcttcgacccgtcgcgcgtycgcggccgcatytcccgctcggtgcgccgcgcgctcgaccagccgctcaactacgcgcgcgtctacctcgccgacacgctccccgccggcgtgcgccgcgtcctctacctcgactccgacgtcgtcgtcgtcgacgacgtgcggaagctctggtcggtggacctcgccgggcacgtggtggcggcgccggagtactgccacgccaacttcaccaagtacttcaccgacgcgttctggtcggacggcgagctcagcggcgccgcgttccgacgcggccgccgccggccgccgtgctacttcaacaccggcgtgatggtgatggacatggggcggtggcgcgacggcgggtacacgcggcgggtggaggagtggatggcggtgcagaagcggaggcggatctaccacctcggctcgctgccgccgttcctgctggtgctcgccggcgacatcaaggcggtggatcaccggtggaaccagcacgggctcggcggcgacaacgcggaggggaaatgccggagcctgcacccgggcccggtcagcctcctccattggagtggcaaggggaagccatggctgcgcctcgactcgcggaagccctgcgccgtcgactacctctgggcgccgtacgacctctacaaggccgccgtacccgcgctcgaggagtga

SEQ ID NO: 4517 - DNA, 1940 bp, Oryza sativa
atggctgcgctggtggtgttgtggccgaccctactaccactagttctgcttgcaaatctccttcccctgccccgccatggccgcgctctggagctcatgaactggtcatgcaacaacggcagctcctacgccgccaacaccacctaccacaggcaacgtccgcgccgtgctcaccgcgctgtccgccatcacgcccaactccaccgcgcgcttcgccaccgcgtcggccgggcgtggcggcgcggacgcgggacgtggccgtgttctacgaccgctgcctcgcccggttctcgtacgcggaacttcacgtcgaggcccgacaacacggaggtcctgatcgggagccccagcgagaaccgcgtcaccgtcgacgccggccgcttcgacgcgctcgtggcccgcctcgccggcgcactggccgactgggcggcctacaactcgacgcggaggtacgccgccgggctgatggcctccggcgacgggttcacgtcgacgacggaggacatggtgcacaacatccacggtgtggtgcagtgcacgccggaccaggcggctgcggcgtgccgggcgtgcctggagacgctcagggtggacatgcccaaggtttttgctggaaggataggagggaggtttgacgccgtgtggtgcaacctcaggtacgagaccttcctcttctacgacggtgacccaacggtgaggctcgccgcgtcgccgtcacctggatcatcgtcatcgccattgccgtcgccgtcgccgtcactaccgccgctagagggaaaaaggagaaatcgcccaaaaaatgcagcaattgttgttgtgtctgtccttgcttctctagttgtacttctgtctctgctctccttttacctctggaggaaattgcaagcgaaacaatataccgatgagaatgatatctattcagggtcacttctctttgacctggcaacactaagaaaggcaacagctagctttgcagaacataacaagcttggtcatggtggttttggagcagtatacaaggggtttttgcctgatggacgtgaaatagctgtgaaaaggcttgacaagacatcaggacaaggccttgaacagctgagaaatgagttgttatttgttgccaaactccggcacaacaatcttgcaaagcttctaggtgtttgcatcaagggggaggaaaagctgctcatttacgagtacctgccaaatcgaagccttgacaccttcctttttgatccagagaagcgaggacaattaaactgggaaacaagatatcagatcatacatgggatagcacgcggcctgctctacctccacgaggattctcagataaagatcattcatcgtgacctcaaggccagcaatgtattgttagatgccaacatgaacccaaagatctccgactttggcttggcgaggctatttgatggtactaaaactgctagtatcacaaaccatgtcgttgggacgctaggatatatggcgccagagtatgcagttcttggacatgtatctgttaagttagatgtctatagcttcggaattttagtcctggagattgtgacaggaagaaggaacactgatgtgtcaggtgaagtggaagaatctaacaatctgcttagctatgtgtgggaccactgggtgaaggggacgccactagaaattgctgatgcatcactgcttggtgatggccgcagcctatcagatatggagctgctcaaatgtgtccacttcgggctcctttgtgtccaagagaacccagtggatcggccaacaatgctcgacattctcgtcatgcttcatgatgttgacaccaatagctttgttgcaccatcaaaacctgcgttcacctttgcgcatggtgggaacacgacaagttctagccaaggtgttgccgcattatcaacaaatgaagtgtccatatcagagtttgttcctagata

SEQ ID NO: 4518 - DNA, 1839 bp, Oryza sativa
atgggcaacgtctgcatcggcccgcgccgcaacttcgccaagaacggcctcctcggcatcctgcggccgcgccacgccgcgccgtcctccccgtcgcagcccaccaccacctcccgctccatccccgtcgtgctcccctcggccccctcctccaagccgccgccgcccacccagaccgccccgcccgtacccgtcgtcatctccgagccgccgccaccgcagccgcagcccgaaccgcagcccgcggcgccgtcgcagccgccgccaccgcaggagcagccctygccgccaccgcccgcgtcgtcgaacaccacccagcagcctccgccgccgcagcagcggcagcagtcgcgcgccaagaagccggcgcacatcaagcgcatctccagcgccggcctgcaggtggagtcggtgctccggcgaaagacggagaatctcaaggacaaatacagcctggggcgcaaactcggtcagggccagttcgggacgacgtacctgtgcgtcgacaaggcgaacggcggcgagtacgcgtgcaagtcgatcgccaagcggaagctactcaccgacgaggacgtggaggacgtccgccgcgagatccagatcatgcaccacctcgccggccaccccaacatcatctccatccgcggcgcctacgaggacgccgtggcggtgcacgtcgtcatggagctctgcgccggcggcgagctgttcgaccggatcgtgcgcaaggggcactacacggagcggcaggcggccgggctcgcccgcgtcatcgtcgccgtcgtcgagtcgtgccactcgctcggcgtcatgcaccgcgacctcaagcccgagaacttcctgttcgtcggcaacgaggaggacgcgccgctcaagaccatcgacttcggcctctccatgtttttccgcccaggcgaggtgttcaccgacgtggtggggagcccgtactacgtggcgccggaggtgctgaagaagagctacgggcaggaggccgacgtgtggagcgccggcgtcatcatctacatcctcctctgcggcgtgccgccgttctgggcagagacggagcaggggatattcgagcaggtgctgcacgggacgctggacttcgagtcggacccatggccgaacgtgtcggatggcgccaaggacctcctccgcaaggtgctcgtccgggaccccaagaagcggctcaccgcgcacgaagtcctatgccatccatggctgcagatgagcgggtcggcgccggacaagccgctggactcggcggtgctgtcgcggctgaggcagttctcggccatgaacaagctcaagaagatggcattgagagtgatcgcggagaacttgtcggaggaggagatcgccgggttgaaggagatgttcaagatgatggacacggacaacagcgggcagatcaactacgaggagctcaaggccgggttggagagagtgggtgccaacatgaaggagtctgaaatttatcagctcatgcaggctgctgatatcgacaatagtggcaccatagattatggagaattcatagctgccactctacacctcaacaaagttgaaagggaagatcatctatatgccgccttccaatacttcgacaaagatggcagtggatacatcacatctgatgagctccagcaagcctgcgatgagtttggtatcgaggatgttcgactcgaagacatgataggcgaagtagatcaggacaatgatgggcgtatagattacaacgagtttgtcgcgatgatgcagaaaacaacaacagggttcgggaagaaaggcggtcataattttagcggttttagggatgccttgaagtcacatagctga

SEQ ID NO: 4519 - DNA, 3153 bp, Oryza sativa
atgaagtacagcaaggaagcaaagcccgagagggcggcgggagggcggtcgagagccgtgccggtggcgctcctgttggtcgtgctctgcgccttctccttctacctcggcgggatctacagcaccggccgcagcttgctcgatgtcaatggcatcgtcgtcaagggggcctcttcttcctcctctgcctctgccgttgccattcaaaaggacaccaacaccaaagccgtcgtcgtcttcccagagtgccccgccgactaccaggactacactccctgcaccgatcccaagcgttggcgcaagtatggcaactaccggctgagcttcatggagcgtcactgcccaccggcggtggagcgcaaggagtgcctggtgccgccgccgcaggggtacaaggcgcccatccggtggcccaagagcaaggaccagtgctggtacaggaacgtcccctacgactggatcaacagccagaagtccaaccagcactggctccgcaaggaaggcgacaagttcatcttccccggcggcggcaccatgttccccaacggcgtcggagcctacgcagacctcatggcggagctcatcccgggcatgacggacggcacggtgcgcacggcgctggacacgggatgcggcgtagccagctggggaggcgacctgctggggcscgggcggggcatcctgacgctgtcgctggcgcccagggacaaccacgaggcgcaggtgcagttcgcgctggagcggggcatcccggccatcctggggatcatctccacgcagcgcctgcccttcccgtccgcggcattcgacatggcgcactgctccaggtgcctcatcccgtggacagagttcggcggcctctacctgctggaggtgcaccgcgtgctccgccccgggggcttctgggcgctctccggcccgcccgtcaactacgagaaccgctggcacggctggaacaccaccgccgccgcgcagaaggccgacctcgaccgcctcaagaagacgctcgcctccatgtgcttcaagccctacagcaagaagggggacatcgccaagctggcgctcgacgccacccccaagtggccgcagcgcctcgccgtcgccccagagcgcatcgccaccgtccccgggagcagtgccgccgccttcaagcacgacgatggcaagtggaagctccggaccaagcactacaaggctctgctcccggcgctggggagcgacaagatcaggaacgtgatggacatgaacaccgtctacggaggcttcgccgccagcctcatcaaggaccccgtctgggtcatgaacgtcgtctcctcctacggacccaactccctcggcgtcgtcttcgacagaggcctcatsggcaccaaccacgactggtgtgaggcattctctacataccccaggacgtacgatctattgcatcttgatggcttgtttactgcagagtctcataggtgcgagatgaagtttgtacttcttgagatggaccgtatccttcgtcccactggttatgccataatccgcgagaacgcctactttctggattctgtagccaccattgccaaaggaatgagatggaactgtgacaagcatgacaccgaacacaaggcagacaaggagaaggtcctcatctgccagaaaaagctttgccaaagaaaactaaaaggggagcccttctcggagcaagaggtgcatagggccattaaggagatgcccaccgacaaagccccaaggctagatggcttcactgggatcttcttcaaagtctgctgggaaatcatcaaagaagacattcttctggtcttagactcaatctataatctcatatgtgcacatctaaatctgctcaactccgcgaacatcgtcctaatacctaagaaagaaggggctgagggggtcgcggactacaggccaattagcctcattcacagtatcgccaagattttctccaagatgcttgcgctgcggctaaggccacacatgcatacgttgatttcggtcaatcaaagtgccttcataaaaggaagaagcattcatgacaacttccttttcgtaagaaacatagctagaagataccaccgcttgaagcgagcaatgttgctattcaagctagacataactaaggccttcgattccgttcgctgggactaccttcttgccttgctacagcgaaggggtttcccaacaagatggagagattggttgggggctattttctcaacgtcaacttcgcaagtactcctcaatggttcgccagggcagcgaattaagcatggcagaggcctcagacaaggggaccccctttcaccactgatattcatacttgcaattgaccccctgcaacgaatcctctcaaaggcaacagagctcagtgcaatctcaaagttgcgagggagaacgacccgtctgaggacctcgatgtatgcggacgacgcaatcatcttcattaaccccactcgaggcgatgtcacggcttttgcagacatcctacatcgctttggcactgccactggactcgtcaccaaccttcaaaaatcccaagtggcggccatcagatgtgacaccattgagttgacggaggttcttgagggcgttccggtggccagaacgggagatatcaccggaggaaaatgtaaagtcaactggaaaaagacgtgcttgccaaccagtcagggaggattgggagtcctagatctagagaaattcacgagggccttgaggctgcgacggttatggcacgagtggaaggatccgaccaagccttgggtgggactggaaacgccctgcgatgaaattgacaggagtcttttcgccgcctcaacaaagataacaattggagatgagaacacgacgcacttatgggattttgcctggatcgagggacaaagacccagagacctcatgccactggtctatgtgatctctaaaaacagagggaggtctcttcgaaatggaaaggaggaggatgcctgggttcaggacctagctctggaatcacactcgcctattatagtagaactagttgaacaactggttgtcctgtgggaagcggtccggaatgtccacttaggcattggagaaccggaccagattacctggaaattcacaagtagcggacgctacacgacctccttggcctaccatgcgtaa

SEQ ID NO: 4520 - DNA, 1362 bp, Oryza sativa
atgggggtctccgccagctgcttgtggggtggctccgagtcgagggggaaccaaaatggttctgctgcggtgacgtctcctcgttcaggtcaagtaatatcaagagctggaagtaatgtacgagtcttctccctaaaggagttgaagcttgccactcgaaactttcacatgatgaactgcgttggccgtgggggttttggagcagtgtacaagggaaacctgaaagatggcactcaaattgcaattaaaaagctgtcagctgaatcaaagcaaggggcaaatgagttcttgacagagataaatgtcatatccaatgtcaggcaccccaaccttgtaaagctaattggttgctgtgttgaagggactaacagactactagtgtatgaatatgcagagaacaatagcttggcacatgctttacttggaccaaggagtaggtgtattccgttaaactggcaaaaaagagcagctatttgtatcggaactgcttctggccttgcatttcttcatgaggaagcacagccacgcattgttcatcgtgatatcaaggccagcaacattttacttgataagaaactacttcctaaaattggagattttggactggccaagctttttcctgacaccattactcacattagcacacgtgttgcaggaacaatgggttacttagcaccagagtatgccttgttgggacagttaaccaagaaagcagatatatatagttttggggtccttgtccttgaagtgataagtggtgaaagcagtagcaaatcgacttgggggcaagatatgaatgtccttgtggaatggacatggaagcttcgagaacaaggaaggcttttggaaattgttgatccagaactggaagaatacccagaggaggaaatgcttcgtttcatcaaggtggcactcgtgtgcacccaggccacgtcccagcagaggccatccatgaaacaggtggtggatatgctatctaacccaacagaaatcagtctggagaacttagtcgcaccaggtgtgctgaaagaaccccgccatcattcaagtagttcgggtttgacaccggacacaacctcaaacagaagcaccaaagccaatccagctgattcctacagcacacagaccagagacatgaatagctatcagttgagcacgattgagggatgcattgcaagagtagtgatgtcttcagacacccaaaagaacttcaccattcgaagacgtggtgaagaacagggtgaagagttgtcacgtgatgatcatagttttaaggcttatttggataggcatggattagggtttaatccttccattttgatgcagaattggttcattatctctgcttatctaaaggactaa

SEQ ID NO: 4521 - DNA, 1850 bp, Oryza sativa
atggagtccatcgccgccgccacgttcacgccctcgcgcctcgccgcccgccccgccactccggcggcggcggcggccccggttagagcgagggcggcggtagcggcaggagggaggaggaggacgagtaggcgcggcggcgtgaggtgctccgcggggaagccagaggcaagcgcggtgatcaacgggagcgcggcggcgcgggcggcggaggaggacaggaggcgcttcttcgaggcggcggagcktgggagcgggaagggcaacctggtgcccatgtgggagtgcatcgtctccgaccacctcacccccgtgctcgcctaccgctgcctcgtccccgaggacaacatggagacgcccagcttcctcttcgagtccgtcgagcaggggcccgagggcaccaccaacgtcggtcgctatagcatggtgggagcccacccagtgatggaggtcgtggcaaaggagcacaaggtcacaatcatggaccacgagaagggcaaggtgacggagcaggtcgtggatgatcctatgcagatccccaggagcatgatggaaggatggcacccgcagcagatcgatcagctccccgattccttcaccggtggatgggtcgggttcttttcctatgatacagtccgttatgttgaaaagaagaagctgcccttctccggtgctccccaggacgataggaaccttcctgatgttcaccttgggctttatgatgatgttctcgtcttcgacaatgtcgagaagaaagtatatgtcatccattgggtaaatcttgatcggcatgcaaccaccgaggatgcattccaagatggcaagtcccggctgaacctgttgctatctaaagtgcacaattcaaatgtcttctatatcttatttcattttcactccagacccaagctttctccaggatttgtaaagttacacactcggcagtttggtacacctttgaacaaatcaaccatgacaagtgatgagtacaagaatgctgttatgcaggctaaggagcatattatggctggtgatattttccagattgttttaagccagaggtttgagaggcgaacatacgccaatccatttgaagtctatcgagctttacgaattgtgaacccaagtccatacatggcatatgtacaggcaagaggctgtgtcctggtagcatctagtccagaaattcttactcgtgtgaggaagggtaaaattattaaccgtccacttgctgggactgttcgaaggggcaagacagagaaggaagatgaaatgcaagagcaacagctactaagtgatgaaaaacagtgtgctgaacatattatgcttgtagatttgggaaggaatgatgttggaaaggtctccaaacctggatctgtgaaggtggagaaattaatgaacattgaacgctactcccatgtcatgcacatcagttccacggtgagtggagagttggatgatcatctccaaagttgggatgccctgcgagccgcgttgcctgttggaacagttagtggagcaccaaaggtgaaagccatggagctgatagacgagctagaggtcacaagacgaggaccatacagtggcggccttggagggatatcatttgacggagacatgcttatcgctcttgcactccgcaccattgtgttctcaacagcgccaagccacaacacgatgtactcatacaaagacaccgagaggcgccgggagtgggtcgctcaccttcaggctggtgctggcattgtcgctgatagcagcccagacgacgagcaacgtgaatgcgagaacaaggcagccgctctggctcgagccatcgatcttgctgaatcagctttcgtagacaaggaata

SEQ ID NO: 4522 - DNA, 1623 bp, Oryza sativa
atggacttgccaaaacttctcttcacagtactcatactctctcttctcaactacgaatcctcttccgccacagcatgggatgatgaagatttcttcaagacttgctcatcacacaggtgcagcaagcatggaccagagatcaggttccctttccggctctcgacacaacctccatcatgcggcgcacccggcatgcacttgtcatgctctggacaggacaccatcctcaatcacccagttcttggtccctgcaaagtaaccgagataagttacagttatgctaccatgaacgtcatcccacctgtagattcctcacctcactgcccacttcagaagctcatgtcgaaaaaccaatcaacttctgtgtacaaacctcaagatccctatacatacatgtctgttcttcccttggactgcacagttatttctaaaggcatcccaatgccctatagttatgataaaaaagggagaataaactgggacacctcaaacttcaaggaaacagcaaatagagtcatcaacgatggaccgcgggtcactcttgttgcagctacatcatctgtagccacatttgtaattctttcattagttgtggccactgcattctacatctccttaaagtcaaggtacaacaaagagatacatttgaaagttgaaatgtttctcaagacatatggcacatccaagcccatgaggtacactttctccgatgttaagaaaataacaagacggttcaagaataaattaggccatggtggatttggaagtgtctacaaaggtgagctaccaaatggagttcctgtggcagtcaagatgctagagaactccttaggagagggagaagagttcatcaatgaagttgcgaccattgggagaattcaccatgcaaacatcgtccgtctcctaggattttgctctgaaggaacacgacgggctttaatatatgaattcatgcccaatgaatcgttggagaaatatatattctcaaatggttctaatatttcaagagaattcctagtaccaaagaaaatgctagatattgctttaggcatcgcccgaggaatggagtacttgcaccaagggtgcaatcagcgcattctccattttgacatcaagcctcacaacatattgttggactacagcttcagtccaaagatctcagactttgggcttgcaaagttgtgcgcaagagatcaaagcattgtcacattaactgcagcaaggggcacgatgggttatattgcaccagaactatattctcggagttttggagcaatatcatacaagtcggatgtctacagtttcggcatgctggtgttagaaatggtgagtgggaggaggaacacagacccaaccgttgagaaccaaaatgagttctactttcctgagtggatatatgagagagtaatcaatgggcaggaactggtgcttaacatggagacaacacaaggggagaaagaaacggttagacagctagccattgtagcgttatggtgcattcagtggaacccaacaaaccggccctcgatgacaaaggtagtaaacatgttaacggggaggttgcagaaactacaggtgccgcctaagcccttcatttcgtctgaaaatcatcttgcgacttag

SEQ ID NO: 4523 - DNA, 1443 bp, Oryza sativa
atgtcgaccgccgccaccgccccgccgcccgccgcggtcctcccggcggctcccccgccgtcctaccccgccacctccgcgccctccgcctccgcggccgccgccgaggacgacgacgacctctacggccgcctcaagtcgctccagcgccacatggagttcgtcgagatacaggaggagtacgtcaaggacgagcagaagaacctgaagcgcgagctgctgcgcgcgcaggaggargtkaagcggatccagtccgttcccctcgtgatcggccagttcatggagatggtcgacggcaacaacggaatcgtcggatccaccaccgggagcaactattatgtgcggatcctgagcaccatcaaccgcgagctgctcaagccctcggcgtccgtggcgctgcaccgccactcgaatgcgctcgtcgacgtgctgccgcccgaggcggactccagcatctctctgctcggatcatcggagaagcccaacgtcacttatacggatattggaggatgtgacatccaaaaacaagaaattcgggaggctgttgaattaccgctgacacatcatgagctgtacaagcagattggtattgatcctccaagaggtgtgcttctgtatggtccacctggaactggcaaaactatgctcgccaaagctgtggcacaccacactactgctgcatttatcagagttgttggttcagagtttgtgcagaagtacctgggtgagggacctaggatggttcgagatgtattccgtttggctaaagagaatgccccagctatcatattcatcgatgaggttgatgctatagcaactgctcgttttgatgctcagactggtgctgaccgagaagttcagcgtattcttatggaactactcaatcagatggatggatttgatcaaacagtgaatgtgaaggttataatggcgaccaacagggcggataccctagaccctgctctgttacgtccaggtagattggacaggaaaatcgagttccctcttccagatcgtcggcagaagaggcttgttttccaagtctgtactgctaaaatgaacttgagtgatgaggttgatttggaagattatgtttccagaccagataaaattagtgctgctgatcccatgtctgaggactgtagtgcagaagatacttttgatgccattgtaacttgtggcacatctgtgctggttaaaattttaatgccgtgctccctgctcctaatccataacagtaaaattgaaatatcactgtataaaactagaggatattttgacataaatattgcatactccctgctaatattgctgctatctgtcaagaagctggtatgcatgctgtgcgcaaaaatcggtatgttatcctcccccaaggacttcgagaagggttaccgaaccaatgtcaagaagcctgagactgactttgacttctacaaatga

SEQ ID NO: 4524 - DNA, 858 bp, Oryza sativa
atggagaatgatctgttaccttctctagagttggtctctaagatgatacaggatgtagaagttctggaagaaaaggctgaagtggccaagcatgaatcatctattgctgggacaagcattctcaccaaagtggggaagctgaaggaaatgttaaatcatgcgaaggaagcaaatgatatgcatgcttgtgaggtttttggtgagaaatctattttaaccacagaggcacgggagctccaatcgcgacttcagaggctgtcagatgagaggaagaactatctagtggtaattgaggagatacgccaaacacttgagcacagattggttgctgcacaacaagaaatcgatgcggctgaggagaagaagattcaaaaggaagcttctgctcaggcactgcttgatgagcaggaaaaggagatgaacttagccgttgaagaatcaagaaagctgcagaaagaagctgaggagaatttaaagctgaaggcattcttggttgagcggggtcaaatcgttgatacattgcaaggtgagatgactgtgatctgtgaggatgtgtcccaactcaaacaaatagtggatgagcgcttatcgttctgcaagttacagcggtcaaaaatgtcgagcctctcctcttcgctgcaatcttcgcttcacaagagtgggagttctgctgatagggctattgaagcagttgagtctacagataaacatacagtagccgagggtgctaatgcagcggttggtgatgatccaaatggcagcaaaagaatcatccatgtgtggaatggcagtggcatggctgacaaagacaatggcacagggggggataccaacgaggatggctgggaattttgctga

SEQ ID NO: 4525 - DNA, 936 bp, Oryza sativa
atggagttcatcacgccaatcgtgaggccggcatcggcggcggcgggckgcggcaaggtgcaggagagtggtgggaggagcttggcggcggtggagaaggagcacatgttcgacaaggtggtgacgccgagcgacgtggggaagctgaaccggctggtgatcccgaagcagcacgcggagaagtacttcccgctggacgcggcgtccaacgagaaggggctcctgctcagcttcgaggaccgcacggggaagccatggcggttccgctactcctactggaacagcagccagagctacgtgatgaccaaggggtggagccgcttcgtcaaggagaagcgactcgacgccggggacaccgtctccttcggccgcggcgtcggcgaggccgcgcgcgggaggctcttcatcgactggcgccgccgccccgacgtcgtcgccgcgctccagccgcccacgcaccgcttcgcccaccacctcccttcctccatccccttcgctccctgggcgcaccaccacggacacggagccgccgccgccgccgccgccgccgccggcgccaggtttctcctgcctccctcctcgactcccatctacgaccaccaccgccgacacgcccacgccgtcgggtacgacgcgtacgccgcggccaccagcaggcaggtgctgttctaccggccgttgccgccgcagcagcagcatcatcccgcggtggtgctggagtcggtgccggtgcgcatgacggcggggcacgcggagccgccgtcggctccgtcgaagcgagttcggctgttcggggtgaacctcgactgcgcgaattccgaacaagaccacgccggcgtggtcgggaagacggcgccgccgccgctgccatcgccgccgtcatcatcgtcatcttcctccgggaaagcgaggtgctccttgaaccttgacttgtga

SEQ ID NO: 4526 - DNA, 969 bp, Oryza sativa
atggagttggtggtggcggtagcaggtgcagtagtcgtggcactgagcttgtgcattggaggtgtgcaaggtcagctccaggtagggttctacgaccaatcgtgcccccaggccgaagtgattgtgagagacgaggtcggcaaggccgtgagcgccaacgttggcctcgccgccggccttgtccggatgcacttccatgactgcttcgtcaagggatgtgacgcgtcggttttgctggattcgacggcgaacagcacggcggagaaggacgcgataccgaacaagagcctgagggggttcgaggtggtggacagcgccaagcggcggctggagagcgcgtgcaagggggtggtctcctgcgcggacatactcgccttcgccgccagagacagcgtcgtgctggccggcggcaccccgtaccgcgttccggccgggaggagggacggcaacacctccgtggcgtccgacgcgatggccaacctgccccgtcccacctcagatgtggcccaactcacacaaagtttcgccactcatgggctttcccaggacgacatggtcatcctttcaggggcgcacacgataggggtggcgcattgcagctcgttcagctcgaggctgtacgggtacaactccagcacggggcaggacccggcgctgaacgcggcgatggcgtcgcggctgtcgcggagttgcccgcaggggagcgccaacacggtggccatggacgacggcagcgagaacacgttcgacaccagctactaccagaacctcctcgccggccgcggcgtcctcgcctccgaccagacgctcaccgccgacaacgccaccgccgcgctcgtggcgcagaacgcctacaacatgtacctcttcgccaccaagttcggccaggccatggtcaagatgggcgccatccaggtgctcaccggcagcgacggccagatccgcacaaactgcagggttgcaaactga

SEQ ID NO: 4527 - DNA, 1038 bp, Oryza sativa
atggcagaagacttcggcgccttcatggagaggttcgtgctgccgccgccgccgccgccgtcgtcgcagcaactccccctgcacggcctcaccttcgccatcaaggacatcttcgacatcgccggccgcgtcaccgggttcggcaacccggactgggcgaggacccacgcgcccgccgccgccamctcccccgtcgtcctcgccgcgctcgccgccggcgccaccagcctcggcaccaccatcatggacgagatggcatacagcatctatggcgagaacgcgcactacggcacgccggccaacccgtgcgcccccggcagagtccccggcggatcctccagtggctccgccgtcgccgtcgccgccaacctcgtcgacttctccctcggcaccgacaccggcggcagcgtcagggtgcccgctgcctactgcggcatcttcggcctccgcacctcccatggcctcgtttccgctcaaaacgtcatccccatggcacaaatgtttgatactgttggttggtttgccagagatctatctacgttgtctcgtgtaaccaaagtgttgttgccacttcctgatgacactgtcaagcacccaactcatgtcacaattcccatggactgtttccaaatcttagggtctcctgatgaccatacatatcaaatcgtcaatgcttcagtagccaagaaatttggtagtcacgcaatagacaatgccaaccttggagacttcgtctctgacaatgttccaagcatagggaagttcattgctgacttctctgaaagcgaactaccttccgtgccagctctctctgtcatttcacatgtcatgttcagccttctgaggtctcagttcaaagcaaaccatgcagagtgggttaactctgtaaaacctaacctaggccctggattacgagagaacatacatggggccgttgcatcaggggatgatgaacccctggaggaatttctagccgtaagggccgaattcaagtctgcacttgctgctcttctcaaggcaatatttatttatttttaa

SEQ ID NO: 4528 - DNA, 1428 bp, Oryza sativa
atggcgaccggagagctcgctctcgtgtcctcgctgttcatcgtcgtcgtgttcctcttgcttggtgcggtggcgagagaggcttctgcgctcacccggcatgacttccccgagggcttcgtcttcggcgcaggctcctccgctttccaggtggaaggggcagctgcagaggatgggaggaagcccagcatttgggacaccttcatcaatcaagggtacatgcctgacggctccaatgcagatgtctcagcagatcagtatcaccattacaaggaggatgtaaagcttatgtatgacatggggctggatgcgtacagattttccattgcttggcctcgtcttattccggatggaagaggagagatcaaccccaagggcttggagtactacaacaatctgatagacgaattgataatgcatggaatacaacctcatgtcaccatctaccattttgatctccctcaggcccttcaggatgagtatggtggaatactcagccccagattcatagaagattactcggcttatgccgaggtgtgcttcaagaacttcggtgacagggtgaagcactgggccacctttaaccagccgaacatcgagcccatcggcggcttcgacgccggcgaccggccgccgcggcggtgctcctaccccttcggcaccaactgcaccggcggcgactcctcgacggagccgtacatcgtggctcaccacctgctgctcgctcatgcctcggcagtgtccatctacagacagaaataccaggtcacaatactgaattcatactgtgttcattggtttttgcatcctttggtgcacggagactaccctccggtgatgaggagtcgcgtgggcgttcggttgccatccataacggcgtcagattcagagaaaatacgcggatcgttcgacttcatcggcatcaaccattactacgttatctttgtgcaatccatcgacgcgaatgagcagaaactacgggactactacatcgacgcaggtgttcaaggagaagacgacacggagaacattcagtgtcattcttggtctcttggcaaggtgctgaatcacctgaaactcgagtatggcaaccccccggtcatgatccacgaaaatggttattcagattcaccggatatcttcggaaagatcaactacaacgatgacttcagatcggcgttcttgcagggctacctggaagctctgtacttgtccgtacggaacggatcgaacacgcggggatacttcgtgtggtcgatgttcgacatgttcgagttcctctacggctaccgcttgcggtttggcctgtgcggcgtcgacttcaccgccgcggcgaggacgaggtacctcaagaactcggcgcgatggtactccggcttcctccgcggcggcgagctccggccggagaaatcctacgccacactgtga

SEQ ID NO: 4529 - DNA, 1455 bp, Oryza sativa
atggacgccggcgacgcagccaccacgagggcccggaagccggtcgtgctctacccgtcgccgggcatgggccacctggtctccatgatcgagctcggcaaggtgttcgccgcccgcggcctcgccgtcaccgtcgtcgtcgtcgacccaccgtacggcaacaccggcgcgacggggcctttcctcgccggcgtcaccgcggccaacccggccatgacgttccaccgtctgccgaaggtggaggtgccgccagtggcgtccaagcaccacgagtcgctcaccttcgaggtcacccgcctctccaaccccggcctccgcgacttcctcgccggcgcctccccggtcgtcctcatcatcgacttcttctgcaacgccgccctcgacgtcgccgacgagctgggtgtccccgcctacatgttctacacttccggcgccgagatcctggctttcttcttgtacctcccggtcctgcacgctcagaccacggcgaacttcggggagatgggcgaagagctcgtgcacgcccccggcatcccctcgttcccggcgacgcactccgtcctgccgctcatggaacgcgacgacccggcctacgcggaatttctgaaagcgtccgccgacctctgccgcacccagggcttcctcgtcaacacattccgctcgctcgagccgcgggccgtcgagaccattgccgcggggagctgcgcgcctccgggcgtctcgacgccgcccgtctactgcatcggcccgctgataaagtcggcggaggtgggcgagaaccggagcgaggagtgcctggcgtggctggacacgcagcccaacggcagcgtggtgttcctctgcttcggcagcatcggcctgttcagcgcggagcagatcaaggaggtggcggcggggctggaggcgagcgggcagcggttcctgtgggtggtgcggagcccgccgagcgacgacccggcgaagaagttcgacaagccgccggagcccgacctggacgcgctcctccccaaggggttcctggagcggaccaagggcagggggctcgtcgtcaagtcgtgggcgccgcagcgcgacgtgctggcgcacgcggcggtgggcggcttcgtgacgcactgcgggtggaactcggtgctggagtcgatcgtggccggcgtgccgatgctggcgtggccgctgtacgcggagcagcggatgaacagggtgttcctggagaaggagatgcggctggccgtggcggtggaagggtacgacgacgacgtcggggaggggaccgtgaaggcggaggaggtggcggcgaaggtgcggtggctgatggagtccgacggcgggagggcgctcctggagcggacgctggcggccatgcggcgggcgaaggcggcgctgcgcgacggcggcgagtcggaggtgacgttggcgcggctggtggagtcgtggagggaagcggccagcgcatga

SEQ ID NO: 4530 - DNA, 1104 bp, Oryza sativa
atgggrgrggaagcattcttgrgcaggtcagtttgtggtgttcatatggatccctttttccgcagagcttccagtgaccccttgtgcttggaagacaactccgtccaacatggaattgaaagatgcccattcctaaggaacatcaatgagcctacaagtttttcattctcgtccgttaattttcctgttcctgcaagaggagacaagggtccaatttttgaagatggacccaattttgacatggcatttcgagttttccatggccaagatggggttgttccactttcacatggatcatttgagcgatttgagaagccaatgccaaagcccaatcctgaatttaaccccttggctgctaaagcagctaccatcagtctctctgcatttggaggttttttcagctttggtgatttctcaaataagcgcaataagaagaatagtaaccaaaagaagcccaacaaccttccccagaacggaggtcagcctaataaccatgaagcactgagcaatgagtggctggaaatgggtcaatgccccctggcaaagtcgtacagggcattaagtggtgtcgtgcccctcgtcgcaaagatgatgacacccccggctggtatgaaactgagatgcccacctgcagtagttgccgcccgtgcagcactatcacgcacagcctttgccaaggggcttcgtcctcagcccctaccgacgaaaatactggtgatggcgttgcttggtatggcagcaaacgttccccttggcatctggagggagcacacggagaaattctcagtgcagtggtttgccgcagtccatgcggcggtacctttcataggcatgctcaggaagtctgtgctgatgccaaagacagccatggcgcttaccatagctgcctcaatattgggtcagacaattggttcgagagctgagcgtatcagattgaagagggcagcaaaggttgctgctggtagccagggtgatgctagcaccagaatgagcctgaaaaccgggagatacactgatgatgtccagttctgggatccgcttgccctcagagttgagagtaccataggaacaggaactccggttcttgttccaactttccattga

SEQ ID NO: 4531 - DNA, 1089 bp, Oryza sativa
atggagcacaacggcacggcggcgctcggctgggcggcgagggacacctctggccacctctcaccgttcagcttcacaagaagggttcagcaggaagacgacgtgacgatcaaggtgctctactgtggcatctgccacaccgacctgcacatcatcaagaacgagtggggcaacgccatgtaccccgtcgtccccgggcacgagatcgtcggcgtcgtcaccggcgtcggcgccggcgtgacaaagttcaaggccggcgacacggtgggcgtgggctacttcgtcgactcgtgccgcgcctgcgacagctgcggcaaggggtacgagaactactgcccgacgatggtgatcacgtcgaacggcacggactacggcggcgccaccacccagggcggcttctccgacgtcatggtcgtgaggcaggactacgtggtgcgcgtcccggcgagcctgccgccggacggcgcggcgccgctgctgtgcgccggcgtgacggtgtacagcccgatggtggagtacggcctgaacggtcccgggaagcacctcggcgtggtcggcctcggcgggctgggccacctgggtgtcaagttcggcaaggcgttcgggatgaaggtgacggtgatcagctcgtcgccggcgaagcggggggaggcgctggggcggctcggcgccgacgcgttcctgtcgagccgcgacggcgagggaatggcggcggcggcggcgacgatggacgggatcatcgacacggtgtccgcggggcacccgctggtgccgctgctgtcgctgctgaagcccaaggggcagatggtggtggtgggcgcgccggcgatgccgctgcagctgcccgcgtacgccatcatcgagggcgggaagcgcgtcgccgggaacggcgtgggcagcgtggccgagtgccaggcgatgctggacttcgccggcgagcacggcatcgccgcggacgtcgaggtggtcgccatggacgccgtcaacgccgccctcggccgcctcgagaggaacgacgtgaggtaccgcttcgtcgtcgacgtcgccggcacaatgcacgctgccgccgccgccgctgcgtcgtcctag

SEQ ID NO: 4532 - DNA, 1400 bp, Oryza sativa
atgggcgcgccggtgcgcggcgccctcgtcttcttgcttcttctcgccggcgcggccgcggagacggcgccggaggaacccacattgccctccgccgccgccgatggggcggctagtagcgggacaacatctggcgctggtgctggaacgggaatcaactcgaactcggtgctggtggcgctgctggactcgcattacacggagctggcggagctggtggagaaggccctgctgctccagacgctggaggacgccgtcggcaagcacaacgtcaccatcttcgcgccgcggaacgaggcgctggagcgtgacctcgacccggagttcaagcgcttcctgctcgagccgaggaacctcaagtcgctccagtcgctgctcctcttccacgtcctccccgcccgcttcccctccgggtcctggtccgccgtctcccaccccacgctctccggcgaggaggttgagctcgccgccgccgccaacgacggcgcgatgcgcgtcgcccaagccgccgtcacccgcccggacgccgtgctcaggccggacggtgtcatccacgggatcgagcgcctcctcgtgccgcgctctgtccaggaggacttcaaccgccgccgcagcctcgccgacatctccgccgtgctgccaactggcgcgcccgaggttgacccgaggacgcaccgcctcaagaagccggcgccgcccgtgccacccggcgcgcccccggtgcttccgatctgggacgccatggcccccggcccatccatcgcgccggcgcctgcccctggaccgggctccgggaagcaccacttcgacggccacagccaggtgaaggacttcatccagaccctcctcctgtacggcggctacaacgagctcgccgacatcctcgtcaacctcacctcgctcgccaccgagatgggccggctcgtctccgaggggtacgtgctcaccgtgctcgcgcccaacgacgaggccatggcgcgcctcaccaccgaccagctcagcgagcccggctcgccggagaacatcctgtactaccacatgatcccggagtaccagaccgaggagagcatgtacaacgcggtgcggcggttcggcaaggtgcgctacgacacgctgcggctgccgcacaaggtggtggcgcgcgaggccgacggctcagtcaagttcggccatggcgagggctcggcgtatctcttcgacccggacatctacacggatggcaggatcgcagtgcagggcattgacgccgtgctgttcccgccggatgacaccaagacggcgccggacacggcgccggtcaggagggcgcccgccgtcaccggcactcgcaagaagaacaaactccggagaggtcagccattctcttcagatctgaacttgcattttctactcaattatta

SEQ ID NO: 4533 - DNA, 1797 bp, Oryza sativa
atggggaacacgtgcgtcggccccagcatcagcaagaacggcttcttccagtccgtctccacggtgctctggaaggcgcgccaggackgcgackacgcgctgcccggcgccaatggcgcccctgackkctgckgccagggccggttgccggcgccgccgccgccgacttccgacgcgccgctcgccgtccaaaacaagccccccgagcacgtcaagatcgtctcgaccacggamaccgcctycgccgagcagacgcctccaagtcgagcgccggctcggactccggcgagccgccaggccgcggccgaggtgccgccggtgaagcgcgtctccagcgccgggctgctcgtcggctcggtgctgaagcgcaagacggagagtctcaaggacaagtacagcctggggcggaagctcgggcaggggcagttcgggacgacgtacctgtgcgtggagcgcgccaccggcaaggagttcgcctgcaagtccatcctgaagcggaagctggtcaccgacgacgacgtcgaggacgtccgccgcgagatccagataatgtaccacctcgccggccaccccaacgtgatctccatcaggggcgcctacgaggacgccgtcgccgtgcacctcgtcatggagctctgcgccggcggcgagctgttcgaccggatcgtccagaaggggcactacaccgagcggaaggcggcggagctcgccagggtcatcgtcggcgtcgtcgaggtgtgccactccatgggcgtgatgcaccgtgatctcaagcccgagaacttcctcttcgccgaccagacggaggaggccgctctcaagaccattgactttggtctctccatttcctttcgcccaggtcaagtattcactgatgttgttggtagcccttactatgtcgcgccagaagttctgaaaaagaaatatggtcaagaggcagatgtctggagcgctggtgtgataatttacatcttgttgtgtggtgtgccgccattttgggcagagaacgagcagggtatatttgaagaggttttgcatggtagacttgactttcagtcagaaccatggcctagcatctctgaaggtgccaaagatctcgtaaggagaatgcttgttagggacccgaagaagagattgacagctcatgaagttttaaggcatccatgggtccaggttggtggtttggctcctgacaagcccctggattctgctgttctatctcgtatgaagcaattctcagctatgaataagctgaaaaagatggctcttagggtcattgcagagaacctatctgaagacgaaatcgccggcctgaaagaaatgttcaagatgatcgacacagacaacagtggacagatcaccttcgaagaactcaaggttggtctgaaaaaagtcggtgctaacctccaagaatccgagatctacgcactcatgcaagccgcagatgtagataacagcggcacgatagattacggtgagttcatcgctgcaactctgcatatgaacaagatcgagcgggaggatcacctgttcgcggcgttccaatacttcgacaaggacggcagcggctacatcacggccgatgagctgcagctcgcctgcgaggagttcggcttgggagacgttcagctcgaggagatgatcagagaagtcgacgaagacaacgatggtcgcatagattacaacgagttcgtggcgatgatgcagaagccgacgatggggctcccggcgaagaagtccggcgggctgcagaacagtttcagcatcggcttcagggaggccttgaggatgtcttga

SEQ ID NO: 4534 - DNA, 1740 bp, Oryza sativa
atgtcgcagaagcggcagccggaggagagcagcggcggcgtcggcggaggcatgggacccccgtcccggccgaatccggggccgggagttcctcgccgcccmaccgccgcggggagcccaagcgccagagggtccccgccytccgcgatggtggctttgcctccgcgcagggtgatcacggaggtgatgcggaagagcagcatcgaaaagttgttcacggctatcgagcccctcatccgaagagtggtgaaagaagaaatcgagtcagcgtttgcaaatcatgccactatgatggcaagaactgtcatggatgttgttccatcttcatcgaaaaatttccagctacagttcatgactaagctttcacttccaattttcactggctccaagattgaaggggagagctccttaagtataactattgctctagttgacactgttaccagagaagttgtagcatcaggcgatgagtccctgatgaaagttgaaatagtagttttagagggggattttgaaggtggagaaggcgatgactggacagctcaagagttcaacaataacattattagagcaagggaaggtaaacgacccttgctttctggagacatttttgttggccttattaaaggcattggtgcagtgggggaactatcattcacagataattccagttggacacgcagccgtaagttcaggctaggtgcaaaaactgaggatggttcttataacggagtaagggtgcgtgaagcaaagtctgaatcatttgtggtgaaggatcatcgtggagaattatacaagaagcaccatccccctattcttgatgatgaggtttggcgcctggagaagattggcaaggagggagcatttcacaagcgtttgaatagggagaaaattgttactgtaaaagaattcctcactttactacatcttgatgctcctaggcttcgaaagatattgggcagtggcatgtcaacaaagatgtgggaggtcacagttgagcattcaaaaacctgtattctccctgacaaggtgcatttgtactatccagacagcctaagcaaaacagcagtcgtgttcaatgttgttggagaagtgagagggttaatatctgagaagtttgtttgtgctgatgatcttagagaaaaggagaaggctgaagcatatgcagctgtgaagcaagcgtatgaaaattggaagaatgtcttcacctgtgacaatgaaacacttctggcaaatccttcacagctccttgatgtgagaactacgtcattgcatgaaaatgactatgaccagtttcctacacaagtttctaccgatggttttggtttgagccagtcaagcataccatcacctgacattttctcaattgatccctcgagtgcattggatccttgtccattggaaactgcagaaaacaatgaaaatcaatatcagtcagagttacccccacttggtggccatgcaccaccgcaagtatcacagacagtggacaagttctcaaattctttggtttatgaggattgcaccagtcacccctcattcagtgaagattactatcgttgttcagatccatctgtatcctttgacacacaagaccttggagctgcattgaaaggcttcattgcaacgatatctaagcccaaggcgtatagaggatggaggacattgtcttatgttataggatggatattctacaccaagaagattgttgctatgaaaagaaatgaacatgggaaataa

SEQ ID NO: 4535 - DNA, 903 bp, Oryza sativa
atggcgtcgcagcagttcccgccgcagaatcaggagacgcagccggggaaggagcacgccatggatccccgccccgaggccatcatccagagctacaagccagccaacaagctgaaggacaaggtggcgatcgtgaccggcggcgactccggcatcgggcgggcggtgtgcctgtgcttcgcgctggagggcgcgacggtggcgttcacgtacgtgaaggggcaggaggagaaggacgcggaggagacgctccgcgcgctgcgcgacatcagggcgcgcaccggcgccaaggaccccatggcgatccccgccgacctcgggtacgacgacaactgccgcaaggtggtcgacgaggtcgccggcgcgtacggcggcgccatcgacatcctcgtcaacaacgccgccgagcagtacgagcgcccctccatcaccgacatcaccgaggacgacctggaacgcgtgttccgcaccaacatcttctcctacttcttcatgtcgaagcacgccstgaagcggatgcgcgatcgccgcggcggcgccggcgccggcgggtgcagcatcatcaacacgtcgtcgatcaacgcgtacaaggggaacaagacgctgctggactacacggcgaccaagggcgccatcgtggcgttcacgagggcgctggcgctgcagctggcggaggaggggatccgggtgaacggcgtcgcgccggggccgatctggacgccgctgatcccggcgtcgttcgcggaggagaaggtgaggcagttcggctcccaggtgcccatgggccgcgccggccagccgtcggaggtggcgcccagcttcgtcttcctcgccagcgacgacgcctcctacatgtccggccagatgctgcacgtcaacggcggcgtcatcgtcaacggctag

SEQ ID NO: 4536 - DNA, 948 bp, Oryza sativa
atgctcccaacccttgtcatggtccatgggtatggtgcttcacagggtttcttctttcgaaactttgatgcccttgcaagccgtttcagggtgattgccattgatcagcttggttggggtggatcaagtagacctgacttcacttgtaaaagtactgaagaaactgaggcatggttcatagattcctttgaggaatggcgcaaagcaaagaatctcagtaattttatattgctcggtcactcttttggaggatatgttgcggcaaagtacgctttacagcatcctgagcacgtccaacacttgatcttggtcggccctgctggcttttcatcagaaacagagcatagctctgagtggttaaccaagttccgagctacatggaaaggcatgctagtgaatcatctatgggagtccaattttactcctcaaagaatagtgagaggattgggtccttggggaccaggcttagttcagagatataccagtgccagatttggctcacattcaacaggtgaattactaacagaacaggaatccacattactgacagattacatttaccatactttggctgccaaagctagtggagagttgtgcttaaaacatatattttcctttggggcattcgtgaggaaacctcttctgcaaaggagttatgagcaccctggtgatcttgagagcatatgcacaatatcataccatgcttctcactgtctcactgccctaaaacttgtaacagtgcatccgattggaaagtgccaactactttcatatatggccaacaagggaggacattttgtgttcatagataatccttcggggttccactccgcggtcttccacgcatgccgcaagtttctatctggagatggagaggaaggcctctctcttcctgaaggcctaatcatcggcctgagatggcgtctcgtatcgacaatctcatcatag

SEQ ID NO: 4537 - DNA, 546 bp, Oryza sativa
atgtcgaacaccaccgagaagaagatgccgcagcagcagcaggttgagaggccgacggcgttggcgccggcggacgcggagatcgagagggtcttcacccgcttcgacgcggacggggacggcaggatctccccctcggagctggccgcggtgacgcgcgccatcgcgccgccgcccagcgagtccgccggcggccgcgaggtggccgccatgatgaacgagctcgacaccgaccgcgacggcttcgtcgacctcggcgagttcgcggcgttccacggccgcgggcgcggggacgccgagcacgaggccgagctgcgcgccgcgttcgacgtgtacgacgtcgacggcgacggccgcatcacggcggccgagctcggcaaggtcctcggccggatcggcgagggctgcagcgccgaggagtgcgagaggatgatcgcctccgtcgacgtcgacggcgatggctgcgtcgggttcgaggagttcaagaagatgatgtgccgtgatgccgctgcaaccggcggcgctgacaaggccaagacggagtaa

SEQ ID NO: 4538 - DNA, 2058 bp, Oryza sativa
atggcggcggcgagggaggcggcggcggcggcggtacaccacgaaggatggatggtgcgctacggccggaggaagatcggcaggtccttcttccacacccgctacttcgtcctcgacagcaggctcctcgcctactacaagaagaaacccaaagacaacatggtgccactaaaatcgctgctgatagacgggaattgcagggtggaggatagaggactcaaaacacatcatggacaaatggtctatgtcctgtgcgtttataataagaaagaaaaggagcatcagatcacgcgttatatcagtatatatatgactagatttaattcgcagatgggcgcgtatgatattgaggatgctctggcctggaaaaagaatatagaactcattatcgatcagcagcaagaaaatatgacctccaaaaaccgcaaggcctttgcttcaatggactttgatacggaactaggagggcagtttatattctcagaccatgacagcgcagctgaagatgaagaggaacgacctatgttgattcgcaggacaactatagggaatggactacgcatctttgaagaacttctggaattcgattatcttgcaagaagctgtagcagagctatgcgagctgttggtgttgtggaagccacatgcgaagccatttttgggctggtgatgagcatggatgtaacaagatatgagtgggactgcagctttcgctatggtagtttagttgaagaggttgacggccacaccgctatactgtatcataagttgcagttgcactggtgcccaatgttagtatggcctcgagacctatgttatgttcgctattggcggcgtaatgacgatggaagttacgttgtgctgtttcgatctacagagcatccaaactgtggacgtcaaaaaggatatgtgagggcttttattgaaagcctacgagaatacttctcccaaacagacgaaacacatataactccaaggattcctgtgatggaaaacatggttgacacatctgcagtacagaaagatgacaagaagagtaccgaagaagtagactccaagactaaaacaccagatcgaggacaagcggacagtaaaaacatgggaatcattgatgaagaaacagacgaggatgaggactatcaggttcctgaagctaacatagaggaagatcctaacaaagatgctaagcgtgcagacgaaccaccagaaaagattgatctatcatgcttttcgggcattcttcgttgcgatgcggatgagaaaagccgaaactgttggacagtacctgacagcaagctgtttaaagtccgtagcaagaacttcccgcatgataaatcaaagatacctgcagcgagttacctgatggagcttgcggccattgactggtttaaggacagcaagcgtatggataacgtaggcaggcagaaaggctgtgtagcccaggtagctgctgagaaagggatgcatacatttgttgccaacatacagatccctggatcaactcattacagcttggtgatgtacttcgtgacaaagtcgctgaagaagggatcactgctgcagcgattcttcgatggggatgatgagttccgcaatagcaggctgaagctgataccctctgtacccaaggtaggtagtccagctgttggtctcaggtggtggggtggggtgtgcccgcagggatcatggatagtgcggcagagtgtagggagcacgccgtgcttgctggggaaggcggtggattgcagctacgtgcgtggagccggatacctggaggtggacgtcgacattgggtcgtcggcggtggccaacggggtgctgggtttggtgtttggtgtggtgacgacgctggtggtggacatggcgttcctaatacaggccaacacctacgaggagctccccgagcaggtcatcggcgccgcccgtctcgctcacgtcgaacccgccgccgctatcgtcccccaggaccttactccccctcctcctgcccttgccgacgacgacaacgccgctgcttcttcctccgaggatgatcatttgtccaagaaaaccaactaa

SEQ ID NO: 4539 - DNA, 957 bp, Oryza sativa
atgggaggtgtccacggtgtttgctatggcatgaacggcgacaacctcccgtcgcagagcgaggtcgtgcagctgtacaagtccaatggcatcggtgctatgcgcatctacagcccggaycagmaggccctcgacgcgctycgcggcagcggcrtcgccgtcatcatcgacgtcggcggcakcrgcgcggtggccaacctcgccaacaacccctccgccgccgccgactgggtgcgtgacaacgtccaggcctactggccgaacgtcatcatccggtacatcgccgtcggcaacgagctcggccccggcgacatggggaccatcctcccggccatgcagaacgtgtacgacgcgctcgtgtccgccggcctctcgaacagcatcaaggtgtcgacggcggtgaggatggacgcgatcaccgactcgttccctccgtcgcacggcgtgttccgcccggacctgcagcagttcatggtgcccatcgcgcagttcctcgccaacaccatgtcgccgctgctcgccaacgtgtacccctactttgcctacagggacaacccgcgcgacatcccgctcaactacgccacgttccagccgggcaccacggtgagggacaacgacagcggcctcacctacaccaacctcttcagcgccatggtggacgccgtgtacgccgcgctggagaaggccggcgagcccggcgtccgcgtcgtcgtgtcggagagcgggtggccgtcggcgggagggttcgcggcgaacgtggagaacgcgaggaatcacaaccagggcgtgatcgacaacgtcaagaacgggacgccgaagcggcccgggcagctggagacgtacgtgttcgccatgttcaacgagaaccagaagcccggggatgagaccgagaggcattttgggctcttctaccctgacaagacgccggtctacccgattacgtttcctccgaactag

SEQ ID NO: 4540 - DNA, 957 bp, Oryza sativa
atgggaggtgtccacggtgtttgctacggcatgaacggcgacaacctcccgtcgcagagcgaggtcgtgcagctgtacaagtccaatggtatcggtgctatgcgcatctacagcccggaccagcaggccctcgacgcgcttcgcggcagcggcgtcgccgtcatcatcgacgtcggcggcagcagcgcggtggccaacctcgccaacaacccctccgccgccgccgactgggtgcgtgacaacgtccaggcctactggccgaacgtcatcatccggtacatcgccgtcggcaacgagctcggccccggcgacatggggaccatcctcccggccatgcagaacgtgtacgacgcgctcgtgtccgccggcctctcgaacagcatcaaggtgtcgacggcggtgaggatggacgtgatcaccgcctcgtcccctccgtcgcacggcgtgttccgcccggacctgcagcagttcatggtgcccatcgcgcagttcctcgccaacaccatgtcgccgctgctcgccaacgtgtacccctacttcgcctacagggacaacccgcgggacatcccgctcaactacgccacgttccagccgggcaccacggtgagggacaacgacagcggcctcacctacaccaacctcttcaacgccatggtggacgccgtgtacgccgcgctggagaaggccggcgcgcccggcgtccgcgtcgtcgtgtcggagagcgggtggccgtcggcgggagggttcgcggcgaacgtggagaacgcgaggaatcacaaccagggcgtgatcgacaacgtcaagaacgggacgccgaagcggcccgggcagctggagacgtacgtgttcgccatgttcaacgagaaccagaagcccggggatgagaccgagaggcattttgggctcttctaccctgacaagacgccggtctacccgattacgtttcctccgaactag

SEQ ID NO: 4541 - DNA, 2448 bp, Oryza sativa
atggattgcgagggggcsgcggcggcggagatctaccggctgccggaggagtgcgtggcgtacgccatctcgatgacgacgccgggcgacgcgtgccactcgtcggccgtgtcgccggcgttccgggccgccgccgactccgacgccgtctgggacagcttcctcccccccgaccacgccgccatcctcgcccgcgccgacgacggtatcgccgccgccggcgaatgcgcctccaagaaggacctcttcgcccgcctctgcggccgccccgtcctcctcgacgacgccaccatgagctttgggttggatcgacggagcggcgcgaaatgcgtgatgctgtcggcgagggcgctgagcatcgcgtggggagacgatccctcgcgctggagatggactcctggcctccccggatcaaggttccctgaggtggcggagctcttggacgtgtgctggctggagatcaccggcaagctgcagctctcgctcctctctccggcgacgacgtacgccgcctacctcgtctactccttcgccgactacaccaccggcctcgagtgcaacatcggcatgccgactcccatggccacggtgaccgtcgtctccggcgccggcgggacgacgagcaggccgccggcggcgccggcgaccacgacgacgacggagcagcacaagatctgcctgcagcacatgggggaggaggagacgatcatgcaccggcaggagctggtgatccgcctccgcaaggccttcggccggacggtgaggttcgatcccgacatggacatcaggtgcccgcggccgagggacggcggcggcggcggcggcgggtggagggaggtcgagctgggcgagttcgctgtgccggccgccggcggcaaggatggcgtggtggaggtgagcttcaaggaggagactgggcgttgtatgatgatcaatttgagaaattttgaattatattacatgatgatcaatttgggaaggagaggaggcgcggcggccgcctgcgagatcgcgcgcctgccggaggagctcctggtggcggcgctctccctcacctcgccgcgggacgcgtgcagcgccgccgcggtctgccgcgacttccgcgccgccgccgactccgacgccgtctggtcccgcttccttccccgcgacctcccgcgcctcgccgacggcgagctctccccgccgccgccgtccacgaaggggctcttcctccgcctctccgccgcgccccttctcctcccacacgaactcacgagcatgtggttggagagggagaagggcggcaagtgctacatgctctcggccagggcgctgcaaattacttggggcgatacaccgcgctactggcgctggatccctctcaccgactcaaggttagaaggtgctgaactcctatctgtttgctggttggaaatccatggcaagatactgagcaagatgctgtcacgaaacacaaattatgctgcataccttgtgtacaggatagctgatagatcctatgggctggatttcccattccaggaggcatcagtcagcatcggaggaagcacaacaacccgccaagttggcagcgttgaacggaggctcaagcgaagatgctcccatgcgcttgttcttgcagaggatatagagcaccctcagaaaaggtctgacggttggatggagttgaagctgggtgagttgtacaacgaggaaggtgacgatggtgaggtgtgcatcagcttcagggagacggaaggccactggaagaggggtcttgttgttcagggcattgagattagacctaagaaaactctaacctcgaactgtcttgcttgctcccatgagaaaccctcttactcactgttgacaacgtcgcggtcgtccaaggaggaaatattccttacagacgggctcacaagtatgtggttagacatggagactgggtttaagtgctacatgctgtcggccagggcgctgcagcttgcaaattcgacggacacctggcgcttgatctctctcactggtgcctccaggttgttcaactatgcccctactttgtttgcggagctcagtttcataaaatttacaaagctattatactctaaatctctaatgcttttgaaaggtattccatggttctcagaagttatcgagctcccagcttgttatgaattggtgatctgtggcaagataccttgcaagatgctgcctggaaacacaaattacgctgcttacatcgtgttcgtggtagttgacgattcattcgggctggctacgatcctggatgcatcagtcagcgttgggggaagcctatgcacaactcgccaagtttgcttcgacagcaccagcagcctgagcgctgatgagcattttgttgaagacaacattgaggtgcctcaggatgggagtgtgattctccctcaggagagggatgacggtttggatggagctggaggtgggtga

SEQ ID NO: 4542 - DNA, 2064 bp, Oryza sativa
atggccattttgaccgttctgccgctggtcttggtgatgctgctgcttccgttggctgcaattgcatccggcgacccaccatggcagcactactgcggaagcagcggcaactacacggccgggagcaaataccaggccaacctgcaggccctcgccgcgaccctcccgtcgaccgcgtcgtcttcctcccccgcactcttcgccaaggacgccgccggcggcggcaacgccgagcccgacagggtgttcgccctgaccctctgcagaggcgacaccgcctccgcaaacgcctcgtcgtcgtcgtgcgccgamtgcgcctcccgsgctttccgcgacgcgcaragcgtgtgcccctacagcaaggaggtggccgtctactacgacccctgcctcctctacttctccggcgacgacttcctctcctctccggccaacccggcccaggtgaggctctacgacgtcgatcgctccacccggcgtggcggcggcggcgccgacttcgtcaccctcgtgagggcgctcctgagctacacgatgcagtgggccgtgccgtacaattccacgggcggcggggccgccgccgtgaggtggtacaccacggtgcggatggacgtcgtcacgccgccgctgttctcgctgatgcagtgcacgccggacatgtccggcggcgactgccggcagtgcctgcaggacctcgtcggcaacaccaccttcaacggctcggtctccggcgtgcgcaacatcggcgcccgttgcggttacaggtacgacacgtacaagttctacggcggggagcccaagctgaagatcgggtcactgtcggagatcaactcaacggcgccatcgagcccaccgccgcctccgccggtgacggagacacgttccgggagaaagaaggtgttgacagttgctttgcttgtgccactgatagcactttgccctgtcgtcatattctgttttgcatggataaggagattaagaaaccacaaatcaatgttgcgaaaaaaggatacaatggccagagaagaagtattaaagctttggagactagaagaaagcgattcagagtttatgctatttgatttctctcagatagaagatgctactagcaacttctcggaagataagaaacttggagaaggaggttttggctccgtatacaagggccaattgcccaatgggcttgaggtagcagttaagcgacttgctgcacattcaagtcaaggcctggttgagttcaaaaatgaaattcaacttattgcaaagctacaacataccaatttagtaaaccttcgaggatgttgcattcaaggagaagagaacttactaatatatgaatacatgccaaacaagagtttagacttcttcatctttgatctgaaaagagcagcattgctcaactggaaaacacgcctgaacataatagaaggaataacacaagggcttttgtatctccacaaacactcccggttatgcatcatacatagagacttaaaagcaagcaatattctactagaccgtgacatgaatcctaaaatctctgactttgggttagctaagatatttgactcaaatgatgtccaaagaaatacaaaaagggtggtgggcacttatgggtatatggctcctgagtatgcatctgagggttgcttctcgctgaaatcggatgtctttagctttggagttctggttcttgagattattagtgggaaaagaaacgctgggtttcaccaatatggggacttcttcaacctccttggctatgcatggcagctatggaaggatggaagttggcatgaacttgtagatccatcattagtaagtgaaggtcaaatgatggaaataaagaaatgtatgaaagttgcacttttatgtgttcaagagaatgcggttgatcgtcccaccatgtccgcagttgttaagatgctttcaagcgagttgaaaattctacctgagcccaaacaaccagcattctttaatgtaagggtgaaacatggagagctgtctaatactgcacctagtagcataaacgatgtaaccataacaattgtgaacggcaggtaa

SEQ ID NO: 4543 - DNA, 1437 bp, Oryza sativa
atggctgagttgcggacgtcgtggaagtcgatgctctgctgcgtcggcggcggcggggtggccggcgttgaggacgacgtgccgccggagaggaggagggtcagagggggtggtcaccaccagcggctgctgtcgtcgtcgtcgtcggcgtcgtcggcgtcgagggtgtcgctgtcgagcctgagctcgacggggaccctcacgccggaggacctgtcgctgacgctgtcgggctcgaacctgtacgccttcacctacgccgagatgagggccgtcaccggcggcttctcccgcgccaactacctcggctccggcgggttcggccccgtgtacaagggccgcgccgacgacggcctccgccccggcctcgccgcgcaggccgtcgccgtcaagtacctcgacctcgactgcggcacgcagggccacagggagtggctggctgaggtgttcttccttggtcagttgaggcacaagaatctcgtcaagctgatcggctactgctacgaggacgaacaccggatgctggtgtacgagtacatgagcaacgggagcttggagaagcatctcttcaaaagtctcgatggcgccatgccatggatgaggaggatgcagaccgccgtcggcgcggcgaaggggctcgccttcctccacgacgccgacacgccggtcatctaccgtgacttcaaggcatccaacatcctcctcgactcggacttcaacaccaagctttccgactttgggcttgccaaggatgggccgcagggcgacgcgacccatgtcacgacgcgtgtcatggggacaaacgggtatgcagcgcccgagtacatcatgacagggcacctgaccgacaagagcgatgtgtatagttttggtgtggtactactggagctattatcgggtcggcactcggtggaccgctctcgtcgccatagggagcaaagtctggtggattggacaagaaagtacctcaagaagcccgaccagttgcaccgggtcgtcatggacccagccatggagggccaatactcctacaaaggggcccaagaggctgctttggtagcctacaagtgcttgagcccatcaccaaagtccaggcccagcatgagggaggtggtcaaggccctagagcccatattggacatgaatgactacctccaaattggtacatttgtgttcaccgtcgttgtggaagataacaagaaggacgatgtgaccaaaaccaagcaagtagatggtgagaacaaggttgacatgaggatcgaggcgacagtggaagagaagcaccagagtcaccatgatcgataccggcagaagaacccaaactctgcaatccatgctgacatcgtgctgcaacgcgacggctccatcggatcgtacaccacctcgctcaggcggcacagaaggacaccgagctatctcaaggagaggggtgcctag

SEQ ID NO: 4544 - DNA, 2745 bp, Oryza sativa
atggctgacctggaagcaggcatggttgctgctgccacagaccagggcaattcaacaaggtcacaagatgacgcagccacactgatcccgaacagtggcaatctgggctcgagcaacaggagcaccaagacggccaggttcaaggacgacgacgagctggtcgagatcaccctcgacgtgcagcgcgattcggtggcaatccaagaagtgagaggggtggatgagggtggctccgggcacggtaccgggttcgacggcctgccactggtgtcaccctcgtcgaagagcggaaagctgacgtcaaagctcaggcaggtgaccaatgggctcaagatgaagagctccagcaggaaggcgccatccccgcaggcgcagcagtctgcgaagagggtgaggaagaggctggacaggaccaagagcagcgccgccgtggcgctcaaaggattgcagtttgtgactgcaaaggttggcaatgacggctgggccgcggtggagaagcggttcaatcagctgcaggtggatggtgtgctgctccgttcaagatttgggaaatgcattggaatggatgggtccgacgagtttgcggtgcaaatgttcgattctctggcgaggaagagagggatagtgaagcaggtgctcactaaggacgagctcaaagatttctatgagcaattgactgatcaggggtttgacaatcgtcttcggacattctttgacatggttgacaagaacgctgatggaaggctcacagcagaagaggttaaggagattattgcccttagtgcatcagcaaacaaactttccaagatcaaggagcgagctgatgagtacacagcactcattatggaagagcttgaccctacaaacttgggatacatcgagatggaggacttggaagcactattgcttcagtcaccatctgaagctgctgcaagatcaacaacgacgcacagctccaaacttagcaaagctcttagcatgaagcttgcgtctaacaaagaaatgagcccagttcgtcattactggcagcagttcatgtacttccttgaagagaattggaagcgcagttgggttatgactctgtggatctcaatctgcattgcccttttcatttggaagttcattcagtaccgtaatcgagccgtattcggcatcatgggttattgtgtgaccactgcaaagggtgctgcagagaccctcaaattcaacatggctttggtcctacttcctgtctgcagaaatacaatcacatggattcggtcaaagacacaggttggagctgttgtacccttcaacgacaatataaactttcataaggtcatagccgcaggtgttgcagttggtgttgctttgcatgcaggtgctcatctgacatgtgattttccccggctgctccatgcgagtgatgcacaatatgaactaatgaagcccttctttggggagaagaggccaccaaattactggtggtttgtaaagggaactgaaggctggacaggtgtggtcatggtggtgctcatggcaatagcatttacattagcccaaccatggttccgacgtaacaagctcaaggactccaatcccctcaaaaaaatgactggcttcaatgccttctggtttacccaccacctgtttgtcattgtgtacactttgctctttgtccatggaacgtgcttgtatctaagcaggaaatggtacaagaagacgacatggatgtacctcgctgttcctgttgtcctgtatgtaagtgagcgtattcttcggttgtttaggagccatgatgcagttgggattcagaagtgtttcccggggaatgttttggctctttatatgtcgaagccacctggtttcagataccgtagtgggcagtacatcttcataaaatgcactgctgtgtctccatatgaatggtgctggtcttacacattttatggaaagaaaatgcatccattttccataacatcagcacctggagatgattatcttagtgttcatattcgcacaaggggtgattggacttcacggcttagaactgttttctctgaggcatgccgaccccccactgagggagaaagtggactacttagagctgacctttccaagggaataacggacgaaaaagcaagattcccaaaacttttggtcgatggaccgtatggtgcaccggcacaagattaccgtgaatacgatgtgctacttctcatcgggctgggcatcggagccacccctttgattagcattgtgaaggacgtgcttaaccacattcaaggtgagggatcagttggaaccacggagccggagagcagcagcaaggcgaagaagaaacctttcatgacgaagagagcctacttctactgggtgacgagagaggagggctcgtttgagtggttcagaggcgtcatgaacgaggtgtctgagaaggacaaggatggagtcattgagctccataaccactgctcaagcgtgtaccaggaaggcgatgctcgttctgctctcattgtcatgctccaagaacttcagcatgcgaagaagggcgtcgatatcttgtcgggaactagtgtgaagacccatttcgcacgacctaattggcgaagcgtcttcaagaaggttgcggtcagccatgagaaccagcgcgtcggtgtgttctactgtggtgagcctgtgctggttccccaactaaggcagttgtcagcagatttcacccacaagacaaacacaagatttgatttccacaaggagaacttctaa

SEQ ID NO: 4545 - DNA, 333 bp, Oryza sativa
atggacgcaaacagacgccaaagtggaatccagcaattgttggctgcagagcaagaggctcagcaaatagtaaatgctgctagggctgcaaaatcggcaaggcttaggcaagcaaaagaggaggctgagagggaaatagctgaataccgtgcccagatggaggctgaatttcagaggaaggttgcagagagtagcggtgactctggtgcaaatgtcaagcgtcttgagcaggagacagcggaaaaaatcgcacaactcaagcagcaggctgcaagtatctcccctgaagtgattcagatgcttctgaggcatgtcaccactgtgaagaactaa

SEQ ID NO: 4546 - DNA, 3978 bp, Oryza sativa
atgcctccttccgccgtgcccttctcccgtcgcccatccgacggtccacgcggcgcccgccccatcctggttgtgatcctcatcgccgccgccgccaccctactcgccctcgcctactcgtccttcccctccgcttcgcgggctaccaccgcatcatcttccatggctgtggcgccgacggatgacggctgctgcaggggcctcgaggggctcgagctgtggggtccggcggtcaagtggggctccgaccaccgcctgctctccgccgccgcgtgctgcgaatcctgcaaggccatgtgcaaggccaacgactgccgctgcgattcctgggtcttctgcggggacaagaaaagatgcggccaaaggttcggggagtgctggctgaagaaacaaaaggatgtgatggcaccctctgttgttgcaaagggagatgatgttatgtggacttctggtctagtcttcgcaaaaggagagggcattgtgggcctggaaacaaaccttgggaccattcgtattcaattgctgcctggctgtgcaccccattctgtggactatttcattgaggttctgggcttgcggaactgcgctggatgcagattttatcgagctgaaggccgtgggaatttgtgggatgcaaaaggcgaccacataaaaaatgctgcatatggtccaccgtatgccttgcttcaagggacactggaagtcgatggtttaccctttaaggagagagcgaaagaagcctgcccagcactgagaagaggatcggttgcatgggttggatcagggccggagttcttgatcagcttagcaaaccatggggagtggaaaggagcctacactgtgtttgggtctgttgtgcccgaggacatggcgattgctgaggaaatggcactgctgtcgaccagcacagacgtgtggagcaatgtaaccgtgaaggtgctgcgagaccctgtgtatttcaaggaaaagagcgccgccgccgccggcgtgatgcttcccttcgaggagcaggtggtggcggacctcctggaggaccccaacggcggcctggtggtggtttcgtgtggcctcccggtggcctccctggcgtccgccgtcctcctccagctcttccaccaatcccccgacgatggctgcttcctgatcctctccgcccccgagccggtcaaagctcaaatccggcggcgcctcctcctcaactcccagagccagcctcctctcttgcagctgcaggtccacgacgtggcccccgacctccccgcccaccaccgcgtcgccctctacgcctcccgcgccgcgctcttcctctccccccgcgccctcgtcgccgacttcctcacctcccgcctcctcccctcccgcgtccgcgccctcctcctcctctccgcccaccgctcctccgacacctcctccgacgccttcgtggctcgcctcctccgccaccaccacctcctccctgtttatgccttctccgatcgcccccatgccatggtctccggcttcgccaaggcggagcgcgctatgaagagcctctacattcgacgcctccacctttggccccgcttccaccttcttgctgccgctgacctcgagcgctccccgcccgaggtcatcgacgtccgcgtccccatgactcagcctatgaggggcatccaggccgctatcctcgatgccatggacgcctgcctcaaggagctcaggcggaccaacaaggtcgacgtcgaagacctcaccgtcgacaagggcctcttcaagtcttttgatgagatcgtcaggaggcagctcgaccccatctggcacacgctcggcaagaagaccaagcagctcgtcgccgacctcaggacgctacgcaagctgcttgattatcttgtcaggtacgatgctgtgacataccttaagtacctggacacactcagagtatctgaaggcgtccgatctgtttggatatttgctgactcaagccacaagatattcgacctttcaaaaaggcgtgtctaccaggttgtgagagcagacggtacaaaggttgcagcagacaacaagggcacaccaacaaagaagaggaaggtggcacgcgctagcagcaggaaaggaaaagaaactgaaaatgagggttccagtgataacaaggacaatactcagaaggttaatgcagagatgggcattgtagtggaggagattttagaggaagcacctaaatggaaggttttacgggaactattgcaggagatagcagaagaacaggcaaagggagatggtgacaatgtaaaccctgttcatgaagacggaattaacgagagtggcatagttttggtagcatgcaaagatgagcgctcatgcgtgcagctgcaagaatgcatatcaaaaggctcgcatcaggtcatgcgggccgagtgggagaagtacttgcttggcaaagctgaactgcatggattgcataggaagaacaagaaaacatctcagcaactaaaagggtttggtgttctggatggggaagttcctatgaggtctggtgagagtgcaggtcctgttagcattagcaaggttgaggctaatgccttacttgcggctgcctctgaaataagcactgtaactaaggaagcaaatcttgctgatgattcaaatgtcagctgcaagaagagatcattcggaaaagggaaagggaaagggaaatttaagaaaaccatggcaaagagagaagccagtaagttgagaaacagaaatactacagaacatactgatttggaagttgaaggtcaatcaggaaaaacagatgaacaggctgagactgatgcttgtaagttgtctgcagaagatgattctgcatcagctccagctgttgacaaagctgctaacaatttatctgcttttggagactctgtggataccgaaccactacctcctgtgcaattttacgccctagacagtgatcagcatgtacttgatgtatggaaaccttctgtaattatcgtttatcatccagatataacatttgttagagaaattgaagtatacaaggcagaaaatccatcgatgaagttaaaagtttactttcttttttatgaagattctgccgaggtacaaaaatttgagtccagcattcgccgggaaaatgaagcatttgaatctttgatcagacagaagtcgctgatgatgatacctgttgatcagaatggccgttgcattggaccaactcttgcaaatgaaccagaagctcttttatctcaaaattcactaacaagaaaggcaggtggtagaaagccactagagaaggagatgcaggttattgtggacatgagagaattcatgagcagtcttcctaatgtattgcaccagaaaggtattcgaataatacctgttaccttggaagtcggtgactatgttctttctcctttgatctgtgtcgaacgaaaaagtattgcggacttgttccaaagctttgcttctggtcgtctctacaatcagattgaaaccatggttcggtattacaagatcccagtgcttctgatagaattctcacaagacaagagcttttcctttcagtctgcaagtgaaattggggatgatgtatctccgacaaatataatctcaaaactttcattactagtcctgcattttcctcggcttcgcatagtctggtctcgcagcttgcatgccacggcagatatattcctatcactcaaaacaaaccaggatgaacctgatgagagcaaggcaatgagagttggtgtgccctctgaggacggagttgtggagaatgacgtgagggctgaaaattacaatacgtccgcgattgaattcttgaggaggcttcctggtgtgacagattcaaactatagaagaataatggaggaatgcaatagcttagcagagctggccctgcttccggtagagcggctgtctgagttgatgggtactcagaaaggggcacgcatgctcaaggaatttctcgatgccaagtgtccaactatgctctag

SEQ ID NO: 4547 - DNA, 939 bp, Oryza sativa
atgggggaggagaaagtggcgccgaagtctgacgctgccccggcggtggagttgctggggttcgtgatgagcgcggaggaggccgagcgcgccgcggcggcgcccggggtggagacggtggaggacctgctgccgctgctcgtcccttccgcgatgcggcgcgcgcgtgccccgatctcgcggttccccgtgggcgccgtgggcctcggcgcragcggccgcgtctacgccggcgtaaacctcgagttccggggcctcccgctgtcccattccgtccacgccgagcagttccttgtcgtcaacgcggccgccgcggggaattcggagctgcgcgccgtcgccgtctcccacatgccctgcggccaatgccgccagttcctccaggagatccgcggcgccggtgggatccgaatcattgtcacctccgacgccgaggacggctgcgcccccgagtggcgcacggtggcgtccctcctcccgggccccttcgggccccatgatctcctccccaagcacgtccccctcgtcctcgaaccgcacgacaaccctctcggcgaacccgccgccgtcgccaatggcttcgcccacggtgacctagaggcgcgcctgagggaggcagcggaggcggccgcgcgggcggcgcatgcgccgtatagcgagtgcccgtcgggattcgccgtggcggacggcgaagggaaggtgtacgccggaggatgcctggagtccgcggcgtataatccgacactaggccccgtgcaggcggccatcatagggatggtggccgccgggggcggcgccgccggagacgtggtggcggcggcgctcgtggagaaggaagcggggttggtgtcgcaggaagcgacggccaggatcttcctggccgcggtggccccacaggccaccttccacgtgtacaattatacaccgtccgatgcatga

SEQ ID NO: 4548 - DNA, 1314 bp, Oryza sativa
atggcaaagcattccaccacaatgagctgcctcctattcttcgtcttgctctgtttgggctctcacttagcccaggctcaggttctctttcagggattcaactgggagtcatggaagaagcagggtgggtggtacaacttcctccatagccacgtcgacgacatcgccgcgaccggagtcacacacgtctggctcccgccgccgtcgcactccgtcgcgccacagggatacatgccgggacggctctacgacctggacgcgtccaagtacgggacgggggcagagctcaggtcgctgatcgccgccttccacagcaagagcatcaagtgcgtcgccgacatcgtcatcaaccaccggtgcgcggattacaaggatagccgtggcatctactgcatcttcgagggtggcacgccggacagccgcctcgactggggtcccgacatgatctgcagcgacgacacgcagtactccaacggccgcggtcaccgcgatactggcgcagacttcggcgcggcgcccgacatcgaccacctcaacacgcgtgtgcagacagagctctccgactggctcaactggctcaagtccgacgtcggcttcgacggctggcgcctcgacttcgccaagggatactcggcgaccgtcgccaagacgtacgtggacaacaccgacccgtccttcgtcgtcgccgagatatggagcaacatgcgttacgacggcaacggtgagccgtcgtggaaccaggacggtgaccggcaggagttggtgaactgggcgcaggccgtcggtggccctgcatcggcgttcgacttcacgaccaagggcgagctgcaggcagcggtgcaaggtgagctgtggcggatgaaggatggcaacggcaaggcgccggggatgattggctggctgccggagaaggctgtcaccttcatcgacaatcatgacactggctccacacagaactcatggccgttcccctccgacaaggtcatgcagggctacgcctacatcctcacacaccctggagtaccctgcattttctacgaccatgtgtttgactggaacttgaagcaggagatcagcacattggccgcggtgaggtcaagaaatggaattcatcctgggagcaagctgaacatccttgctgctgacggagatgtctacgtcgccatgatcgatgacaaggtgatcacaaagattgggactcggtatgatgtgggcaacttgatcccgtcagacttccatgtcgttgctcacggcaacaattactgcgtctgggaaaagagtggtcttagagttccagcagggcggcgccactag

SEQ ID NO: 4549 - DNA, 1170 bp, Oryza sativa
atggacggcggcgtaggcgaggaagggaagcagcagccgcacctggtgctggcgcacaagctgttcctgctctcgcacccggacgtggacgacctcgccaaggtcgacctccgcgccgatgtcctcgccgcagtcaaatccgatgatatggcgtctctgtacgagtcgctgggggccggcggcgtgctggagacggacgctgcgctgctcgcggagatgcgcggcaggatcgaggaggagatccggaagcttgacgagaagatcgctgatgctgaagagaatttgggtgagagtgaagtgcgtgaagcccatctagccaaatcgttgtatttcataagggttggagagaaggagaaggcactagaacagcttaaagttactgaaggaaaaactgtagctgttgggcaaaagatggaccttgttttccacactttacagattgggtttttctatatggattttgatctcatctctaagtctattgacaaagccaaaaaattgtttgaggagggtggtgattgggagaggaagaacagattgaaagtgtacgagggcttatactgcatggccactagaaacttcaagaaagctgcaagcttatttttggattcaatttcaacattcacaacctatgagttgttcccctatgatacattcatattctacacagttcttacaagtgttatctcattggatcgtgtatccctaaaggcaaaggttgtagatgcacctgagatcctggctgtaattggcaaagtacctcacctctctgagtttctcaactccctctacaattgccagtacaagtcattttttgccgcattctctggcttgacggagcagatcaagttagaccgttacctgcagcctcatttccgttactacatgcgtgaagtccgtactgttgtctattcacaattcctcgagtcctacaagagtgtgacgatggaagcaatggcttctgcatttggtgtgaccgttgatttcatagacctggaattgtcacgcttcattgctgctggaaagctccactgcaagatcgataaggttgcttgcgtcctggagacgaaccggcctgatgccagaaatgctttctaccaggcaaccatcaagcaaggggacttcctgctgaaccgcatccagaagctatcacgagtcattgacctgtag

SEQ ID NO: 4550 - DNA, 1776 bp, Oryza sativa
atgggatccggcggtgccgccgccgccgccgccgccgtgccactacggaaagagaagcaacgctcagccgccggccggtggccggaggtcgaggacggcgtggtgccagcgacggccaagaggcacgtgcgcagggcttggagatgtggtgtcaacgtcgtgctcgccgccttcgtcatggtcgtgccgccaatggtcatcctcctcgacgcccgcggcgccggcgcgccggccgtctggattagctccgtcaacgcctttcgccgaggcgatggctcgatcctgcaatggccggcggcggcggcggcgcgcgacaagcttctcggcggcctcctggccgacggattggacgacggatcatgccacagcaggtaccaatccgccatgtaccgtcgaaacgccggcagggagccctcgccgcacctcgtgtccaagctgcggcggcacgaggagctgcagcggcggtgcggcccgggcaccgccgcgtacagcgacgccgtggagaggctgaggtcgggcaagagcggcggcatcgtgtcgccgtcaccggaggcggagtgcaggtacctggtctccatctcctaccgcggcctcggcaaccggatcctcgccgccgcgtcggcgttcctgtacgcgatgctcaccgaccgcgtgctcctcgtcgaccccagcaacgagatggacgagctgttctgcgagcccttccccggcgcgacgtggctgctgccgccggggttcccgctggcgaactacaccagcttcagcgtcgaaaccgccgagagctacggcaacatggtgaagaacaaggtgatcacgaccgacgccggcgatgctgctccgacgacggcgcagctgccggcgttcgcgtacatccacctcgaccacacgtccaccgtggaagacaagttcttcttctgcgacgaggaccagagggcgatccggaacatcccgtggctggtgatgaggacggacagctacatcgtgccgggtctgttcctcgtcaccggattccaggacgagctcgactcgctcttcccggagacggacgccgtgttccaccacctcggccgctacctgttccacccgaccaaccacgtctggggcctcgtcacgcgctactacgacgcctacctcgcgacggcgcagcagcgagtcggcatccaggtgcgcgtcttcggcgcccagccggagtcgccgaagctgcttgatcagatcaccacgtgcacgcagaaggagaagctgctcccggaggtgatcgccgccggagagccccccgtcgtcgacgtcgcgccggcgaactccaagtccaaagccgtgctcgtcacctcgctcaagtcgtggtactacgagaagatgaagagcatgtactgggagcacgcgacggccaccggcgaggcggtgagcgtgcaccagccgagccacgaggagtaccagcggttcggtgccaggtcgcacgacggcaaggcgtgggcggagatatacctgctcagcctctccgacgcgctggtgaccagcgggtggtcgacgttcgggtacgtggcgcaggggctcgccgggctgacgccgtgggtgatgcacaagccggcgaacgacaccgcggccgcggcgggcgacgacccgccgtgccggcgggacgtgtccatggagccgtgcttccacgcgccgccgttctacgactgcaggctgaagcgtggcgcggacaccgggaagatggtgccgcacgtccggcactgcgacgacgtgcagtgggggttgaagctggttcgtcgggggtga

SEQ ID NO: 4551 - DNA, 2175 bp, Oryza sativa
atggcggagaggaagaggaggagaagggggctgcacatctcgcgttacgttacctgcggcccatatagattgggctggaaagggaatgttgcttacgcgaagtatatctttggagtgaataaaggaaactcctatttacatgcttctccttacggatgttaccgtggtacttatattaccgtaccccgcgataagcccgataaccgtggtaaccatgcggttaccggcggtaaggcctttttggtccttttggagcaggtcaatggggaacagctaatcctggaagtgggtgctaatctcagtatctcgtacacttctactggtaaaccacctgagcaggtgagctgctgctgcagtgcgatcatagcaaccttgccgacggagctggtgtcttcaccaatgcgacggcacgaagccacaatcggcggcgacggcgctgcggcgccatggaaggagcagcagcttgcttcacaccggtggccagaggcccaagagggcgcgccggcgttcccaccgtcgacgatgagaaggctcgtttacagtgcagccaatgctgcgctcgtcgtcttcatcatgaccgtgccgccaatggttgtcctgtacggcgcgcgctccagctcgccggccgtctggatcagctctgccaacgtcggcggccgaggatcatcaagcgacgagtccatcctgctcctacaccggccggcggcggcgcacgacaagcttctcggcggcctgttggctgacggattcgacgaggggtcatgccacagcaggtaccaatccgccatgtaccgtcgaaacaacgccggcaaggagccctcgccgcacctcgtgtccaggctgcggcggcacgaggagctgcagcggcggtgcggcccgggcaccgccgcgtacagcaacgccgtggagagcctgaggtcgggcaagagcggcggcatcgggtcgccgccgcagacggagtgcaggtacctggtgtccatatcctaccgcggcctcggcaaccggatgctcgccgccgcgtcggcgttcctgtacgcgatgctcaccgaccgcgtgctcctcgtcgaccccagcaacgagatgggcgagctcttctgcgagcccttccccggcacgacgtggctgctgccgccgggcttcccgctgacgaacttcaccagcttcagcgtcgacaccaccgagagctacgggaacatgctgaagaacaaggtgatcacgaccgacgccgccgccggtgacgtgccgacgccacaccaacagctgccggcgttcgcctacatccacctcgaccacgactacaccttccacgacaagttcttcttctgcgacgacgaccagagcgtgctccggaacgtcccgtggcttgtgatgaggacggacagctacatcgtgccggggctgttcctcgtcaccggattccaggcggagctcgactcgctcttcccggagacggacgccgtgttccaccacctcgcacggtacctgttccacccgaacaaccacatctggggtctcgtcacgcgctactacgacgcctacctcgcgacggcgcggcagcgagtcggcgtccaggtgcgcgtcttcggcgcgcggcaggagtcgcccaaggtcctggaacagatcaccgcgtgcgcgcacatggagaatctgctcccggacgtgatcaccaccggagaaccggcggcgacgacgcgccgccgcctgaagcccaaagccgtgctcgtcacctccctcacgtcgtggtactacgagaagctcaagggcatgtactgggagcgcgcgacggccaccggcgaggcggtgggcgtgcaccagccgagccacgaggagtaccagcggttcggctccgggtcgcacgacgccaaggcgtgcgccgagatatacctgctcagcctctccgacgcgctggtgaccagcgggtggtcgacgttcgggtacgtggcgcaggggctcgccgggctgacgccgcgggtgatgtacaagccggcgaacgagtcgtccgccgtgcccgacccgccgtgccgccgggacgtgtccatggagccgtgcttcctcacgccgccgtacaacaactgcaggatgaagcgaagcgcgcactccgggaaggttgtggcgcacgtcaagaactgccacgacgtgccatgggggctgaagctcgttcgtcgtgtcgagtag

SEQ ID NO: 4552 - DNA, 957 bp, Oryza sativa
atgggcggcggcggcggcgcggaggaggagctgacggcgcaggagacggcgctctacgaccgccagatccgcgtctggggcgttkacgcccagaagaggctaagtaaagctcatgtgctcgtgtgcggcatgaatggtactactactgagttctgcaagaatattgttctagcaggagttggcagtttatccttgatggatgatcatttagtcacagaggatgatctcaatgcaaatttcttaattcctcatgatgagagcatatatggtggtagatcacgagctgaggtttgctgtgagtccctgaaagatttcaatccaatggtccgagttgcagtcgaaaagggtgatccatcattaattgatggagaattccttgacaagtttgacataattgtagttagctgtgcgcctattaaaacaaagcctgatgaaggtgccattaaggatgagaattgcaaaggagcacgtacttttttttgtagtttgggccctggatacttttttgaagggaaggttggaggtgaacccaaaccaaaggagttggcatatccaagtctccaggaagctatctccgtaccctggaagaatttaccaagaaaaacaactaaactgtactttgccatgagagtactggagaattatgagtcatctgaaggccgcaatgcttgtgaggcatcactttctgatcgacctgcagttttggctctgaggaaggacatgtgtgataaaatgtctttaagtgagtctcaaattcctactgctctcctggaacggcttttagcagctggaaagaagcaacatcctcctgtatgtgcaatccttggcggcattcttggtcaggaggtgattaagtcaatatctggtaagggtgatccgatcaagaatttcttctattacgacgccgctgatggtaaagggatcgctgaagacattcctcccctttcttcagactga

SEQ ID NO: 4553 - DNA, 1563 bp, Oryza sativa
atgtcggtgcgaaggccacgggtagaggaggaggtcgacgacgatgatcaggatgggagcagcggttcggccgaggaacatcagcagcgacgccatggcgccaggcgtctccgccctgtgctctccttcagatcggtggtgagaagggcagtggcagcggaaacaattcaacaaattgttcttaacctggaaccggtcattcgtagggtggtgcgtgaggaaattcggaacatatttccccagtatggtcatgacttaccacatagatctcttccattacaaatccaagatgtaggggtctcacctccattgaagcttgtcttcaccaagcagctcaagctaccaatcttcaccaacaacaagctcgtcgacatcgacaacaatccaatagaaatccagcttgttgacacaaggaccaacctcattgtaacaccatcaaacactcacctaggatattcagcaataaaactggaagtacttgtcctagatggcgatttccgatacgatgaagacggcgctaggtggactgatgatcaattcagcaccgcgatcgtcaaggctcgggaagggaggaggccattgctagtgggtacagtcagtgtgaccatgagcaaccatggagttgcagtgattgatgatgtatcattcactgacaattcaagctggatcaggagcaggaagttcagaatcggtgtgcgcgttgtcatgctgacagacagttgcggattgaggatccaagaggcagtgagtgagagcttcacagtcaaagatcatcgaggcgaattgtacaagaagcatttccctcctttgctgacggacaacgtctggaggctgaggaacataggcaaagatgggccaatcgacaagagattggaggccgaggggatcaagaacgtccaggacttcttgaagcttaacaccatgaatcccaacaagcttaaaagtcttgttggcatgtcagatcggcagtggagcgcgacattgaagcaagcaaaatcatgtgacatgggagggaaatgctatgttttcaaatctgaaggttgtgagattaaattcaaccccgtaggagagatcttagcagtgagattcggcggtcggatgtgctctttgcatgaactgcttccacaccaaatggtccaaatcaagcaattggtcagccaagcataccaacagtgggatcagatggaggaagtgcagaatgagatggcacttgttgataaaagcttaattccatttcatgatgaaaagcccatgatttcttcaggcatgccaagctatatcaatcaagcagagggattgatggagaattcaggatgggagccaagtgagatgagccaggaaagcatgatcagctctgcatctcagaatgccatgtatgttgacagcttgggaactgcaacaacctcaactgctgaaatggtgaccaataacatcagcactctagaacctgcatcaactgttccagattctgctttgtacagctggaattcgggcatggctgctgatgatcacttcagctggcagaacaacacaaaccttgtaccctgggatcatgctaattga

SEQ ID NO: 4554 - DNA, 852 bp, Oryza sativa
atgcactactttacaacagaggatctgtacaggagcatactgaaagatgcaggaacctcagctgataacaagttctcttctattgctttaaccaacttcattgctggtgctgcggctggatgtactactctggtcctcatttatccacttgatattgctcatacccgtcttgcagctgatattggccggaccgatactcgccagttcagaggcatttgccacttcgttcaaaccatctacaataaaaacggcatccggggtatctacagaggattgccagcatcactacaagggatggtcgttcaccggggcttatactttggaggctttgacaccgccaaggatgtgatggtaccactagactcgcccctgtggcagcgctgggtgacagcacaggcagtcacttccatggcggggctcatctcgtacccgctggataccgtgcgaaggaggatgatgatgcaatcagggatggatgtgcagatgtacagcagcacccttgattgctggaggaagatctacaaggtggaggggatcaagtcgttctaccgcggagcactttctaacatgtttaggagcactggcgctgccgccatacttgttttgtatgatgaagttaagaagtttatggacaggggttctccacagatttttggattcagtatggagattagaccgccaaagcctacacgtgtgactcaaaagttcactcttcagagttcaaacggtagtttcacggcgaatttcggtcaatttctgcgtggcagtcgaacaaaattgtcttgtcaagaaatcgcttatgagcacgcagacaaggcacttgcgagattactttactcaagcctcggttga

SEQ ID NO: 4555 - DNA, 2060 bp, Oryza sativa
atggcgcggccgcggcgcgcgtcgacgatgcagctggggctgttcctcgccgcgcttctcctcctcacgccgtcgcctgccggctctgtggcggcggccaagggtggcggtgccaagagcggcggcggcggcaccgtgatcgggatcgacctcggcacgacgtactcgtgcgtcggcgtctaccggaacgrccrtgtcgagatcatcgccaacgaccaggggaaccggatcacgccctcgtgggtcgccttcaccgacggcggcgagcggctcatcggcgaggcagccaagaaccaggcggcggccaacccggagcggaccatctacgacgccaagcggctcatcggccggcagttctccgacgccgaggtgcagcgcgacatgaagctgctgccgttcgccgtcgtcgaccggaacggcaagccgcacgtgcgcgtcgaggtgaaggacggcgacgtgcgcgtgttcagcccggaggaggtgagcgccatggtgctcacccggatgaaggagacggccgaggcctacctcggcgagaaggtcacgcgcgccgtcgtcaccgtcccggcctacttcaacgacgcgcagcggcaggccaccaaggacgccggcgtcatcgccgggctcaccgtcgaccgcatcatcaacgagccgaccgccgccgccatcgcctacggcatcgacaagaagggcgcggagaagaacgtcctcgtcttcgacctcggcggcggcacgttcgacgtcagcatcctcgccatcgacaacggcgtgttcgaggtccttgccaccaacggcgacacccacctcggcggcgaggacttcgaccaacgcctcatggaccacttcgtcaaggtcatccgccggaagcacgggcgcgacatcgccggcgacgcgcgcgcgctgggcaagctccgccgcgagtgcgagcgcgccaagcgcgcgctcagcaaccagcaccaggtgcgcgtcgagatcgagtccctgttcgacggcgtcgacttctcggagccgctctcccgggcgcggttcgaggagctcaacggcgacctcttcaagaagacgatggtgccggtgaggaaggccatggcggacgccgggctgggcaagggcgacatcgacgagatcgtcctcgtcggcggcagcaccaggatccccaaggtgcagcagctgctcaaggactacttcggtggcaaggagcccaaccgcggcgtcaaccccgacgaggccgtggcgtacggcgccgccgtgcaggccagcatcatcagcggccacgtcgacgagaacacggagagcatgatcctcctcgacgtcgcgccgctcaccctcggcctggagacggccggcggcgtgatgaccaagctgatcccgcgcaacacggtggtgccgacgaagaagacgcaggtgttcaccacgtacaaggacaggcagacgacggtgaccatccaggtgttcgagggcgagcggagcatgacgagggacaaccggctgctcggcaagttcgacctcaccggcatcgcgccggcgccgaggggggcgccgcagatcgcggtgacgttcgaggtggacgccaacggcatcctcagcgtgctggccgccgacaaggccaccggcaggtcggagaagatcaccatctccggcgacgaccgcaagatcagccaggaggagatcgaccggatggtgcgcgaggcggaggagttcgccgacgaggaccgccggcacagggagcaggtggacgcccggaacagcctggaggcgtacgtctacaacgtcaagagcacgctcggcggcaagatggcggacgccatggagggggaggagaaggagaaggtggaggaggcggtgaagggaggcgcacgagtggctggacggcaacccggacgccggcaaggaggagtacgaggagaagctgcgggagctggaggacgttgtgcaaccccgtcatgtcggcggtgtaccagaggtccggcggcggcggcggcgcaccggaagatggcaacgtcgacgacgaggatgaccacgatgagctttagtttagtccggctggctggctgctcaagcta

SEQ ID NO: 4556 - DNA, 864 bp, Oryza sativa
atgggtacgcggtkgarttgcagcgtgacgatgcgcggcacggcggagcggctggccagggcgggctacgccgtccacggcatcgactacgagggccacggccactccgacggcctccagggctacgtccccgacctcgacgccctcgtccgcgactgcgactccttcttctccaccgccaccgcctccttcccccgccgcagattcctcctcggcgagtccatgggcggcgccgtcgcccttcttctccaccgcttgcgccccgacttctggaccggcgccattctcgtcgcccccatgtgcaagatcgcggaggagatgcggccgcacccgatggtggtgagcgtgctgaaggtgatgacaagcatcataccgacgtggcgggtggtgccgacgaatgacgtgatcgacctggcatacaggatgcaggggaagcgagacgagatccgagggaacccactgtgctacaagggcaggccccgcctcaagaccgcctacgagctgctccgcgtcagcatcctcatcgagtccaccatcctcccccacgtctccctccccttcctcatcctccacggcgccgccgaccgggtcaccgacccctccgtcagcgacctcctctaccgctccgcctccaccaccgacaagaccttccacctctacaccggcatgtggcacgccctcacctccggcgaactccctcacaacatcgatgccgtcttccgcgacatcatcgactggctccaccacaggacatcccccacctccgcttcacatgtgcaggaccacgacttaagtacgtctttcgaggcggagcgcaaggccaagcacgacgacaccatccattgcggcaagcaaacatcatag

SEQ ID NO: 4557 - DNA, 1125 bp, Oryza sativa
atggcgatgtcgtgctcttcctcctcctcctccgtgcgcctccgattgaatctagcgccctcccgccgccgaatcgccgctcccgccaacctccaggtgctccggcgcgtgggagtggcggcggcttcaatccggcttcgtgccgcccgcgccacgggaggtgatgcacggcaaccgttcgaccatgtgcctcgcggcgttgaggaggttggtgagatggaggaggacgaggagcggcggaggcggaggggtctcaagatcgccgtcgtggggtttgggaactatgggcagttcctgaccaggacgctggtgcggcaggggcacaccgtcctggcgcactcgcgctcagactactccgccgtggcggccgagctcggcgcgacgtacttcaccgacgcgcacgatctcgtcgagtgccacccggatgtggtgctcctcgtcacctccatcctctccgccgaggccgtcctccgctcgctccccgtccaccgcctccgccgcgacaccctcttcgccgacgtgctctccgtcaaggagttcccccaggaacctcctcctcggcacgctcccggaggagttcgacatcatctgcacccaccctatgttcggcccggagtccgcgggcgacgggtccgcgtcggcgactgcccggcgcgccgcgcccgcgccgaggccttcctcgacatcttcgcgcgcgagggctgccgcatggtggagatgagctgcgccgagcacgacgcgcacgccgccgagacgcagttcctcacccacaccgtcggacgaacactcgccatgctggagctccaaacaactccgatcaacaccaaggggtacgagacgctgctccgcctcgtcgacaacacctgcagcgacagcttcgacctctacaatggcctcttcatgtacaacaacaactccaccgagctcctcaaccgcctcgaatgggccatggattccgtcaagaagaggctcttcgacggcctccacgacgtgctccggcggcagctcttcgagggctcgccgccgttggactccgtctccgccgccgcagccgggtcgccgccggatgacgcaccaatcgatggcgatcttgacagcgacaacgaggaggagcaatcggagtaa

SEQ ID NO: 4558 - DNA, 1065 bp, Oryza sativa
atgctgtcgtcttccacctccacccactgcctccaccagccgccgccgccgccggcgagccaccaattccggtcggccgccgcgttccgccgccctccgtctccggcggcggcgcccctccgcgcgcggccgcagcgcgggggcggcaaccacccatccgcgccatcgacgcagcccagccgttcgactacgagtcccgcgcggcggggctccttggaggamcggcagcggctcaagatcgccatcgtcgggttcggcaaattcggccagttcctcgcccggacctttgcgcggcagggccamacgctgctcgcccaatcccgstccgactactcctccctcgccgcatccgtcggcgcgtcctacttccaggacccgcacgacctctgcgagtgccacccggatgtggtgctcctcgccacctccatcctctccgccgaggccgtcctccgctcgctccccgtccaccgcctccgccgcaacaccctcttcgtcgacgtgctctccgtcaaggagttccccaggaacctcctcctcggctcgctcccgccggacttcgacgtcatctgcacccaccccatgttcggcccggagtcggcgcgcgacggctgggacggcctccccttcgtgttcgacaaggtccgcgtcggcgactgccccgcgcgccgcgcccgcgccgaggccttcctcaacatcttcgagcgggaggggtgccgcatggtggagatgacctgcgccgagcacgacgcgcacgccgccgagacgcagttcctcacccacaccgtcggccggatgctcgccatgctggagctccggtccacgccgatcaacaccaaggggtacgagacgctgctccgcctcgtcgacaacacctgcagcgacagcttcgacctctacaatggcctcttcatgtacaacaagaactccaccgagctgctcaatcgcctcgaatgggccatggattccgtcaagaagaagctcttcgatggcctccacgacgtgctccggaagcagctcttcgagggctcgccgcacgctcccaacaacacccccgtcaggaagtag

SEQ ID NO: 4559 - DNA, 1686 bp, Oryza sativa
atggggggagggggcacgctcgtcgacggattccgccgcctcttccaccgccgcacggcttccggctccaaccagtcgtccaacgccggcgaggaggccgcctcctccgacctcgaggtcsccgacgacccggatctcgtcgccctccgctccatccgcatccgcgtgcccaagcgcaagatgcctctccccgtcgagagccacaagaagaacacagtggaaatggagttcttcactgagtatggagaagcaagccagtaccagatccaggaagtcattggcaaaggaagttatggagtagttgctgctgcagtagatacccgcacgggtgagcgggttgcaatcaagaagatcaatgatgtgtttgagcatgtatcagacgctacgcgcatattgcgtgagatcaagctccttcgtctgctccgtcacccagacatagttgagatcaaacacattatgcttcccccttctcgaagggagttccaagatatttatgttgtttttgagctcatggaatcagatctccatcaagtcatcagagcgaacgatgacctcaccccggagcactaccagtttttcctgtaccaacttctccgtgctctcaagtacatccatgcagctaatgtatttcatcgcgatctaaagcccaagaatatactggcaaactcagactgcaaattgaaaatatgtgatttcggacttgcccgagcatcattcaatgatgccccttcagcaatattttggacggattatgttgcaacgaggtggtaccgagcacctgaattatgtggctcatttttctccaaatacactcctgcaattgatatttggagtattgggtgcatatttgctgaacttctcactgggagaccactatttcctgggaagaatgttgtgcaccaattagatattataacagatcttcttggaactccatcatcagaaaccttatccaggattcgaaatgagaaggccaggagatacttgagcaccatgsggaaaaaacatgctgtccccttctctcagaagttccgcaatactgaccccttggctcttcgtctgctagagcgtttactggcatttgatcctaaagatcggtcttcagctgaagaagctttggctgatccgtacttcgcaagtcttgctaatgtggaacgtgagccctcaagacatccaatctcaaaacttgagtttgaattcgagagacggaagctgacaaaagatgatgttagagaattaatttatcgagagattttggagtatcacccacagatgctgcaagagtatatgaaaggtggagagcagattagcttcctctatccaagtggggttgatcgcttcaaacgacagtttgcacaccttgaggagaactacagcaaaggagaaagaggttctccactgcagaggaagcatgcttctttaccgagggagagagtaggtgtatcaaaggatggttataaccaacaaaacaccaatgaccaagagaggagtgcagattccgttgcccgcactacagtwagccctccaatgtcccaagatgcacaacaacatggatctgctggccaaaatggtgtgacatccacagacttgagttcgaggagctatctgaagagtgcaagcattagtgcttccaagtgtgtcgctgtcaaggrcaatwaagaaccagaggacccctgcatggattaa

SEQ ID NO: 4560 - DNA, 1020 bp, Oryza sativa
atggaggaaggaggcaggagagggatcccttctctgctaaattcatcgtcatcagatgaacatatcgccactgatatcactcagcttgtaggatggacgccactgatagagctgaaccggatcgtccgaaaagacggggtaaatgcccggattgttggcaaattggagtcataccaacccctctgctctgtcaaggatcgcagtgctctgagaatgattgaggatgcagaggagaaaggtctgatctcaccaggcgttacgacgctagtcgagccgacaagtggtaatcttggaataggtgtggcatacaatgctctgctcaaaggttacaggttcgttgcagtcatgcctgctgagtattcacttgataagcaaatgttgttgacgtatctaggggccgaggttattttaactgatcctacacttggttttcagggacaattagacaaagttgaacagatcaagaatgatatgcctaacgtacatcatcttgatcagtttaaaaatgcagcaaatcctgaagcacactttgtatggacagggcctgagatttggaaggatacggcaggcaaagtagatatctttgtggctggttctggcacaggaggaacaatttcaggtgtagggaaatatttgaagatgaaaaacccagcagttaaagtaatttgtgttgagcctgcggaaagccctgtaatttcaggtggtaagccttcgcggcataaaattcagggaatgggtccaggctttgtaccaaaaaacctggatatctcaatcgtcgatgagatcatcacagtaactgcacaagatgcaatggctaatgcaaagaggctggcaagagaagagggtttacttgtgggcatatcatccggagctaatttggcagcttgtctgaaggtggcatcgaggaaagaatatgagggaaagatgattgtaaccattttccctagtggtggtgaaagatacatgaactctgacctctttgcacaagcaagggaggagtgcagcgccatgaccttttga

SEQ ID NO: 4561 - DNA, 1443 bp, Oryza sativa
atggggtggtggccgccggctgcgtggcggcggtggggggtggtggtcgtcgtcgtggcggcgttgatggcggtgtcggcgacggcggcggtggaggaggagttgggagggagggagagtggagtcgtggcagcggcggcgcaggggcggtggccgaggcaccggcacgcgtacgcggcgatgatgtacatggggacgccgagggactacgagttctacgtcgccgtgcgcgtcatgatgcgctccctcgccaggatcggcgccgacgccgaccgcgtcctcatcgcctccgccgacgtccccgccgactgggtccgcgcaatgagggaagaggatggcatgagagtggtgctggtggagaatatgaagaatccttatgagagcaaccttggagggatcaacaggaggtttaagctgacgctgaacaagctctatgcgtggaccctggttgactatgagcgcgtcgtcatgatcgactccgataacatcttccttcagaagaccgatgagctcttccagtgtggacagttctgtgccgttttcatcaacccttgctacttccacactggtcttttcgtgctccagccttctatggatgtcttcaaaggcatgcttcatgacctagagattggccgtgccaactctgatggtgctgaccaagggtttcttgtcggctgctacccagacttgcttgatagaccaatgttccaccctcctgagaatggcagcaagctcaacgggacatatcgccttcctcttggttatcagatggatgcatcctactactatctcaagttgcattggcatgtcccttgtgggcccaacagcgttatcacattccccagcgccccttggtttaaaccttggtattggtggtcatggccaatcttgccactgggcctttcctggcacaagcaacggtgggatgatcttgggtatgccgctgaaatgccagtgatcctgatggagatattgatgtacgcagtcattataaccattaccaggttggcaaagcctgggatgacaaaactgtgctataaccggcggcccgagaagcaaaatgccatggtgcaggggctgatcaagatgtctgcaatcgtggccatgctaattgcatatgccatcccgttctttataatcccacgcacggttcacccattcatgggctggtccatgtacctgtttggtgcattggcattgggagtgctcgtgagcaatgccttcttgcttccattgcttgctgtgctcacgccctggttagctattattggcatgttcttcgtcatggcattcccgtggtaccatggtggtatcgtgagggttctggcaatcttcgggtacgcattttggttctgcgccgttcttgtgggcgtctctggtgagggtgatggactcgttgcagactatgctcgagagggaaccgttcttccctcggcttggtga

SEQ ID NO: 4562 - DNA, 1185 bp, Oryza sativa
atggatcggccgccgccggatcagcagcggcagaagcaggcgccgctcttctcgccgtaccagatgccccgcttccgcctcaaccaccgggtggtgctggcgccgatgacgcggtgcagggcgatcggcggggtgcccggcccggcgctggcggagtactacgcgcagcggaccacccagggtggcctgctcatctccgagggcaccgtcgtctcgcccgctggcccggggtttcctcatgtccctgggatatacaatcaagagcagactgatgcatggaagaaggtggtggatgctgttcatgccaagggaggcatctttttctgccagttatggcatgtaggcagagcttctcaccaagtataccagccaaacggtgctgcaccaatatcctcaactgataagccaatatcagcaagatggagaatactgatgcctgatggctcctatggcaagtatcctaaacctaggcgcctggcagcatcggaaatacctgaaattgtcgaacaatatcgtcaagccgccattaatgccattgaagcaggttttgatggcattgagatccatggtgctcatggctatatcattgatcaattcctaaaggatggaatcaatgaccgcactgacgagtatggtggctcactttccaaccgctgccggttcctacttgaggtaactagggctgtggtttctgccattggagcagaccgagtcgcggtgaggatatcaccagccattgatcaccttgacgcctatgattcagaccccattaagctcggcatggccgttgttgagcggctgaatgctctccagcagcagtcagggcggctcgcctacctccacgtcacgcagccacggtacaccgcctacgggcagaccgagtctgggcagcatggcagtgccgaggaggagagccgcctgatgcgcaccctccggggcacgtaccagggcacattcatgtgcagtggcggctacacgcgggagcttgggttggaagcagtggagagcggcgatgccgacctggtgtcgtacgggcggctcttcatatcaaacccggacctggtcgagcggttcaggctgaacgccgggctgaacaagtacgtgcgtaagacattctacacgcccgatcctgtcgtgggttacacggactatccgttcctcggacagcctaagtcgcggatgtaa

SEQ ID NO: 4563 - DNA, 830 bp, Oryza sativa
atggcggctgatcaccttgtcgtggccatgcttctcctgctggctttgtcgccgccggccgttgctgacgacacggcggtgctcggccagaaaggcggcgtcgtggaagggcaggcagcggggccggggaggtacgccgtgatattggacgccggcagcaccggcacacgggtgcacgtcttcaggttcgacaacaagctggacctcctcaaggtcggcgacgacatcgagctcttcgctaaggtggatcctgggctgagctcctacgctggacgtcctcaggatgccgcaaactccatattgcctctgcttgacaaggccaacaccgttgttcctrccagacttatgaacaaaactccccttaaacttggggcaactgccggactcagacttattggagatgaaaaggcgaaccagattcttgaagcggtgcccgaaggaaaagatccctatgttgtgaaggagtatctcaagggaaaagattataacatttatgtgcacagctatttgcactatggcggttttgcttctcgcgcgcacatcctagagagaaaggatggaccatttagcaactgcatgctgcgcggattcagtggtaacttcacctacaacggcaagcagtacgacgcaacggccgcaccacaaggtgcagactaccacaagtgcagagaagaagtagtgaagttactgaaggtgaatgcgccctgcgaaaccaagaactgcagcttcaatggcgtctggaacggtggtggcggagcagggcaggatgacctctacgttgcgtccgccttctactacatagcctcccatgtctacatccaatataactg

SEQ ID NO: 4564 - DNA, 2895 bp, Oryza sativa
atggcagccagctgcctcgcgcagaccaatgccctcttcaggaaaagcctcgtcatccagaggcgggcggggaagacgaactgctgcatcgtcctcttcccgctgctcctcttctcggccatcgggggcctccagatcgccatcaacgtcgagatgctgcgggagttcgccgccgccgcctccatcgactgcggcgggtgcggcggcggcgttgccgtggcggcgaacgccacgggggggttggactgcccgacgcggtgcgcgctgccgcgtgcccccaagtggccgccccttctgcagatcccgccgccggagcgccgcgccgtcggggacggggacctcctctcgtccgccggcgatttccccgaagccgcctcgtgcaaacccgccgggtcttgcgccgcggctttccttgtcaccggcggmaaccgatcgtttgtagcaagggtgatggacaatatgttccctgctcataattcttcggcgaaactaccgtctgacatttccgctttgtctgattatgttctggcagaggcagatgatgagttggatttcaattcctttgaagtcagctcctttcttcagaagacatgcaccccaaaccagacactttcttttacatatcaaagtggcaatacaaccgagactaaacatgtgcaatgtacccaaggattaatgctctggcgtgacagtttgtggctcatcaacgatgaactctatagaggttactaccaaggaaataataagaagaagaccaatgaaatcgctgcagcttatgacttcttaagttctgatcaaggcaactttaacgtgttcatctcgtataactcaacaaaaaagtttgatgcttatgaacaagacatctcactcacttttaatcaaggagcatggcaagcacctagattggttcaagtttcacgactaatcaatatggcttcaaatgcataccttcacctaagggccagtggcctcaagatctcatttgattttgtcaaagacatgcccagagcagctcgaccaatgaggccaattgatatatcctcattaatagggcaacttccttatgtatggactatggaacttcttttcccggtaattttgaccaacattgtatacgagaagcaaaagaagctaaggattatgatgaagatgcatggtcttggtgatttttcatattggactatctcgtactgctatttttttcttctttcgctgctctatgtgatgtccttcacattatttggttctgttcttggtttaagattctttcgactgaacgactacagtgtgcagtttgtgtattacttcgcctatatgaatttacaaatttcgttcgcatttcttactgcgtcatgcttttctagtgtgaggacagctactgattatgaaatttactttgattatttggcatattgtgcctcagtgacaggatacttctacataattggttctggccttttaggagaattcttattcaggtcctatgttgaagatgttttcctctcaagaagctggattacacttttggagcttttccctgcattttcattgtatcgcattatctatgagtttgcacaatctgcattgctcgggaattatatgaactcttccgggatgaagtgggttgacttgaatgatcccaaaaatggaatgagaagtgttttgaccataatggtactagaatggtttctgttccttttattggcattctatttggatcacttcggttccttccaaaagggaataagaaaagcagcagtactatttcactcgcacattgataagaatcgttttcaagctactcagcagaccatccagcttcaagagttcaaagcttctgctgacaatgagaagacagatgttatcaaagagagagaaacggttgaacagatcttacaagaatcaaagaatagctactcgatcatctgtgacaaccttaagaaagtgtaccatggaaaagatgggaatgcaaaaaaaattgctgtcagagggctatctctttctatgccacgtgggcaatgttttggtgttcttggaccaaatggcgctggaaaaaccactcttattaacatgttgactggatttactaaacctacgtctggcacggcgtacattgaaggaatggacatacaattcgagatgaacaagatttatgcaggaatcggtgtttgtccacagcatgacttgctatgggaaacactgactggtcgcgagcatctgttgttctatggtagacttaagaatttgcggggtgcaccattatctcaggccattgagaaatctttgaaaagtgtgcgcctgtttgctggtggcattgccgataagcttgtaagcaaatacagtggtggcatgaaacgtcgtctcagtgttgcaatctctctaattggtgaccctaaggtagtttatatggatgaaccaagctcagggttggacccagcatcaaggaaagacttgtggaatgctgtcaagtctgccaagcaggacagggccataattctcacaacgcattcgatggaagaagctgaatttctatgcgatcggataggaattatcgcaaacggcagcttgcaatgcatcgggaactctaaagagctgaaagcaaaatatggaggctcatatgtcctcacagtaacaaccgcgacaggcgaggcggaggagatgaggagactggtccagtccatctcccctaccatgaacattgtgtaccacatctccgggacgcagaagttcgagatggcgaagcaggaggtgaggatctctcaagttttccgggccatggagcatgcgaagctcaggatgaacgttcttgcctggggcttggctgacacaacgctggaggatgtcttcatcagagttgccagggagagtgacagtgcatcatcctccgtggcctga

SEQ ID NO: 4565 - DNA, 2325 bp, Oryza sativa
atgatgcagaggccgttccgtccggaggagtactccttgaaggagacttctcctcaccttggtggtggagctgctggtgacaagctcaccaccacctatgacttggttgagcagatgcagtatctttatgtccgggtagtaaaagctaaggaccttccaagcaaggacatcactggaagctgtgacccatatgttgaggtgaagcttgggaattatargggtacaactcggcatttcgagaagaagactaatcctgagtggaaccaggtctttgccttttctaaggagcgcattcagtcatcagtggttgagatcattgtcaaggataaggactttgtcaaggatgacttcatcgggcgggtgttgtttgacctgaatgaggtcccaaaacgagtgccacctgacagcccattggctccacagtggtatcggttggaagagcggaatggacacaaggtgaagggagagttgatgttggccgtttggatgggtactcaagcagatgaagcattccctgaagcttggcactctgatgcagcgtcgatcccaggagatggacttgcaagtattagatcaaaagtttaccttactccaaagctttggtatctgagagtcaatgtcattgaggcacaagatcttataccaaatgacaggaccaggttccctgatgtttatgtcaaagccatgctaggtaaccaagctcttagaacccgggtatcaccaagccggacgctgaatccaatgtggaatgaggatttaatgtttgttgctgctgaaccattcgaggaacacctgattctgagtgtagaagataggattgccccagggaaggatgatgtacttggaaggacaatcatttctctgcagcacgtacctcggaggctggatcacaagttgctgaacagccagtggtacaatcttgagaagcatgtaattgtggatggcgagcagaagaaagagaccaaattttcaagccggattcacttgagaatatgcctcgaaggtggatatcatgtcttggatgagtcaacacattacagcagtgatttgaggccaactgctaaacagttatggaagcacagcattggcattcttgagttgggtatcttgacagcacagggcctgttgccgatgaagaccaaggatgggcgtggaacaactgatgcttattgtgttgctaagtatgggcagaagtgggtgcggacaaggactattattgatagtttcacacccaagtggaatgaacaatacacttgggaggtgtatgatccctgcactgtgatcactattggtgtatttgacaattgccacttgaatggtggggaaaaagccaacggtgcccgggataccagaattgggaaggtccgcatccgcctctctacgctagaaactgatcgagtatatactcatgcttaccctctgattgttctgacacctgctggtgttaagaaaatgggggaggtgcagcttgctgtcaggttcacatgctcatcactgctgaacatgatgcatctgtattcacaaccattgctgcccaagatgcactatgtacacccattgtccgtgatgcaggtagacaatctaaggcgccaagccaccaacattgtatcaacaaggctgagccgtgcagaaccaccactgcggaaggaaattgtggagtacatgctggatgttgactctcatatgtggagcatgcggaagagcaaggcaaactttttccgtatcatgggtgtcctaagccctctgattgcggtggccaagtggtttgatcagatctgccattggagaaatccgctgaccaccatactgatccacattctctttgtgattttagtcttgtatcctgagctgatactgccaacaatcttcctctacctgttcctgattggagtgtggtactaccgctggcggccaaggcagccacctcacatggacactcgcctctcacatgcggagagtgctcatcctgatgagcttgatgaagagtttgacacattccctacttctcgtccgcctgacattgtgaggatgcgttatgaccggctacggagtgttgctgggaggatacagaccgtagtcggcgatctcgcgacacaaggagaaaggctgcagtccctgctaagctggagagacccaagagccacggcgctctttgtgaccttctgctttgttgctgccattgtcctctacgtgactccattccgtgttgtggtcttccttgcaggcctgtacaccttgagacacccaaggttccgccacaagatgccctctgttcctctgaacttcttcaggaggctccctgcaagaactgatagcatgttgtaa

SEQ ID NO: 4566 - DNA, 1842 bp, Oryza sativa
atgttggagaaggagggcaagctgatcatgagccgcgaggatgaggagatcatggcctggttcgagcggacgacgcgcgacgcggccgacgtgcagcgggagacgctgcggcgcatcctcgccgagaacgccggcgtcgagtacctccgggagctcggcctcgccgggctcaccgacgccggcagcttccgcgcccgcgtcccggtcgtcacccacgccgacctcgacccctacatccagcgcgtcgccgacggcgacgcttcccccgtcctcaccgccaagcccgtcaccgccatctccctaagctccggcacgacgcaggggaagcgcaagcgtctcctgttcaatgacgacctcctccgttcgtcgatacggttcttccatgccagctacgcgttcacgaacagggcgttcccggtggaggacggcagggtgttgcagttcatgtacggcagccggcatgagacgaccaagggcgggctcacggcgacgacggtgatgaccaacctgctccgcagcgaggagttcacggcgtccatggcggccaggtcgcggccgcggctgccgagctgcagcccaagcgaggtggtcttctcaccggacttcgacgagtcgctctactgccacctgctctgcggcctcctcctcgctggcgaggtcagggccgtgtccgcctcgttcgcgcacagcatcgtcgtcgcgctccaggcgctcgagcgggtgtggcgggagctgtgcgcggacatccgccgcggcgccgcgtcgccggcgcgggtcaccacgccggccgtccggcgagccgtggcgcccatcctcgccgccccgaaccccgcgctcgccgacgcgctggagcgccggtgcgccgccctgggcgactggtccggggtgatcccggcgctgtggccgaacgccaggtacgtgcaggccaccatgacggggtccatggagcactacgtcaagaagctgcggcactacgccggtggcgtgccgctggtctccggcaactatgcctcgtcagagggggtcatcggcatcaacgcggagcagcacgcgtcgcccgagtccgtcgtgttcaccgtgctgcccgacgccgcctacttcgagttcatccccctcaagccgccctgcatctacgccgccgccgacgacgacaacccggccgccgccggctcgtcgtgctacgtcgacgccgacgacgccaaccccgtcggcctgacggacgtcgtcgtcggcgagcactacgaggtcgtcatgaccacgttcaccggcctgtaccgctaccggctgggcgacgtggtgaaggtggccggattccaccacgcgacgcccaagctcaggttcgtgtgccggcgaagcctcatcctgtccatcaacgtcgacaagaacagcgagcacgacctccagctcgccgtcgacagcgccgccaagatcctcgcctgcgacggcgagaaccacaagcagctcgagatcgccgactacaccagccacgccgacacgtcgtcggacccgggccactacgtcgtcttctgggagctgaacggtggcggtgaggaggacggcggcggcgtgctgcagcggtgctgcgacgagatggaccgggcgttcggcgccgacgcggggtacgcccagtcgaggaagacgtgcgccatcggggcgctcgagctgcgggtgctgcggcgcggggcgttccaggaggtgctccgccactacgtcgccggcggcagctcggcggggcagttcaagatgccccggtgcgtcgcgccgtccaacgccggcgtgctccgggtccttaaggacaacaccatcaacattttcttcagcactgcctacgactacgattga

SEQ ID NO: 4567 - DNA, 1617 bp, Oryza sativa
atggccagcacggcatggtccgactactggtgggtcgtgcttaggtctgaggtgcagcctttcgacaagttagcgagacgagaaagccccagagtggaatcgatcatgtcaacgacgccaacggcagcatcgcgccggctcgtcctgatcctctgcaccctcgctatctcctgcagcagcggcatcgccggattcgccgccggcgatgacgacgcgttcatccgctgcctcgccgccgccgctgtcccgccacggctggtccacaccccgggctccgcgtcctacgccccgacgctcgtctcctccatcctccggaacctccgcttcsgtcacgccggggacgccgarggccgcttggcatcgtcgcggcgcaaggcgcaagcccaggccgcgcggttcgcsgtgctcgacctygscgcgctccgcgacgtccgcgtggacgccgatcgcgccgaggcgtgggtcgggtcgggcgccacgctcggcgagctctactacgcggtgggcgccgcgagccgcactctcgcgttcccggccggtgtctgcccgaccgtcggcgtcgggggccacatcagcggcgggggattcggcacgctgatgcgcaggtacggcctcgccgcggacaacgtcctcgacgccgtcctcgtggacgccgacggccggctcctgaacaggaccaccatgggggagggcctcttctgggcaatcaggggcggcggcggcgagagcttcggcgtcgtgctgtcctggaagctgcggctggtccgcgtcccggagacggtcaccgtgttcaccatccgccgcccgagaaaccaatccgccaccgacctcatcaccaaatggcaagagatctccccctcactgccccgagacgtcatcctccgcgtcgtcgtgcagagccagcacgcgcagttcgagtccctgttcctcggccggtgccgccgcctcgcccgcctcatgcgagctcgcttcccggagctcgggatgacgcagtccgactgcgaggagatcacctggatccaatccaccgtctacttcgccttctactccagctccaagccactggagctcctcctggacaggggcaccgagccggacagatacttcaaggccaaatccgactacgtccaagaacccatcccacgccacgcctgggagagcacatggccatggctggaggagcacgacgccgggctgctcatcctcgacccctacggcggcgagatggcccgcgtctcgccggcggcgacgccgttcccgcaccggaagggcaacctgtacaacctccagtactactcgttctggttcgagcacggagcagagacattggagaggcatctgagctgggtcagggggctgtatggcgagatggagccgtacgtgtccaagaacccaagaactgggtatgtcaactacagggacatggatcttgggaggaatgagatcgaggggaatgtgacgagctacacgaagggtaaggtttggggggagaagtatttcaggggcaatttcgagaggttggcggcggtgaaggccatggttgatcctgatgatttcttcaggaatgagcagagtattcctcctcttcctgctgcaaaggggtggagctccatttaa

SEQ ID NO: 4568 - DNA, 615 bp, Oryza sativa
atytgggtttacctcctcgccatktttgccctwattgtgcccttcttgggtttaaccgccttcgcctttgccgtmaccaaccgtggcgccggcgaggccgtytccggccgcgggtacagggagtaccgcctcggggamtactccacgtggctgcggcgccacgtggggagcagcaagaactgggacaagatcaggagctgcctcgccggcgccgacgtttgcaggagcctgcaggacaggaacgagacgtgggcgcagttcgtcgccgacgacctctccccggtccagtccggctgctgcaagccgcccacgagctgcaacttcacgtacggcggcggcacgcggtggggcaagacggcgaggctgagctccgccgacccggactgcgacgagtggagcaacgacgccgacgaggtctgctacggctgccggtcgtgcaaggccggcgtggtggccgcgctcaagagggactggaagcgcgtggccatcgtcaacgtcgtcttcctcgccttcatcgtcgtcgtctactccgtcgggtgctgcgcgttcaagaacagccggcgcgacagtgtccaccgccgcagcggcgggtggaagcaggccggatacgcctag

SEQ ID NO: 4569 - DNA, 1370 bp, Oryza sativa
atggaacttgagaagaatggaaacattctactgcgaaggtatgagattggaaaattattggggcaaggaacttttgccaaggtttatcatggtaggaacatcgtgacttcacaaagtgtggctatcaaggtgatcgacaaggacaaaatttttaaggttggcctaatggatcagattaaacgagagatatctgtgatgaaattagtgaggcaccccaacattgtacagctgtatgaggtcatggctaccaaatcgaagatatactttgtgctagaatatgtcaagggcggtgagttgtttaacaaagtagctaaaggtaggttgaaagaagatgctgcaaggaaatacttccagcaattagtaagtgctgttgatttctgccacagtagaggcgtttatcatcgcgatctgaagccagagaacctacttgttgatgaaaatggaaacctgaaaattaccgattttggattgagcgctcttgctgaatcaagacgacaagatggccttctacacacaacttgtggaactcccgcatatgtggcgcctgaggtgatcagccgaaaagggtatgacggtgtcaaggttgacacatggtcttgtggtgtgatcctgtttgttctgatggctggttatctgccttttcaagattcaaatttgatggagatgtacagaaagattgggaaagcagagttcaaatgcccagcttggttttcgtctgatgtacgaaaattagtttcgagaattcttgatccaaacccaagaagtagaatgccaattacaaaaataatggaaacttactggttcaagaaaggacttgatagcaagctaatccttaagaacgtggagacaaatgaaccagttacagctcttgctgatgttaatgttgttttctcctccatgggtagcagtagtagcaaaaagactgaggagaaacaggatgcaggaaagctaaccaaccttaacgctttcgatattatttctctttcggaaggctttgatctttctggcttgtttgaggagactgataaaaagaaagaagcaaggtttacatcaagtcaatcagcttcagctattatctcaaaactagaggatgttgcctcatgttcgaagttgacagtgaaaaagaaagaaggtggtgtgctgaaaatggaaggtgcaagtgaaggaaggaaaggtgtattggcaatcgatgcagagatcttcgaggtgactccttcatttcatttggtagaaatcaagaagaacaatggagatacmctagaataccaacatttgtggaaggaggacatgaaaccagctcttaaggacattgtttgggcttggcaaggtgaacgccaggatcagcaacctgaagatcatggccagccata

SEQ ID NO: 4570 - DNA, 1053 bp, Oryza sativa
atggacgcggcgtggcgcggcggcgttggctgctcgccggtctgcctcgacctctgcgtcgggctgtcgccggtgcgggagccgtcggcggcgaggcacgagctgcttgaccggccggccggctgccgcggcggtggggattccaagtcgatgaccaatgacgaggcgaagatcgtcgaggcgaaggtcactcagatgagcgaggagaatcggcggctgaccgaggtgatcgcccgcctgtacggcggccaaatcccgcggctcggcctcgacggctcggcctcgccgccgcggccggtgtcgccgttatcgggcaagaagaggagcagggagagcatggagacggcgaattcctgcgacgccaacagcaacaggcatcagggcggcgacgccgaccacgccgagagcttcgccgccgacgatggcacctgccggaggatcaaggtcagccgggtgtgcaggcggatcgacccgtcggacacctccctggtggtcaaggacgggtaccaatggcggaagtacgggcagaaggtgacgcgcgacaacccgtcgccgagggcctacttccggtgcgccttcgcgccatcgtgcccggtgaagaagaaggtgcagcggagcscggaggacagctcgctgctggtggcgacgtacgagggcgagcacaaccacccggacccgtctccgcgcgccggcgagctcccggcggcggcggggggggccggtggctcgctgccgtgctccatctccatcaactcctccggcccgaccatcacgctcgacctcaccaagaacgggggagccgtgcaggtggtcgaggcggcgcatccgccgacgccgccggacctcaaggaggtgtgccgggaggtcgcgtcgccggagttccggaccgcgctggtggagcagatggccagcgcgctcaccagcgaccccaagttcaccggcgcgctcgccgcggcgatcctcccagaagctgcccgaattctagcttcctttaacaattctccaattcttcttacaggaaaaaacatagaggcgcatttcaatagagattag

SEQ ID NO: 4571 - DNA, 624 bp, Oryza sativa
atggacgacgacggcgacggctcatcgtcaccgaccgacgacagcgccgccgccgggcttttgccgctcttcagccgatcgccggcggagaccgtgaaggatgggtaccaatggaggaagtacgggcagaaggtgacgcgtgacaacccctaccctagagcttacttccgctgcgcattcgcgccgtcttgccccgtcaagaagaagctccaaagatgtgcggaggataggtcaatgctagtggcgacctacgagggagaacacaaccatgccctgtccacgcagacaaccgaattcgtcgccagcggctgcactacgagccagcacgccggggggtcgtcgtcgtcgccgctgccgtgctccatctccatcaactcgtcgggccgcacgatcacactcgacctgacgaaccaagcagggtccggatcgatcgcgagctgcggcgtcgaggcggccgccgtctccggcgagctcgtcacggtgctctcgccggagttgaggaggcacctcgtggaggaggtggtgcaagtgctcaagaacgacgccgagttcgtggaggccgtgaccaacgccgtggccgctagagttgtggatcaaatcccacacattcctgttcatttgtag

SEQ ID NO: 4572 - DNA, 1053 bp, Oryza sativa
atggcgtctctcccggtgccaagcgtgcaggccatggtggcggccatcggcatcgaccatgttccacccagatacctccgccccacggacgccgacgagccggtcgcttctgacggcggcgaggcggagatccccgtcgtcgacttctggaggctgcagctcggcgacggcgacgagctggctcgcctccacattgcctgccaggactggggcttcttccagctggtaaaccacaatgttccagaggatgtggtggaggggatgaaggccagcatcaagggattcttcgagctgcctgcggagaccaagaagcaggtcgttcaggagccagggcagctggaaggctacggtcagctgttcgttgtgtctgaagatcagaagctcgactgggctgacatcctctacgtgaaaacgcagccgttgcaggacaggaacctcagattctggcctgaccaacctgccggcttcagaatggcactggacagatactgcgcggctgtgaagatcacagcggatggccttctggctgccatggcgaccaacctgggagtggagtcggaggtgatcgcagagagatgggtgggtggagtccagtcggtgagggtgcagtactaccctccgtgcggtcaggcggacaaagtagtcggcatctctcctcactctgatgctgatctggtgaccattctcctccaagcgaacgaggtggatggcctgcagatcaggagaggcggggcttggcttcccgtcaggcctctggagggcgctctcatcgtcaacgtgggagacattcgtcaggtcttcactaatgggaggtacaagagcgtcgagcaccgggttgttgtggatgggaagaaagagcggctgtcgatggcgaccttccattctccaagcaaaaacgccattgtaggtcctctgagcgagatggtggagcatgaagacgatgctgcttatacaagcatggaccatgacgaacttctgaagctcttcttcgccaagaagctggaggggaagaacttcttgaacccgataaagaagctgaagaacagcggctga

SEQ ID NO: 4573 - DNA, 860 bp, Oryza sativa
atggttgatggtcactggcggaagctagctgaagataaaggttgcggccatctgctcgccaccacaccacaccacagcgaagtcaaagcgatcgacctcatgagttgccaggtgccccagcggtgccccggcctcgcccggtcgttaagttcccactccttcccgcgcggcctcctctcctacctccccgccaaacctctcctccatccttcccagtcgcgcgcggcgccgcytccacctgcgaggcttcttcgacgacgacgacaaccatgccgcctgagccgccagcgtctcctcctcctcccaagaagatgtcaccgccsggarcsggarcsggarccgggagcaagaagaagcagcagcagcaggccgamgccgcggagctggcgcgcgtgttcgagctgttcgacaggaacggcgacgggcggatcacgcgggaggagctggaggactcgctggggaagctcgggatccccgtgccggccgacgagctggcggcccgtgatcgcgcgcatcgacgccaacggcgacgggtgcgtggacgtcgaggagttcggggagctctaccgctccatcatggccggcggggacgacagcaaggacggccgcgccaaggaggaagaggaggaggaggacggcgacatgagggaggcgttccgggtgttcgacgccaacggcgacgggtacatcacggtggacgagctcggcgccgtgctggcgtcgctggggctgaagcagggccgcacggcggaggagtgccgtcgcatgatcggccaggtcgaccgcgacggcgacggccgcgtcgamttccacgagttcctccagatgatgcgcggcggcgggttcgccgccctcggctg

SEQ ID NO: 4574 - DNA, 1089 bp, Oryza sativa
atggtgaccagcaaggagtttgcaagggatcaggcggccatggatcagaagatcaagagcgacgtcggcgaggtggtgctcgccggagacgaggaagaagacggggacgtggtgctcccggggttcaggttccacccgaccgacgaggagctcgtcacgttctacctccggcggaaggtggcgaggaagtctctcagtatagagatcatcaaggagatggacatctacaagcacgatccatgggatctccccaatgcgagcacggtaggtggagagaaggagtggtacttcttctgcctgagagggaggaagtacaggaacagcatcaggcccaacagggtgacgggatccgggttctggaaggcgacggggatcgaccggccgatctactccgccgccgtcaacagcaactccggcgagtcgatcgggctgaagaagtcgctcgtctactaccgcggcagcgccggcaagggcaccaagaccgactggatgatgcacgagttccgcctcccgccggcgatcgccgccgccgacgcctccccgtgcatgcaagaagctgaggtctggaccatctgcagaatcttcaagagaagcatcacctacaggaagcagcagcagcagcaggcctggaggccgccggcgacggtgaccgtcaaggccccaccgccgggggactcgagctccaacaccggcagcttcgagtcggacggcggcggcgacgagttcatgaactgcggcctgactccggccatctcccagcagcagcagcacggcggccgtcatcagatgatgagcacgatgagctgcaacggcggctacttcttcaacgacggcatccatcacagccacagccaccacaagcttcatagtcaatggggctccctacaaatggcgccgccggagccgaagccggagccggagcagaagcctctgagctcgccggcgatgacgatcgccttccatcaaaacgaccatggcttccccgccgccgccgcggatttctacaaggatgggtacttggaagagattgcgaggatgatggaggtggctgatccaagtccaacaggattctatgactgtagatattga

SEQ ID NO: 4575 - DNA, 1872 bp, Oryza sativa
atggagcatgtgatcggggggaagtttaagctggggaggaagattgggagcggatcttttggggagctataccttggtacgttcctcgtggggttctcggatctctcgtctatcgccgctcgttgcgaggcaccgttcgtttttcttcttcttackgtttacgctgtttgtgatgatgtcgttgattcatggattgtttcgattacaggtgtgaatatacagagcagcgaggaggtagccatcaagttggtgatgtgtgtggtttacgagagcacttattctgaaacatctgtaaataacatgaggcagcccaccaacccttgtcatactatattatctgctcttgtaacattaggactcagggcagccgcccgtgattctgttcacatcctgttgggtagctgtgaagcattggttattgtctatttcaatgtttcaaagcagcattcaaggattctcctgatattattgctccggttcagtggtcaatgcacttcttttagaagcttctattatttcgatatgattgttagtagtttggtcacatctacttttcaagcaacttaccttgaatctgtaaaatcaaggcatcctcagcttcattatgagtcaaaactatacatgcttctgcaggggggaactggaattcctcatctgaagtggtttggagtggagggggagtacaatgtcatggttatcgatcttcttggtccaagtttagaggacttattcaactactgcaacagaaagttttctcttaaaacagtacttatgcttgctgatcagatgatcaacagggtagagtacatgcacactagggggtttctacatcgtgatatcaagccagacaacttccttatgggtttaggccgcaaagcaagccaggtttatgtcatcgactatggtcttgcaaagaaataccgggacctccaaactcataagcatataccttacagggagaacaaaaatctcacaggaacagcacgctatgctagtgtaaacacccatcttggagtagaacaaagcaggagagatgatttagagtctctgggctatgtgcttatgtatttcttaagaggaagccttccttggcaaggtctaaaagctggcacaaaaaaacagaaatatgacaaaattagtgaaaagaaaatgcttactccagttgaggttctctgtaaatcttatcccacagagttcatttcatacttccattactgtcgatctttgcgatttgaagataaaccagactacagctatttgaagagacttttccgagatctattcatccgtgaagggtaccagcttgattatatatttgattggacgaagcaaggttcagaaagtaacagattgcgatcaagtggaaggacaagtgggttggtgggaccatctgcagaacggactgaacgagctgcaggggttttttggggtgttgtctcaacagcaagacaggatgttcctgacagattctctggtacagtcgatccatttgctagaagaactggctctggttctggccattacggagagcacacaaagcacagaaatatattggattcattacttgcacccaagacggctgttgatttagataaaagaaggcccacatcatcatctcgtaatgggagcacatcaaggaaggctctcttgtcaagcagcagaccaagttctggagatcccattgatccgaaccgcagtaacctaattccaaccagcagtggcagcagtcgcccatcaactatgcagaggcttcaccagtcaacaggacttgagaccaggtcctcgcttaccaaaactgcaagaaatgtccatgatgatcccactttgaggacctttgaacgcctttcaatcagtgctgacagaaggaaataa

SEQ ID NO: 4576 - DNA, 1572 bp, Oryza sativa
atggccatgtcgtcgcgaagcttaggcgccctagccgccttcgtcttcctctgctcagctgcctccatgtcgtcctccatggccgccacggacagcttcctccaatgcctctcggcgagcatacccagccagctcctgtacacgcagagctcgccgtcgtacacgtcggtgctggacgccggcatccggaaccctaagttcctgacgaacaccacgcggccggtctggatcatcacgccgacgaacgcctcccacgtccaggccgccgtgctctgcggccgccggaacggcgtccgcctccgcatccgcagcggcgggcacgactacgagggcctctcgtacaggtcggagcggccggagacgttcgccgtgctcgacctcgtcaacatccgcgccgtccgcgtcgacgcggcgtccgccaccgcgtgggtggactccggcgcgacgctcggggagatgtactacgccatcgggaaggccggcggccggatcgcgttcccggccggcctgtgtccgaccgtcggcgtcggcggccacttcagcggcggcggcttcggcatgctgctccgcaagtacggcctcgccgccgacaacgtcgtcgacgccgtcctcgtggacgccaagggcaggctcctcgacaagaactccatgggcagcgacgtcttctgggcgctccgcggcggcgccggcgagagcttcgggatcgtgctctcctggaaggtgaagctcgtggccgtgccgccgaccgtcacggtgttcaacgtcccggtgaccgtgagccagggcgccatcgacgtcgtcacgaggtggcaggccgtcgcgccgtcgctccccgacgacctgttcatccgcgtgctcgtccagggccagagggccagcttccagtccctctacctcggcacctgcgacgcgctgctgccggtgatgcgcagccgcttcccggagctcggcatgaaccggtcggactgcagggagatgacttggatccagtccgtcccctacatctacctcggcagcagcgccaccgtggaggacatcctgaaccggaccatcgccatggacacctccaacaaggccacctccgactacgtccggcaagccatcggcagggacacgtggagcgccatcttcgggtggctcgcgcggcccaacgccgggctgatgatcctggacccgtacggcgggcagatcggcagcgtggcggaggcggcgacgccgttcccgcaccgcggcggcgtgctctacaacatccagtacatgaacttctggagcgcggcgggcggaggcggcggcggcgcggcgcagagggcgtggatcagggacttctacgcgttcatggcgccgttcgtgagcaaggacccgagggaggcgtacgccaactacagggacctggacctcggcgagaacgtggtcggcgccggcggcgtcagcagctacgacgccggcaaggtgtggggggagaagtacttcagggggaactaccagcggctcgccatggccaaggcgcagatcgacgccgacgactacttcaggaacgagcagagcatcccgccacttgtcgccggaaaatga

SEQ ID NO: 4577 - DNA, 1197 bp, Oryza sativa
atgcctggagcaactaccgccgctattgttgacagccgccgcggcacacaacattcggaaggtcctgcaacgatcctcgccatcggcactgcaaacccggaaaacatcatgtttcaggataactttgccgactactactttggtctaaccaaaagcgagcaccttaccgagctcaaggaaaagatgaagaggatatgtcataaatctggtatagaaaagcgctacatccaccttgacgcagagcttatcagtgtccacccagagatcattgacaaacatttgccctcccttgaaactcgtgtagacatcgtggctactgaggtccccaagcttgctgagtccgctgcgcggaaagccattgctgagtggggccgtccggccactgacatcactcaccttatcttcagcacctactcaggctgtcgtgcacctagtgccgacctccaattggcttcgttgctcggactacgcccttccgtttctcgcaccattctcagtctccacggttgctcaggtgttgccagggaactcaaactcgcaaaggagatcgccgagaataaccgcggtgctcgtgtcctcatagcttgctccgagctgacactgatatgcttctcacccccagacgaaagcaaaatcattggccatggactgttcggggatggtgctggtgcagtcattgtcggtgccgacccctcggccgatggtgagcgcccgctattcgagatggttgccgcctcgcaaaccatgataccaggaaccgagcacgcactcggcatgcaggccactagcagtggcatagattttcacctctctatccaggtgccgacgctgataaaggacaacatccatcagtgcttgcttgatgcgttccgatctatcggaaacacagatcctaactggaacgacctcttctgggcagtgcaccctggcggtcgcgcaatccttgataacatagaggacaagctccaactacagccatggaagcttgcggcgagccgccaagtgctgagtgaatatgggaacatgagtggtgcaacaatcgcattcgttcttgatgaactacgccgccgtcgggagaaggaacaagacatgcagcaacagcctgagtggggagtgttgctggcctttggacctggaatcacaatagagtcaatcgtgctgcgtaatccactctcacgtggtttgaaggaaaattaa

SEQ ID NO: 4578 - DNA, 1953 bp, Oryza sativa
atgtcgagtttcttgaacgaagaattcagctccggtcccttttcagacattttctgtgataatggcagtaacaaacatcaggatggacttgggaagagcaaagctttcatcgattcaagccgggaagaaactgctcagctagcaaaaaagtttgaatcaaacctttttggtgccaaccagaaatcaagctcaaatggctgtctgtcagagaggatggctgcaaggacaggttttggtgtcctgaaaattgatacatctcgtgtcggttattctacaccgattcggtctccggtgacgatcccgcccggtgtgagtccaagggaacttcttgagtcgccggtttttcttccgaacgccattgcacaaccttctcctaccactggcaaactgccatttttgatgcatagtaatgttaaaccatcgatccctaaaaaaactgaagatgaaacacgccatgatcgtgtattcttctttcaacccattttgggatctaagccaccaacttgtccagttgcagagaagggtttcagtgttaatcatcaaaaccagccttcagtgacggataatcaccaggagctcagtcttcagtctagctcaactgcagccaaggatttcacttcagcaactattgttaaacctaagacatctgattccatgttagacaatgatgatcacccttcccctgcaaatgatcaagaagagaatgcaacaaacaaaaatgaagagtattcttcagacctgatcattacccctgctgaggatggatataactggaggaaatatggacagaagcaagttaagaacagtgagcatcccagaagctactacaaatgcactttcacgaattgcgctgtcaagaaggtggagcgttctcaagatggccaaataacagagatagtctacaaaggttctcacaatcaccctttgccgccttccaaccgccgaccaaatgttcctttctcacacttcaatgatctgagagatgatcactctgagaaatttggttccaagtctggtcaggccacagcaacttcatgggagaatgccgcaaatggacacctccaagatgtcggtagtgaagttctgacaaaactgtctgcttctcttacgacaacagaacatgctgaaaaatctgttatggacaaacaagaagctgtggatatctcatcgacgctctccaatgaagaggatgatagggtaacgcatcgtgccccgctttctctgggctttgatgcgaacgatgactatgttgaacacaagagaagaaagatggatgtttatgccgctactagcactagcaccaacgccatcgacataggagctgtggcgtcaagagctatccgggagcctcgcgttgttgttcagaccacaagtgaggttgacatccttgatgatggttaccgttggcgcaagtatgggcagaaagttgtcaaaggaaacccaaatccaaggagctactacaagtgcactcatccgggttgctcggtgcgcaagcatgtggagcgatcatcgcatgatctgaaatccgtcatcacgacgtatgaaggaaagcacaaccatgaagttccagctgccaggaacagtggccacccaagctcaggctcagccgctgcaccacaggctaccaatggtcttcttcaccggagacctgaaccggcacaaggtggtggtggtggtagccttgctcagtttggctatggctcagctggtcacagaccagcagagcagtttggtgcagcagcagctggtttctcctttggaatgctgcctcgtagcattgcaactccggcgccgtctccggcgatcgccgtgccggcgatgcaggggtacccagggcttgtgctgccgagaggtgagatgaaggtgaacttgctgccacagtctgggaatgctggtgcagcagctagccagcagctgatgggcaggttgccaaagcagcatcctcagatgtaa

SEQ ID NO: 4579 - DNA, 2100 bp, Oryza sativa
atggcgggggggctccgcctcgatcccgccgtcgcctccccggcccgcctcctcctcgacgtccccaagacgcaatccccttccaagaccacgtacagcgaccgcttcatcccctgscgctcttcttccggcctccacaacttcgccctcctcgaccgcgaccgcgcctccccctcctccaccaccgacgacgccccctactcccgcctcctccgcgccgagatcttcggcccggactccccctccccggctccctcctcccccaacaccaacctcttccgcttcaagaccgaccacccctcgcccaaatcgcccttcgccgcctccgccgccgccaccgccggccactacgactgcaccgccggctccgctgaatcctccacgccgcgcaagccgcccaggaaggtccccaagaccccgcacaaggtcctggacgcgccgtcgctgcaggacgacttctacctcaatcttgtcgactggtcgtcgcagaacacgctcgccgtcggcctcgggaattgcgtctacctctggtcggcttccaattgcaagatttgggatagctctcgctgtaaacggattaggaacatgggaggacaccaaacacggactggtgtattagcatggagctcccgaatcttgtcctccggtagcagggacaagaacatattgcagcatgacatccgtgtcccaagtgactatatcagcaagttctcagggcacagatcagaggtctgtggactgaaatggtcgcacgacgaccgtgagcttgcatccggtggaaatgataatcagctgctagtatggaaccaacgttcgcagcagccgatattgaggctgacagaacacacagctgcagttaaagcaatagcatggtcaccacatcagcaaggcctcctggcatcaggtggtggaaccgctgataggtgtatcaggttctggaacacggtttgtaatcttgcctggtgtaaaaatgtaaatgagcttgtgagcactcatgggtattcccaaaaccaaatcatggtgtggaagtacccatctatgtcaaaggttgctactctaactggacacacgctgcgagtgctttaccttgcaatgtcacctgatggacagacaatagtaacaggagccggggatgaaaccctcagattttggaatatttttccttcaatgaagacacagattggtgccgagctgccgatgcaaatgcaagaagcaattcaatccagcatccagttcaagtgcaaccagatcgagatggagtgcgagagcaactacagcaaggagcagaggctcaacggcgacagcctcgtcttcgaccttgatgacacgctgtatccggtgacctccggcattggagccgacgtcgtaaggaacatccaagcttatatgatcgaaaagcttggtgtggaagagagcatcagtttggagctatgcgtcctcctctacaagcagtatggaactaccatggccggtttgagggctgttgggtaccagtttgattatgacgacttccacagctatgttcatggaaggttggcttatgagaaaattaagcctgatccagtacttaggaacattctcctaagcttgccaatccgcaaagttgtcttcacaaatggtgacagaattcatgcttcaagggccctcaagaggctaggaatagaagattgctttgaaagagttgtgtgctttgagacactgaacccaacatcatcctctctttcggcagctggtcaggttgaaatttttgatataatgaagcatctggctcatccagagcctggggttgaactaccaaagtcgccaatcctgtgcaagccaaatatagatgccatgcggcaagctctcaaggttgcctccatcaatccgaagacatcgatattgtttgatgacagcgccaggaacatccaggctgcgaagctaataggaatgtatactgtcctggttggaacttctgaaagaataaagggtgctgaccatgcgttggaaagccttcacaacatgaaggaagcattgcctgagctgtgggatgaagctgtgaaggatgaggatgtcaggaagtcaagcaaagtcggaattgagacatctgtgatcgcttaa

SEQ ID NO: 4580 - DNA, 2034 bp, Oryza sativa
atgaatcatttatcctatcttctacagttcttcttcctcttcatctctaatctttcagctctcgccaccggtgaagaccaattcatatactctggcttcaatggtgctaacctcaccctcgacggcgtggcctcggtaacaccagatggcctgcttaagttgaccaacggaaccttacggctccaaggccatgcctttcacccaactccattcagtttcaagaagaaacccaatggaacagtgaattcctttgctgtctcctacatatttgccatctactgtctccggcctgtcatctgcggccatggcatagcttttgttgtttccgtgagcaaaaacttctcaaccgcaatggcaagccagtaccttggccttataaatgaccacaacaacggcgatccaacaaaccatttcttcgctatcgagctcgacacgaaccaaaatgatgagttcaacgatgtcaataacaaccatgttggaatcgacatcaacagtcttacatcactgaactccagcagcgtgggatactacacagacagtaatggtaacttcaacaacattacactcactagttacaagatgatgcaagtgtggctagaatacaatggggacaacagacagatcaatgtgaccttagctccaataaaaatggccaagcctgttaagccattactctctacctactatgacctctcaacagtgctcacagacatggcatatgttggattctcatcatcaacaggctcattcgttgcgcggcattatgtgcttggctggagttttggcatcaataaacctgcaccagccattgatatcagtaagttgccaaagctaccttatgaaggtgagaaaacccattccaaggtcttggaaatcactctgccaatagccacagcaacatttgttcttgcaatgatagctctcatcattctactcatccgaaggagattaaggtatgctgagatacgagaagattgggaagttgaatttgggccgcatagattctcatataaggatttgttttgtgctacggaaggatttaagaacaagaatctactaggaataggagggtttggaagggtatacaagggactacttccaacgtctaaattggagattgctgtgaagaggatctctcatgactccaaccagggtatgaaggaatttgttgctgagatagtcagtataggtcacctccaacaccgcaatcttgtgcagttacatggctactgccggcgaaaaagtgaacttattttagtgtatgattatatgtccaatggaagtcttgacaagcatttgtatggtcaagagaacaattctactttgacatgggcccaaagattccaaataataaaagatattgcatctggattgctttatctccatgaggaatgggagaaagtaatactccatcgagacatcaagccaagcaatatacttctcgatgacaacatgaatggacgactaggcgattttggcctagcaaggttatatgaccatggaaccgaccctcaaaccacacatgttgttggtaccataggatacctagctcctgagctagcacgaactagcaaagcaactccccttaccgatgtatttgcctttggcatgtttgttcttgaagtcacctgtgggcgaaagccgattgaccacactgcacaagacaatcaactgatgttggtagattgggtgcttcattgttggcaccaaggatttctaaatgatgcagtggatatcaaactccaaggtgtctacaatattgatgaggcgtgcctagctctgaagttaggactgctgtgtgcacaccctttcatcaataaaagacccagcatgaggcatgttacgcagattctcaatagagagatggaactaccagagctaacaccaacacacatgagcttcaacatgctctccttgatgcagaaccaaggttttgatccagagaccatgacaaaccagtttctaatatcaaacagcacactatctgacctctcagaagttagatctcatacatggtctccctatgatatttaa

SEQ ID NO: 4581 - DNA, 1794 bp, Oryza sativa
atggcttatgaagtgctccacccatgcatcttccttgatctttttgttcaggttaggcaaacatctcacacaaagtttttctttcttttcttactcgtttcctttggcatcaactgtgcatccttcaccaatacaagtgatgatcaactcttataccttgggttcactagtgccaacctcatcactgatgatactactgtagtcacgtcaaacggactacttgagctaaccaatggcacaattaatcgcaaaggccatgcattctacccatctccattgcacttccgcaagtcacacaacaataaagtacattctttcgcagtttcattcgtgtttgccatccgctctagctatcccagaatgagcctacatggattggcctttgttgtttccccaagcataaatttctccaatgcattggctatccaatacttgggcttgctaaattctaaaaacagaggcagcaaaagcaaccatatcttagctattgagtttgacactatcttgaacatcgagtttgaagacatcgatgacaaccacgtaggcattgacatcaatgacctccactcaataaaatcccactctgcaggctactatgatgatagaaatagtagctttcaaaacatgagtcttattagtggtgatgcaatgcaagcatgggtggactataatggagaagacaagaaaatcagtgtgactatggctccaattaaaatggcgaaacctaagaggccactcatcttgatatcctatgacctctcaacagtgctgaaagagccatcgtatattggattctcagcatcaaccggtttagttgactcacgacactacatccttggctggagctttggcatgaataaaccagctcctatgattaatgtcaacaaactaccaaaactacctcgtcagggcccaaatcctcaaccaaagctcctggcaatcactttacccaatagccagtgcaacatttgtgattcttttttgtggtgtatttattacaattgtgcggaggcgattgaggatctgttccacgctacacatggattcgacaataagaacttgcttggtgcaggaggatttggtaaggtctacaaaggagtacttccatcatctaaactagaggtcgcagtgaagagagtgtctcatgagtctagacaagggatgaaggagtttgttgctgaggttgtcagtattggccgcattcgtcatcgcaatattgttcaattattgggctattgtaggagaaaaggtgactttggccttgcaagactatatgatcatggcactgacctacaaactacacacgtggtcggtacaatggggtacctcgccccagaattggtatgcacaggtaaggcatcccctctcacagatgtgtttgcctttggtgcattccttcttgaggtcacctgcgggcaaaggccagttaaccacagttcacaagacagtcctggtgtattagttgattgggtactcgagcattggcaaaaaggattgctaacaaatacagtagatgcaaggctgcaaggcgactacaacattgatgaagcatgctttgtgctaaagttaggtctattatgctcacatccatttaccaacatgaggcccaatatgcagcaagtcatgcaataccttgatggtgatgtgccactccctgagctaacacaaatggatatgagcttcagcatcatctccatgatgcaagatgaagggttcaacccatatacactatcatcatatcctcctccagggactagcgtcggcacaatatctaacatctctggaggaagatga

SEQ ID NO: 4582 - DNA, 1940 bp, Oryza sativa
atgaagattatgctgttcggcctgctagcagttcttgcagggtgcagtgatgctgttgaccaatttgtctactccggtttcaccggcagcaacctcacccttgatggtggagccagagtcacgccaagcggcctcctggagctgaccaatggcatggttcggctgaaaggccatgccttccatccgactccactgcatctccacgagtcgcctaatggaacggtgcagtccttctccatatcgtttgtgtttgctatcctctgtgactaccctgattcatgtgggcatggcctcgccttcttcattgctccaagcaagaatttcgcaagtgcgttctggacccagtatttgggccttttcaacaacaagaacaatggagacccaaacaaccacatctttgctatcgagctcgatactgtccaaaatgatgacttacaagacatcagtaataaccacattggcatcaatatcaacagtctttactccatgaaatctcgtgatgctggcttttacgatgataagagtggtgactttaagaatttgacactcattagccagaaggcgatgcaagtttgggtaaactatgatagagaaatcacacagatcaatgtgaccatggcccccctcaatgtggaaaaacctgtgaagccactgctttctactacctacaatctatcaacagtgctcactgactcggcatatattggcttctcatcttcaacaggaacagtcagtggaaaacactatgtgctaggttggagcttcggcatgaacagcccggctccatcaattgacattgccaagcttcctcgtctagctgtggtgttcctcctctctgcgggcactaccatttttctgtgcatgcggaggaatctaagatatgctgagctacgcgaagattgggaagtcgagtatgggccacggaggttctgttacaaggatttgtttgatgccacagaaggattcaaaaataagcacctactaggtacaggagggtttggaagtgtgtataagggggtgctccctatatctagattggatatagctgtgaaaagggtgtcacatgactcaacccaaggcatgaaagaatttattgcagagattgttagtattggttgccttcaacaccgcaatcttgtgcagttactgggatattgccggcgaaaaggtgaacttctcttagtgtatgattatatgccaaatggaagccttgacaaatacctatatggtaaagagggcaagcctacattagattggactcaaagattccaaatcatcaaaggtgtagcatctggattactctaccttcatgaagagagcgagaaagttatcattcatcgagacattaaggcaagcaatgtactcctcgataacgacacaaatgcacggataggtgactttggtctcgcaaggttgtatgatcatggtactgatccagaaaccacacgagtggttggcaccataggatacctagctccagagctagcacgcggtggcaaagcgacccctcttacagatgtatttgcctttggcatgttcattcttgaggtcacctgtgggcaaaagcctgtcatgcaaaacacagaagacgaccaattggttcttattgattgggtgcttgaacattggcataaaggctcactcgctgatacagtggacatcaaacttcaaggagaatacaatattgatgaggcctgcctagcactaaatatagggttgctgtgctcccaccctttaataagcgtaaggccaaatatgaggcaagtcgtgcaatatctcaacaaggacataccactacctgagtcaatgccaacacatttaagcttctacgtgatggccttgatacagaacaaaggattcagtccatgcaccataacagatccttcatcagcaacaagttttggcacaatatctagcacctcactctcagaaggaagatg

SEQ ID NO: 4583 - DNA, 2016 bp, Oryza sativa
atgaagattgcactctcctttcttctccatatcctgctgttccatggctttaatcttgtgctggccgtcagtgccagcgatgaccagttcgtcttctctggcttctccggtgccaacgtcaccctcgatggcacggccacggtcacagcaggcggcctccttgagctgaccaacggcacgacccagctcaaaggccatgccttcttcccagctcccttgagcttccgcgggtcactcaacggcacggtgcaatccttctcagcctcctttgtgtttgccatcctcacatcttaccccaacctgagctgccatggcatcgccttcgttgttgcgccgagcaacaatctatccacagcactggcagcacagtacatgggactcaccaacatcgacaacaatggcaacgcgagcaaccacatttttgctgcagagattgacaccatgcagaatgttgagttccaggacwtcaacaacaaccatatcggtgttgacatcaatggcctccactcggtggaatcacactatgcaggctactacgacaagaatggaagcttccataacatgaatcttatcagcggcgatgttatgcaggcatgggtggattatgatggagatatcgctcaaattaacatcaccattggtccaattgatatgtctaaaccaggaaggtcactcatctctaccacatacaacctctcagatgttctcatggagccatcattcatcggattctcctctgcgacaggcccaatcaactctcggcactacattcttggttggagcttcggcatgaacaagcctgctccaaacattgatattgccaagttgccaaagctacctcgccttgccccaaagcctcaatccaaggtcttggtaatcctacttccaatagctatcgcagcattcatcctttctgtgggcatcgccatggtttttctagtacggagaagacagagatatgctgaactgcgtgaagattgggaggatgagtttggaccgcatcggttcgcatacaaggatttactccatgctactgatggattcagtgacaagcatattcttggagcgggagggtttggcagagtatacaaaggaattctcccaaaatcaaaattggaggttgctgtgaagagggtgtcccatgaatcaaggcaaggaatgaaagagtttgttgctgaggtagctagtattggcaggattcgacaccgcaacctcgtgcaactacttggttattgccggagaaagggtgagctccttttggtatatgactacatgtcaaatggcagtcttgacagatatttgcattatgaagggaacaagccggtcttggattgggttcagaagttccaaattatcaaagatgttgcatctggtttactctaccttcatgagaagtgggataaagttgtcattcaccgggatatcaaagcaagcaatgtactactcgataaagaaatgaatgcacgactcggcgattttggcctagcaaggctgtatgaccatggcactgatgcacacacaacgcatatggttggcaccatgggttaccttgcaccagagctaattcacacagggaaggcatcaactcttacagatgtttttgcatttggcacattccttctcgaggtcatatgtgggcaaaggcctattaaggaagatgcacacggaaatcaaattttgttagtcgattgggtacttgagcattggcacaatgaatccctacttgacacagttgatccaaggttacaaggtgattacaatgtggaagaggcatgccttgtgctaaagcttgggctgctctgctcacacccttctactaatgccaggccatgcatgcaacaagttgtggactaccttgaaggagatacaccagttccagaattggcatcaacacaccggaacttcaacgagctagcctcaatgagaaaaaaaggttttgacccatacatcatgtcatataatccatcatcaacggtgagtttcggcactgtatctgacctatcaggaggaagatga

SEQ ID NO: 4584 - DNA, 1026 bp, Oryza sativa
atggctcctccccagcttgccggcaagatgaccgccaaggccgccgcggcggtgaagcccgcgacgagggcgtacgtgacgttcctcgcgggcgacggtgactactggaagggcgttgtcgggctggccaagggccttcgcaaggtgggctcggcctacccgctggtggtcgccgtcctccccgacgtgccggagtcccaccgccgcatcctcatctcccagggctgcatcgtccgggagatcgagccggtgtacccgccggagaaccagacgcagttcgccatggcctactacgtcatcaactactccaagctccgcatctgggagttcgtggagtacgagaggatggtgtaccttgacgccgacatccaggtgttcgacaacatcgacgagctgttcgagctgcccaaggggcacttctacgcggtgatggactgcttctgcgagaagacgtggagccacaccccgcagtaccagatcggctactgccagcagtgccccgacaaggtggcgtggccgaccgccgagctcggcccgccgccggcgctctacttcaacgccggcatgttcgtgcacgagcccagcatggccaccgccaagtccctgctcgacactctgcgcgtcaccacgcccactcccttcgcggagcaggatttcctgaacatgttcttcagggagcagtacaagccgatcccactgatctacaaccttgtcctggccatgctctggaggcatccagagaacgtccagctcgagaaggtcaaggtcgtgcactactgcgcagcgggatcgaagccgtggaggtacacgggcaaggaggcgaacatggacagggaggacatcaagatgctggtcaagaagtggtgggacgtctacaacgacggcagcctggacttcaagggcctcccgcccatcgcggccgccgacgacgccgacgaggtcgaggcggcggccaagaagccgctgcgcgccgcgctggcggaggcccgcaccgtcaagtacgtcacggcgccatcggccgcgtga

SEQ ID NO: 4585 - DNA, 1515 bp, Oryza sativa
atgcggatcaccaacggcctggccatggtctccctcgtgctctcctcctgcgacctgctccgcctctgcagcgacagggagcggcccctcggcggccgggagttcgccaccgtcgtctacctcgtcagcctcttcgcccaccctgacgcccccgccaccaccaccggcgacgacgacgacggccaggggggctcccgccgcgcgcgccccgccgccgcggagcccgcgccaatgcatgggcatggtggcgggatgatggaggccgacgacgaggagatcgtcgccgcggtggcgtccggcgcgctgccgtcgcaccgcctggagtcgcggctcggggactgccgccgcgcggcgaggctgaggcgggaggcgctgcggcgggtgacggggcggggagtggagggcctccccttcgatgggatggactaccaggccatcctggggcaatgctgcgagatgcccgtcgggtacgtgcagctccccgtgggggtcgccggcccgctgctcctggacggccgcgagtaccatgtccccatggctaccaccgagggatgcctcgtcgccagcgtcaaccgcgggtgcagggccatctccgcttccggcggcgccttcagcgttctgctccgggacgccatgtcccgcgctcctgctgtcaagctgccttccgcaatgcgggcagcggagctcaaggcgtttgctgaggcgcctgcgaattttgagttgctggctgctgtcttcaataggtccagcagatttggtaggcttcaagacattcgttgtgcactcgctgggaggaacctatatatgagatttagctgtatcactggagatgctatgggaatgaacatggtgtcaaaaggtgttgagaatgtctggggctatctgcagaatgtcttccctgacatggatgtcatcrgcgtatckggtaactattgctcagacaagaagccgacagctgtaaactggatagaaggccgggggaaatctgttgtttgtgaggctattattaaaggagatgttgtgcagaaagttcttaagacgactgtagaaaaacttgttgagcttaacattatcaaaaatcttgctggatcagctgtagctggggctcttgggggttttaatgcccatgcgagtaatattgttactgcattattcattgctacaggacaggatcctgcacaaaatgttgaaagctcacaatgcatcaccatgttggaagaagtaaatgatggagatgatcttcatatctctgtcaccatgccgtccattgaggtaggtacaatcggaggtggtacatgtctggcctcacaggcggcttgtttgaacctgcttggtgtcaagggttcaaatcatggctcacctggtgcaaatgctaaacgtttggctaccatagtagctggcagcgtgctcgctggcgagctctcgctccttgccgctcttgcctctggtcaccttgtcaagagccacatgatgtacaatcgatcaagtaaggatgtcgccaaggctgcttcttga

SEQ ID NO: 4586 - DNA, 1152 bp, Oryza sativa
atgatgaggctgaaagtgacgatactggtggtagcatttgttctcagcgccggcgtgcatatctcggcggcggcggcggccgccggccagagggaggaggtgcacctggtgccggcggtgtacgtgttcggcgactcgacggtggacgtcgggaacaaccagtacctgccggggaactcgccgctgcagctcccctacggcatcgacttcccgcactcgaggcccaccggaaggttcagcaatggctacaacgtcgccgacttcatcgcgaaactggtgggattcaagaggagcccgccggcttacctgtcgctgacgccgcagacgagccgtcagctcatgcgaggctaccgcggcgccaattacgcttctggaggatccggcattctcgataccactgggacaaccgtcgtcacgctgacaaagcaaatcgtgtacttcgcggccaccaagtcaaagatgatgtcgaacggcggcggcgatggcaacagctcgtcggcgtcggcgtcggcgatcgacgatctgctgtccaagtctctcttcctcatcagcgacggcggcaacgacctgttcgcgttcctgaggcagagcaaccggacggcgagccaggtgccgtccttctacgccgacctgctgtccaactacacgcggcacgtccaggcgctgtacagcctgggcgccaggcggttcggcatcatcgacgtgccgcccatcgggtgcgtgccgtcggtgcgggtcacctcgcaggcgggcgccaccaggtgcgtcgacgccgccaacgacctcgccagggggttcaactccgggctcaggtcggcgatggccaggctcgccggctccggtgctctcccggggatgaggtactccgtcggcagctcgtacaacgtggtgtcctacctcacggcgaacccggccgccgcggggttcaaggtggtgaacagcgcgtgctgcggcggcggccggctcaacgcgcaggtcgggtgcggggcgcccaactccacctactgcggcaaccgcaacgggtacctgttctgggacggggtgcacgggacgcaggccacctccaggaagggcgccgccgccatctactccgcgccgccgcagatgggcttcgcctcgcccattaacttcaagcagcttgtttcttcttga

SEQ ID NO: 4587 - DNA, 1065 bp, Oryza sativa
atgggcgcctccacctcgcctcgtctcgccttgctagtagtggtcgcggcggcggcgttcgtcttcgtctcgccggcgatggctttcccgatgggattgccggcgacggcgaacccgttcccgaacccgtggtccgctttccagaacctctctgggtgccacgccggcgaggagagggaggggctagggaggctcaaggattacctcagccacttcggctacctcccgccgccgccgtcgtcgtcgccgtacagcgacgcgttcgacgactccctggaggccgccatcgccgcgtaccagcgcaacttcggcctcaacgcgacgggggagctggacacggacaccgtggaccagatggtcgccccgcgctgcggcgtcgccgacgtcatcaacgggacatccaccatggacaggaactcgtcttcggctgccctccgcggccgcaacctgtacgcgatcaccgcgacgtccgcgacgtccatcgacagggcgacgctgagcgccgtgttcgcgcgggccttctcccggtgggccgccgccacgaggctgcagttcacggaggtgtcctcggcgtcgaacgccgacatcacgatcgggttctactccggcgaccacggggacggcgaggcgttcgacgggccactgggcacgctggcgcacgcgttctcgccgacggacgggcggttccacctggacgccgcggaggcgtgggtggccagcggcgacgtgtccacctcgtcgtcgttcggcacggcggtggacctggagtccgtggcggtgcacgagatcgggcacctgctggggctcggccactcgtcggtgccggactccatcatgtacccgacgatccgcacggggacgaggaaggtggacctggagtccgacgacgtcctggggatacagagcctgtacgggaccaacccaaacttcaagggcgtcacgccgacgtcgccgtcgacgagcagccgggagatggacggcagcgcggccgccgccggcatccggccgtggagtgggttcgttggattagttgtgccggcagttgtcctgctcttagctccgtag

SEQ ID NO: 4588 - DNA, 1149 bp, Oryza sativa
atggcggggtcgaagtttgggtcgttcaagtcggagaaggggagctcggcgggggcggcggcgggggccggagcggcggcgcagaggagggacccatacgaggtgcttggggtggggcgtaatgccaccgagcaggagatcaagagcgccttccgccgcatggccctcaagtaccatccagacaagaatgcagacgaccctgttgcctcggacaagtttcaagaagccacattctcttacaacatactgtcagatcccgataagaggcggcagtatgattcctcgggattcgaggccattgaagcagatagtcaggaactggagttggacctgtcaagtctgaacactgtaaatacagtgtttgctgccctgtttagcaagctaggtgtaccaatcaagaccacagtttctgcaacagttttagaggaagcattgaatgggtcggtgggaatttcccaactcgagcttggccagtccgtctttaggaaggtggaaaagcaatcagctcacttttattctgtggacataacagataaagaagccaaaatggggttagtgtgtagagttcaatcaactgctaaaagtaaattcaagttgctatatttcgagcctgaagaaaatggtgggttaagccttgctttacaggaagacagtgtaaagacagggaaagttacttctgctggaatgttctttcttggctttccagtctatcgctttgaacaaaataattcagagaaactacgatgcgtggaggcaaagatacttgcaaaacgatctgagctgtctaaatttgagtctgagtatagagaggtcttagcgaagttcaccgagatgaccagcagatacgctcaagaaatgcagacgatcgacgagcttctcaaggaaaggaatgcaattcatgcatcctacaccaacaacacaactctgcaacggagttccagtagcaacaaagggaaaacatcctctaaagagtccaaaagtgatgatgaccaaactgtgaaaaaggaaaagaaatcgaagagcaagtccatggagggatccagaagtgatgatgatggtcctagaaaggaaaagaaacctaaggaacgacttcgaaggaagaaatggttcaacatccatttgaaagtagacaagagaagaccctgctga

SEQ ID NO: 4589 - DNA, 744 bp, Oryza sativa
atggcggtggaggcggttcttgaggcgtcgagaagtagtagtgaggaggaggcggaggtgatcgtcacgcacggcggcggcggcggcggcggaggaggaggaggacaggtggaggggtgggggaagcggaagcggtcgcggcggcggcgaccgcagctgccgccctccgaggaggagtacctcgcgctctgcctcctcatgctggcgcgcgggcgacgcgacggcgacgacgtggcggcktcggcgtcggcggcggcggcggcggtggagcaccggtgctccgtctgcggcaaggcgttcgcgtcctaccaggctctcggcggccacaaggccagccaccggaagccgccgccgcccgccatggtcgacgacgacgaggtggtggtggagacgaaaccggcggctatcgcgacgccgtcctcgtcggcgtcgggcgtctccggcggcggcggcggragggcgcacgagtgcaacgtgtgcggcaaggcgttcccgacggggcaagcgctkggcggccacaagcgatgccactacgacggcacgatcggcagcgccgccggcgccggcgcgtccaagccggcggcgaagacgaccgtggcggtggcggcgagccggggcttcgacctcaacctgccggcgctgccggacgtcgccgccgccgccgaccagcggtgcgcggcggaggacgacgaggtgctcagccctctcgccttcaagaagcccaggctcatgatcccggcatag

SEQ ID NO: 4590 - DNA, 594 bp, Oryza sativa
atggcggacgaggtggtgctcctggacttgtgggtgagcccgttcgggcagcgttgccggatcgcgcttgcggagaagggcgtggagtacgagtacagcgagcagagcctcgccgacaagagcgacctcctcctccgctccaaccccgtccacaagaaggtccccgtcctcctccacgccggccgccccgtctgcgagtccctcgtcatcctcgagttctgggcggactacgtcgacaagaagctgttcgactgccagacacgcctctggaagctcagggccggcgacgccgcgcacgagcaggccaagagggacatggcggaggcgctggggacgctggaggcggagctcggggagggggactacttcggcggcgaggcgttcggctacctcgacgtcgtgctcgtgccgttcgtggcgtggttccacgcctacgagaggctcgcgggattcgccgtggcggagatctgcccgcggctggtggcgtggggggaacgatgcaaggggagggacagcgtcgccaagacgcttactgatcctgagaaggtgtacgagttcgcgctctacctcaaggccaagtttggcgccaagtag

SEQ ID NO: 4591 - DNA, 930 bp, Oryza sativa
atggcgatcccggtcatcgacttctccaagctcgacggcgatgagagcgaggccaccctggcggagctcgctgcggggtttgaggagtgggggttcttccagctggtgaacactggcatccctgatgatctgctggaaagggtgaagaaggtgtgcagtgacatctacaagctgcgcgaggatgggttcaaagaatccaaccccgcagtgaaggctctcgcccgcctggtagaccaggaaggcgagggcctcgcaatgaagaaaatcgaggacatggactgggaggacgtcttcaccctccaggacgacctgccctggccctccaaccctccatccttcaaggagacgatgatggagtacaggagggagctgaagaagctggcagagaagctgctgggagtgatggaggagcttcttggtctggaggaagggcacatcaggaaggccttcaccaacgacggcgacttcgagcccttctacggcaccaaggtgagccactacccgccgtgcccgcggccggagctcgtcgacggcctccgcgcccacaccgacgccggcggcctcatcctcctcttccaggacgaccgcttcggcggcctccagatgatccccaaccgcggcggcgacggccggtggatcgacgtccagcccgtcgagaacgccatcgtcgtcaacaccggggaccagatcgaggtgcttagcaatggccgcttcaagagcgcatggcacagaatcctggccacccgggacggcaatcgccggagcatcgcctccttctacaacccggcgcgcatggccaacattgctccggcgatccccgccgccgccgccgactacccgagcttcaagttcggcgactacatggaggtgtacgtgaagcagaagttccaggccaaggagcccaggttcgcagccctggcgaacaagtga

SEQ ID NO: 4592 - DNA, 1848 bp, Oryza sativa
atgaaggttgcctgggctggctcccgccacgccgtcgatgtcgccgaccgcatggcgcgcctcgtcgcttccgaccccgtgttccgcaaggataacaggactatgctccccaggaaggagctgttcaaggacacactcagaaaggcagcccatgcgtggaagcgtatcgtcgagctccgtcttacaggccaagggactgaagagcagcagaagaagtggctacctctggcctacaggttccaaataattggatgctatgctcagactgaacttggtcatggttccaatgttcagggccttgaaacaaccgccacatttgacccaaagactgatgagtttgttatacacagcccgacactgacctctagcaagtggtggcctggtggcttgggaaaagcttccactcatgcagttgtgtatgctcgtctgataactgaaggaaaggactacggcatacatggtttcattgtgcaactacgaagcctagaggaccactctccccttcccggtgttactcttggtgatatcggcggaaaatttggtagtggtgcatacaacagtatggataatggagttctgcgatttgaccatgtgcgcatcccaagggatcaaatgttgatgaggctttcacaagttacgaaagagggaaaatatgtgcactcagatgtcccaaaacagctgctttatgggacaatggtttttgttcgtcaaacaattgttgcagatgcttctaaggctttatcacgtgctacttgcattgctgtaagatacagcgctattcgaaagcagtttggccctcaaactggtggccctgagactcaggtcctcaattacaagactcagcaaagcagactctttcctttgctggcttcagcttatgcatttaggtttgtgggtgagtggctgaagtggctgtacacggatgtcacacataaactggaagccaaggatttctcaacacttcaagaggcccatgcctgtactgctgggttgaaggctgtgacaacatctgcgacagctgatggaattgaagaatgccgaaaactctgtggtggacatggttacctgaacagcagcgggcttcctgaattgtttgctatctatgttcctgcttgcacttatgaaggagacaatgttgttttgctattgcaggttgcaaggtttctaatgaagactgtatcccagttagcttctggaaaacagcctgttggtacaacggcttacatgggcaacatacagtacttgatgcaatgcaaatgtggtgtaaatacagctgaagattggctaaatcctgctgccatacgagaggtatttgaagctcgggctctcaggatggcggtgaattgtgcccagaacataaacaaggcgccaagccaagaagaagggttttatgagctatcccctgatctgcttgaggtggcggtggcccatatccagttgataattgtaaccaagttcatagagaaattagagcaggacatccctggtgagggagtgaaggagcaactgtgcatcctttgcaatgtgtacgcgctgtatcttgttcacaagcatctgggtgacttcctgtcgacggggagcatcacagcaaggcagggagcgctggcaaacgagcagctgggaaagctgtatgcgcaggtgcggccgaacgcggtggcgctggtggacgcgttcaactacaccgaccactacctggggtcggtgctggggcgctacgacggcaatgtttacccggcgctgtacgaggaggcgtggaaggaccccctcaacgacacggatgtgccggacggttaccaggagcacctccgccctctgctcaagcagcagctcaagctctccaggctatga

SEQ ID NO: 4593 - DNA, 363 bp, Oryza sativa
atggcccagggaagaggcagtgcagcgcaggggctcgccctcggcttgctcctcgtgtgcctcctcgtcggctccgacgtcgccgccgccgccacctacaacgtcgactggtcgttcggcgcggacagctggtccaagggcaagaacttccgcgccggtgacgtccttgtgttcagctacgacccgtccgtgcacaacgtggtggcggtggacgccggcggctacagcggctgccgggagtccggcaccaagtacagctccgggaacgaccgcatcacgctcggccgcggcacgagctacttcatctgcagcttctccggccactgtggcgcagggatgaagatggccgtcaccgccagctga

SEQ ID NO: 4594 - DNA, 1470 bp, Oryza sativa
atggctcaaacttgcttgccacctggctttcgttttcatccaacagatgttgaacttgtttcatactatttgaaaaggaagattatgggaaagaagcctcttattcaagctatatcagatgttgaactgtataaatttgctccctgggatcttcctgctcaatcctgtctccagagcagagatcttgaatggttcttcttttgcccacgagacaagaaatatcctaatgggtctaggacaaatcgttccacaccaaatggttactggaaaacaagtgggaaagatagaacgattgagcttaactctcgcattgttgggtcaaagaaaacactgatttttcatgaaggcaaagcacctaaaggcaacaggactgattgggtgatgtacgaatacaaaatggaagacaatcaattggtctctgctggtttctcaaaggatgattttgtcctctgcaaaattttcaagaaaagtggccttggtccaaggattggggagcaatatggggctccatttaatgaagaagaatgggagcatgcagatgctgaaatgtttcccttgctgccaaatgttgaaacttctgtgtttccattgctgccctcttcagaggtagtaaattctactgatgatacacgtgttcagccttctgttgctgccagagctattgaggaactacctgtgcagcatttacctcatgtatgtgctgggaatggatcaacatatcaaaatattactgttactggtgaaagtgctctcatggaactgccttcccagcactctgttgaatctattggtgatgaggtagtttctgtggacaactgttctaatgtggtcaataatgcagacagtcctgtaattgaggggcttgtattggaggaactttctaggtttttaactgattctcctcatcatggcaaccctgttggggagcactctggtctcccaccaatgtctgaggctgaagctcatgcttttgaggttagcacaaatgatctgtacaatgaaattgcagggcttgctgaattgggtgtgccaaatggtgatggattttctccgtccaatgctggtgttactgaacaacagcccacatactttggagttcctaacagtgaaaattatcatgcagttcccactgtcataactaagtccagaaccgttctagaggactctgatactgatgacctagtgggattccatatgctggcagtactgcgcaacagatgtgtcttcatggccacctgctgccgctccgagctaagccaaacctcgctgaatctttctcgtggactgttgctggatttaccagtgctcgaactggtggtcactgcaagcattgtgaggccaacaatgtacattgttttgaagactgaaacggtgcacgtatttgggctgaaattgtacaagcatatgggcggaaattgtgctagtgtacggcctgaaattgtgcgcccgtttgagctgaatcaacgctga

SEQ ID NO: 4595 - DNA, 957 bp, Oryza sativa
atggcggcgcaggtagtcgccgagcagtgtggctcgcaggccggtggggcgctgtgcccgaactgcctctgctgcagctcctacggctggtgcggctccacttccgactactgcggcgacggctgccagagccagtgcgacggctgcggcggcggaggtggcggcggtggcggcgggggcggcggtggaggttggggttgcggcgcggtggaggcggtcgtgtcgaaggagctcttcgagcagctgctgctccaccgcaacgacgcggcgtgccccgccagagggttctacacctacgacgccttagtcaccgccgccgccgcgtttccggacttcgccgcgacgggcgacgacgaggcgcgcaagcktgaggtcgccgcgttcctcgggcagacctcccacgagaccacgggcggttgggcgaccgggcccgacggcccctactcgtggggctactgcttcaaggaggagatcggcgccacggcctcctactgcgtccccagcgccgagtggccgtgcgccccggacaagaagtacttcggccgcggccccatccaactctcctacaactacaactacgggccggcgggagaggccatcggcgaggacctcctgaacaacccggagctggtggcgtcggacccggtggtgtcgttcaagacggcgctgtggttctggatgacgccgcagtcgccgaagccgtcgtgccacgacgtgatcacggggcagtggacgccgagctcgggggacatcgcggccgggcgggtgccggggtacggcgtgatcaccaacatcatcaacggcgggttggagtgcgggttcggccccgacgaccgggtggcgaaccggatcggcttctaccagcgctactgcgacgtgctcggcatcggctacgggagcaacctcgactgctacgaccagaggccgttcaacagcgggttgacggcggcgcagtga

SEQ ID NO: 4596 - DNA, 2193 bp, Oryza sativa
atgggtgagagcagaggcagcattgccttcttcgcgagctacaggccaccggtggctctggacatattctgctgcccagctccaccgtctagcccgaaggacgagctgcacctgacggacggcgactcctacaactacaactgccagcccatcccaccggcggcgctcaagacggtcgtggagcgcctcggcgtgtcccgcggcgacgccgtcgagggcgacatcgattccggccgcatcaccggcctcgtcttcgtctccgagagggagcacaacctcgagacgctccacatcgccctgcgcttcaacgacgacggcgaggtccaggtcttctccctggccgacgcctatggcggcgacggcctgttcagcggcgcccgcatggaggacagcggctgcattgccggcggctacgaggtggatggccgcacggttgaccattacctcgtgtatgtgtccaccaaggagccagtgcgagaacgtcgcagcccgtggaacgtcgcttacaagaccaatcttagaaccggcgagactgaacgcctcacaccaccaggaacatttgatataagcccatctgtgtcaccatccgggaagaaagtagcggtggcttcgtaccaagggaagaaatgggacggtgagatcaagaacctcaacaccaacatctacgtgatgagcttggagaacccgtctcaggatcgcgagcgggtgatcgagaacggcggctggccgtcgtggggcagcgaggacgtgatcttcttccacaggaaggacggcgacggggagaacagctgctggggcgtgttccggcacaccctgagcaccggcgagaccgtccgggtgacgccggcggcgttcgactcggtgactccggcggccatcgacgagaccagggtggcggttgcggccatccgccagaagtccgagttcagtgatgtccgcgtcgaggcacagtacaggcacatcgaggtgttcgacatgagatcgccggagcagccgatgcagatcacccggaacaccaggccaaaggccgaccatttcaaccccttcgtgatggacggtggcaagttcattggttaccaccgttgcaaaagcgagctcctccagcacggcgatgatctcccgagaaaatttcacaagctgcaatccccacacgaagatgtcggtgtgttcagggtgtccggtgtgttcccaacattttccaaagatggttctcagcttgccttcgttgacaacgagttcaaatccgtgtggctggccgatagccaagggatgcgtgtcgtcttcaagactgatggcccagacagcgtcttctcaccgctgtggaattccaagaaggatatactctatgtgtgcatgggaccttctttcaaagccagtgaaacgttggagatccattccatacacaatgtatccactggtgaccggaagtcgcggcagctcacgttcggaggattcaacaacgccttcccttccaccaatccagacggaacgaaatttgttttccggtcgacaagagatggaggggcaaagtacagcaagaacctgtacataatggaggacgccgacgccggagaaggcgaggatggcagccagtcgacggtgacgcggatgaccgccggcgagtggacggacacgcactgccagtggtctccgaacgggaagtggatcgtgttctcgtcgaaccgggacaggccggcggacgcgccggagcgcgaccacggcctcgacccgggctacttcgccgtctacctgatggacgtggcgtcccggtcggtggtgagggtgatcaggagcgggtacgacgtcgccgggcacgtgaaccacccggtgttcagcccggacgggcggagcatcgcggtgacgtccgacctcgccgcggtgaccgccgacccgatgtcgctgccgctcttcctgcactccgtcaggccctacggcgacatcttcaccgtggacatcgacccggacgacatggcgaggaacgaggacgtggaggggttcgtccgcgtcacgcacagccggtacgagaactccacgccggcgtggaccgtgttctccacgcacgacccgcacgcgcagtggaacctcctcgtcgtggaggacgagcacgtcccgtcgtgcccgtacgcgcatccggacggaggcgagagttggcacatgaccggccagatttgcatccccaaaaggcactgttaa

SEQ ID NO: 4597 - DNA, 507 bp, Oryza sativa
atggcatcgtcaagcgggagcsgggggagcgcggtgtcggcggcgacggcggcggcgggggggtcgtcgtcggcggcggaggaggagctgagggcgcttatggagcagcggcgggcgaagaggatgctgtcgaacagggagtcggcgcggcggtcgcggatgcggaagcagcgccacctcgacgacctcaccgcgcaggtggcgcacctccgccgcgagaacgcgcacgtcgccaccgcgctcggcctcaccacccagggcctcctcgccgtcgacgccgagaacgccgtcctccgcacccaggccgccgagctcgccgcgcgcctcgcctccctcaacgacatcctctcctgcatcaacaccaacggcgccgccgccgccgccgccgccgccctcaccgtcgccgccgccaccgacccgctcctcgccttcgactccgccgccttccgacgacctcttcagatcctcccccgagctgttccagctttgctagctcaaacacactga

SEQ ID NO: 4598 - DNA, 1910 bp, Oryza sativa
atgacggaaagatgtgatgacctaatagttgaaacaagggaaatgtttgtagacatcctcaatccatttgcaaaaatgaagcttatcgatgcacttcaacgtcttggagtatcttatcattttaaagaagaaatagataactccctagaaagtctagtttctgtgaagtttgcgaatgatgatttccatgcgatctcccttcaattccggttgctaagacagcagcggcgctacatgccatgcgatgcatttaaagaattcattgataaacaaggaaacttaaacggaaccctatgtagtgatacaagagcattacttgctctatatgaggcagcacatcttggaactcctaatgaagaaattctccgagaagcacaggttgaaacaacaaatcaattgaaaagaattgtggattgtattgagaaaccactctctaataaagtgagacatgctcttgagacaccatctttccgtaggatgaagaggttagaggccagactttacataccattgtatgaagaagataaggaggagtgcaacgagatgatacttgagctagcaaaacttgacttttatttattgcagcgacttcaccgggaagaagtcaaagaaatatgcgagtggtatcatgggctagagtccccacgtgaactattctatgcaaggcataggcctgcagaagcatatttttgggcgttgggtgtgtattatgaaccagaatatgcaaagcctaggaagttgctagcgaaattcatagcaactattacaccatatgatgatacttttgacaattatggactctggaaagagcttcaaccatttgctgacgtgatgcaacggtgggatgaaaagggtgctgagcaacttggaagatgttacaaggaatatgctcaatttatgtttggcaccatgaatgagattgagggtgcactcccaaaaggaacaccaaggaagaatgttaatgttatcaaagatataatcactgaagtatgcaaaggctatgtaacagaaatcgattggagagatagtaaatacattcccccattaaaggagcatttgcaaatcacactagttacgtgcttctattgggcaataaactgcactgcttttgttgtttttcaagaaggtgttacagaggaggttatgatatggatgtcaggatttcctcaaattgtcaaggattcatgtattgtttctcgactaatggatgacattgttgctcatgcgtttgagaccgaaaggaacaatgttgctaccgctgtaacttgctatatgaaagagtatgacagcacaaaggaggaggccattaaagcactgtggaatgatgtggaaaatgcatggaaagatatgaacgaggagtacctaaaattgacctcaattccgtcttccttgcttatccagagtgtctctattatgaataatcgtgtatccaagcttgcttcggatgatcctatgaagcacgtgggacccaccggcgacgacaggcaggaggccaatgctgccgctgccgtgccttttgatgctctcaccatcgccgcagtccttggcgccagctccatctccgcgaaaacacgaacactttaccaccacagagggcaagaacgatgttctcaaaacagtcctacgacatgtctactttgccgcaagccacttgaaagcgctggcgaggccaaaggcctcccggccactaacttgctgaaccaccttcatggacaaacaccctctcctcatctccccaagggctccacgaccatagtctggaagcaaaccagccaaaagaggagaggagcaccaaggaaggggaggaggcctggctggccaaaagaggaactgaaagttgaagataggagcaccaaagatgtagttgtcttctatgtcaccaatgagaaattgaaagggaagagatccta

SEQ ID NO: 4599 - DNA, 2180 bp, Oryza sativa
atgtcggccgcggccggggcggccaccctcgtcgcctcctccgcctcgctctccgtgcccgaccacctccgcctccgccgcttccgcctccaccttcaacccgcgcccgccgccgccgcatccccagctccggaggaccggtccccctccgcgccggatgaggaggcgaggaggtacgggctcaacgggagcgccccgagcagcggggtcgggtacgacgatgccgccgtggaggcctacctcgggaccaacggcaacgggagggggaacggtgcggcggcggtggtgaagcccgccgcggagtcacggagcagcgccgccttggtgtccgcggggcctgggccgggggatgatgagaggaggaggaaggagcgggtggaggagatcggcagggaggacgcctggttcaagcagagcggcggggattccaagcccgagaagttcacttatcgaggagggatgacggaggagaaaagggtaatgaggaggaaagttcttgccaagtggcttaaggagagtattttgagactaggtcccacatttatcaaaattgggcagcagttctccaccagagtggacattcttccacaggaatatgtcgaccagttatctgaattacaggaccaagttcctccatttccttcagagacagcggtgtcaattattgaggaagagctaggggcatctgtgaataagatttttgatcgatttgactttgaaccaatagctgctgctagcctcggccaggttcatcgggcatgcttgaatggcaaagaagttgtcatcaaagtgcaaaggcctggtctgaaggagctatttgatattgatctgaaaaacttaagggtaatagcagaataccttcagaaagtggaccctaagtcagatggtgccaagagagactgggttgctatctatgatgagtgcgcatctgttttgtatcaggaaatagactatacaaaggaagcatttaatgctgaaaaattttctgaaaacttcaaaaatatggattatgtgaaggttccagagattttgtgggagtatactacacctcaggtcttaacaatggaatacgtcccaggaatcaagataaataggataaagcagctagataagttaggagttgatcggaaaaggttaggtcggtatgctgttgagtcgtacctggagcagatcttatctcatggatttttccatgcagatccgatttctttacagcatccaggaaatattgctgttgatgatgtcaacggtgggaggcttatcttctacgactttggaatgatgggaagcattagtccaaatatccgggaagggttgctcgaagcattctatggagtttatgaaaaagatcctgataaagtgcttcaatcaatgattcaaatgggtgtccttgttcctactggagatatgacggctgtcagaagaacagctcaatttttccttgatagcttcgaagagcgtttagcagcacaaaggaaagaaagagagatggcgactgaggaacttggatttaagaagcaattaactaaggaggagaagtttgaaaagaagaagcaaaggcttgctgctatcggagaggatcttttgtcaattgctgctgatcaaccatttcgatttcctgccacctttacttttgtggtcagagcattctcagtactagatggtatcgggaagggccttgatcctagatttgatatcacagagattgctaaaccatatgctatggagttgcttagatttaatgaagctggagttgaagttattgtaaaggcaaacttgagagttttaagcgctcttggttttattttacctcaggatgcgaggaagagatgggaaaggcagtcccgtgcattctacaatttatttcgccagcccgacagagttgaaaagcttgcgcaaatcattgagcgtttggagcaaggtgatctcaagcttcgtgtcagaacattggagtcagaaagagcattccaaagagttgcagctgtacagaaaacaattggatatggagttgccgcaggtagtttggtaaacctcgccaccgttctctacctcaattcaatccggttgccagcgaccatagcatactctctctgcgcgttcttcggcctacaagtccttgtcggccttttgaaggtcaagaagttggatcaacaggagagactgataaccggcactgcttg

SEQ ID NO: 4600 - DNA, 1200 bp, Oryza sativa
atggcggggtcctccggcgcgccacctcctcctcctccgcacagcgtcgaacgattctacctgcctccccattcccgccgccagcagcagcagcggctgcgagcacgtcctcacgtgtccgtcgccgtccccgcggtcggggaggcacaaggcggccgccgcggcgccaccggcggtggtggctgcggcggcgcgactgccacgaccaccgcggctgacgtgaatgtgacggcggtggaggagagtgggaatttggagaggtttctcacctccaccactccctccgtgcccttccaatacctgcccaagacaagcttgaaaatgtggaggactggtgattgtacaaatacatcaccatatttctgccttgaagatctttgggaatctttcagggagtggagtgcttatggagctggcgttcccctgttgctaaatggcagtgactctgtaacacagtattacgtgccatatctgtctgctatccagttgtatgcagatccatcaagatctgtttcaagaaccaggcgccttggggatgaaagtgatggggaatacctggatgctagcagcgagagtagcagtgaaactgatgttgaccgattaagagtctcatccgtggaagctacacatgggatggcaaatggtagtttgcgaactgatgatgctgatggttatgcatctgcaagttctccaatctttcagtatatggagagggatcccccgttttgtagagaacctctgacagacaaggtatcaattcttgctagtagatttccagctctgaaggcattcaaaagctgtgatctgctgccatccagttggatgtctgttgcatggtaccccatatatagaattccaacagggccgacgttggaagaccttgatgcctgtttcttgacattccattgcctagcaacaccttctaaggatagcgatagcactacaccagcatgccctggttttggtggcatcagcccttgcgcaaatgcaactggcaagctatctttgcctgcctttggactggcatcttacaaacttcgcagctccatttgggcatccgatgggacccaaggacagcgtgtcacctcgctgatggaggaggctggcaactggctcagctgcgtacaagtagagcatccagatttccgttttttcgtctcccgttccgctgccttgagcacatctgcctatggcacatag

SEQ ID NO: 4601 - DNA, 2600 bp, Oryza sativa
atgaagctctctccgccggcgtcggcggatatgccgcaggccttgccggagaacgacggggaacaaagatgtctgaactcggagctgtggcatgcatgcgctgggccccttgtgtctttgccagtggtcaggagcagggtcgtctactttccacagggccatagcgagcaggttgcggcatcaactaataaggaagttgatgctcaaaycccaawttatccaaacttacctcctcagttaatctgccagcttcataatgtcaccatgcatgctgatgcagagacagatgaagtttatgctcagatgacattgcaaccattgagcccggaagagcaaaaggagcctttccttccaatggagttgggtgctgctagcaagcaacccactaattacttctgcaagacattgactgcaagtgacacgagcactcatggtggtttctctgttccccgccgggcagctgagaaagtcttccctccactagatttttcacagcagcctccggcacaggagctgattgcaagagatttgcatgataatgaatggaaatttcgccatatatttcgtggtcagcctaaaaggcatctcctgacaacaggctggagtgtgtttactgttatgccctcttccgtgttgtcaagcgatagcatgcatataggtcttcttgcagcagcagctcatgctgcagccacaaatagtcgcttcactattttctataaccccagggctagcccttctgaatttgtgattccattggccaagtatgtgaaagctgtttaccacacacgtgtatctgttggaatgcgttttagaatgcttttcgagacagaggagtcaagtgtcaggcgatacatgggtacaatcaccagcataagtgatctagattcagtgcgctggccaaactcacactggcgttctgttaaggttggttgggatgagtccaccactggtgataaacagccaagggtttctctttgggagattgagcctttgacaacctttccgatgtaccccagtgcttttcctttaagacttaagcgtccgtgggcttcaggactgcctatgcatggcatgttcaatggtgggggaaatgacgattttgcacgctattcttctctcatgtggcttcgagacggaaatagaggaacccagtccctgaattttcaaggacatggagtctcaccatggcttcagccaagaatagattctccattgctgggccttaagccagacacgtaccagcaaatggctgcagcagcactggaagaaattcgatatggggacccttcaaagcagcatccagctactctgcaataccaacagactcataatctgaacagtggattaaattctctgtttgcaagccatgttctagggcaggtgcagtttcaacctcagcagtcacccctgcaagttgttcagcaaggccattgtcagaacactggtgactctgggttccttcaaggtcagcttccacggctgcagttgcataacactcagcagctgctaaaggagcaagagttgcagcagcagcaaagacagcatgttttacaagagcaatctagtcaagagatgcaacagcagctcccatctagtgatcatcatgttgctgatgtagcttctgagtctggatctgctcctcaggcacaatcatcattgcttagtggatcatcattctacaatcagaacctcttagaaggaaatagtgatccccctttacatctacacaacaatttccacaacttctctaaccaggaagcctcaaaccttctwatttkgcctcgaagtagccaattaatggcatcagatgggtggccttcaaagcgattaactttagaatctgctgttcatcctgaagctccgtccatgcaccccaagattgagaaagtaaatcaccagggtatatctcattttcctggcgcctttccaccacaatcagcaagaggctgttccatcgtccaggattgcagggcagatgctgagaaccgcctactttcatcatcatttgaactccaggatggcatgacaagcatcataactgatgctaacagagaaactgatactatggccatacctttgttgagatatagtggtgcagatttgacaactgaaaacaccttagcaacctccaattgtttaggtgaatctggaacgttcaatcctcttaataacatatctgtaaatccatcacaaggagcaacctttgtgaaggtttacaaatcagggtcccttgggagatcacttgacatctccagattcagcagctactgcgagttacgtagtgagcttgagcgtctctttggtcttgaaggccaactggaggaccctgtaagatcaggctggcagcttgtatttgtcgaccgggaaaatgacattcttctcgtcggcgacgatccatggcaggagtttgcaaatagcgtatggtgcatcaaaatactctcgccacaggaggtgcagcagttggttcgtggtggagacggccttctgtcctcacctggagcaaggatgcagcagagcaatgcctgcgacgactattctgcaagccacaacatgcagaatatcgccggaaacattgcatctgtagcgcctctggactactg

SEQ ID NO: 4602 - DNA, 897 bp, Oryza sativa
atgaccaccgcccagccactccagcacgagcatgacccgtccccgccggagccggacgccgacgccgacgacgaggaggaggagtcgcgggtgtggtcccagatcaaggccgaggcgcgccgcgacgccgacggcgagccggcgctggcgtcgttcgtgtacgccaccgtgctctcccaccccaccctcgccggctccctcgccttccacctcgccaacaagctcgcctcctcctccacgctgctctcctccacgctcctctacgacctcttcgccgccgcccacgccgcgcgccccgacctccgcgccgccgccgccgccgacctcctagccgcgggcgcccgcgacccggcctgcgcgggccgcctctcccactgcctcctcgactacaagggcttcctcgccgtccaggcccaccgcgtcgcgcacgcgctctgggcgcagggccgccgcgccctggcgctcgcgctccagtcccgcgtcgccgaggtcttcgccgtcgacatccacccggccgccgccgtggggaacggcgtcctcctggaccacgccaccggggtggtcatcggcgagaccgccgtcgtcggcgacggcgtgtccatcctccaccacgtcacgctgggcgggaccggcgaggccgtcggcgaccggcaccccaaggtcggcgacggcgtgctcatcggcgcsggcgcgaccatcctcgggaacgtcaggatcggcgccggcgccaagatcggggccgggtcgctggtgctcgccgacgtgccgccgggggccacggcggtggggaacccggcgaggctgctgctcggcggggaccagcgcggcggcgcgccggccggtgaatccatggaccatgcctccttcatgctggagtggtcggattacaccatttga

SEQ ID NO: 4603 - DNA, 1278 bp, Oryza sativa
atggatgaagttgctgagattgctgatgctatgggtacggttggcattgataatggggcaagccggaagttgttgtcgaacgagagtttagaggascgaggagaagagcatgatgtgcaggctgatggggcgcactcgggtgagagtgaggtgatcaaccccgctgaggaggtgggtggagaagccacctcacagccagaagacgtaaagccgcgtgtttccaagggaagccaaagtcattcccctaaggttactaccaaatctcagcgccagagcccacgaagtggagataagagtcaagctaggaaaaacagtcccggttctacttatcccaaggcacccattgcacgagtgtctgacccagatttggttgatagctcttcatgcaatgatggtgctgatattaagaaaaaggctgaaaagagcagtttccgtccagttgccagggcgagtcaatcactggaggactcaaagtatgctgtttgtttgttgacagcttattttttttgtgaaccattctaccaactaccaattgaagctcatattgatagtgtttcttgcattgacacattcctcatcaaacccagggaaaagaagaaaactcagaaaacatcaaaccaatgttctgtcaaaaatgatgaagaagagccaaactgtgaaaaagtaaagcctcaaagggttggcagcactcctgcgtacggatttgcattcaaatgtgatgagagagctgaaaaaagaagagagttctactcaaagcttgaggagaagattcatgcacaggaattggagaaaagcaacatgcaggcgaaatcaaaggaaacagaagaagctgaactcaaaaagctaaggaagagtttgaattttagggcaaatccaatgcccagcttttataaggaaccacctcctcccaaggttgagttgaaaaagcttcacacgtccagggctccaggctatgcttcgcagggacatatccctaccaccagagctagatcaccaaagcttggccgctcaaagaacacaagctcagtaagcactgaagaaagtaccgttccttcaagccgcccagctcgtctgagcctggatgaaagggcctcccagaatggtgtgaagaaggtgcctgctgcgaacacggtgaggaagccccaacggaagtctctccccaaactgccatcagagcaaacagtcactgaacaggtagaaaacaacacgtcggctacagatcccgttcgggagctgatccgtgcccaagttaccccggatgatcaatttggtggatag

SEQ ID NO: 4604 - DNA, 4850 bp, Oryza sativa
atggaagcaccaccggagacctcaaagccggcggaggctaaaccgtcaaagacccggctgtctgtgcccaccggcaggtttgcattggggacagcttcttcaatcaagaagcggactgatgttgctccctcagccgagttggggatgtcaaggtcatcgttgacgaagtctacctcgtctatgaatgctgctccagttcagagaagaagcagcacaggaagtgcggggaagcaacaggataatgggagctcagttgttgctaagaaagctagtccttctctgtcagatggggtgaagaagagtaaaccagtgacagcctccatggtcagctcaaaatcatcactggaaaagaagtcatctgtgcagtctgagagggccaaggtggatgcgatgaagaagcctgctgttaagtcatcaccaatttctactctgaagaaagtcccatcactgacagagaactccagcagtagcgctagcagcagcttcaggagagcagcctcaaatgctactctcaactcaccacggtcaccttcagtgacaagcagcgtcacgaaaaaaagacttgattcaagaggtcatagggtacgaactctgaagcagttgagattaacacctgtacttgaattkgtttatctcrgggacaatcgtctatcaagtttggagggtattgagattctcaaaggggttaaggttcttgacttgagttttaatgaatttaagctccctgggtttgagccccttgagaattgcaaacttctccagcaactttatctcgctggaaatcaaataacatcccttgctacccttcccgagcttcctaacttggagtttctctctgttgctcaaaataggttgaaatcactctgtatggctagtcagcctcgacttcaagtactagcagccagcagaaacaaaatatcagttttgaagggatttccgcatttgccttctctggagcatttacgtgttgaggataatccacttcttgagatgccacacttggaggctgcttctattctgcttgtaggccctaccttgaaaaagttcaatgaccgggatctgaaccccggtgaggctgaagttgcgaagcaatatcctgctcatacagctatttgcattcgtgatggttgggaattttgctctcctgaacttgctgctgattcaacattttccttcctacttgagcaatggaagaataagttgccgcaagatttgatagtgaagaaagctcatgttgaccatccatttgaagaagatccctgtcattgccattttagcttcacaaatcagtgtgatgagggtgaactagtcctcaaatatcagtggtttataggtgacaagacaccaactgattttgtgcctcttcctgaagaattaagtgaggtatactggccaaagcgtgaagatgttggaagatgtctgaaagttgaatgcactccaatattgaatgatgctgaattcccgcccatctttgctgtttccttacctgtttctccaggtactggttgtccaaaggtcatcaatctgacggtccatggtgatttggtggaaggaaatgtactcaggggtgttcctgagattgcctggtgtggtgggatgccaggaaaagtgaataccattgattttgttaaaccttcttttgaggctagttggttaaggagaagatggaacggcaatgctgttgtaatagatggagctgacaggatggaatatcagctaaccctagatgatatcgattcaagtttggtatttatgtacacccctgttacagaagatggtgttaagggagagccccaatgtacaatgacagattttgtaaaggctgccacaccatcagtcagcagtgtacatgttgtgggagacattgttgaagataacacaatcaaagggaatggaaagtattttggtggcaaagagggattaagcaaattcctctggtttagagagaaggaaaatgggtatgaccgtatgagccatactgccattagtttgtcatctttgagtattgataaaacacctttatgtgaatttcttctagtgctatcaaatagcacggagtacacgctaacaaaggaggatgtgggtcggcccctcaaatttgtatatgttcccatcaaccttgaaggtcaggagggtgaagctgcttatgctatgacagatgcagttaagaaagcacctccaaaagtcttggatttgaagatagttggggaagcaagagaaggaagcaaggtgtctgctactgctactgtcaaaggtggcactgaagggttcagcagggttcaatggttcataggatcttcatccaaatttttaaatgagaatgaactcagagtcctcactacatctaaagtttctaagacattccgcattcctctcagtgctgttggatattatattgttgcaaagtttacccccatggcacctgatggtgaaactggtgaaccagcctatgctgtgtctgctgrtgttgtggaaagagggccaaatgttgacagcatcatatggttacatttgggggacatgaaggcaatagtttatttaggttggcatcttcatgagactgaggatgatgaaggcagtctggtttcagaggcatcaggtctgctacaataccaagttacaaaggaagctgttggaaagttcctttctttcaaatgcgtacctattaggaatgatggtatacttggaaggccaacaatactttctcttgaactaactggtgaggccattgaggggaccacaatggttgccagcagaagatattggggaggagaagaaggggagaccatattccgttggatattgactagttcagatggatcacaaaaacaaattgaaggggctgcaagttcatcatacaccttgaactgtaatgatattggcttttacatatctgtcttgtgtgagcctgttagaagtgatggagttcatggttctttggtgtcaacagaagagtctggtcctatcttacctggaccacctacatgcttatctcttgagttagctggccctatggttgaaggtggctgtttgacctttcatgctgagtatacaggaggtttcaagggagactgcatccaagaatggttcagattacattctgatggcagcaaagagaaattgtctactgatgaatgtctagatcttactctagacgatgttgattcgcgcattgagcttatattcacacctgtacgagatgatggatcacaagggtcacctaagagtgttctatcggatacaattctacctggggaccccaagggtgttgatcttgttctaccagagtgttttcaagacaatgaaatttctccaatcaaaacctactttggtggtaaggaaggcactggaaaatatacatggtaccgaactaaagagaagcttgacaacttggaggctgatctggtggcttcatgttctgaagttggagtaaatttgatgtacaaaccttcgttagatgatgttggtttctacttgattcttcactgggttcctgcacgatatgatggagagatcggtgacccgttggtggctgttaccagtgaccctgtcatggcagcatttccatctgtttcggatgttcacttgaagcagaaaagttcattgttgtatagcggaacaggagtctattatggtggatatgaggggtcaagcttgtataagtggtacagggaatctagtgatggaaccaggcattgtatagatggtgctgatttaattatatatgaagtgacagatgcagattatagccgccgtctactgtttgggtacattcccgttcgttctgatgggatcattggagaagaaaggctctctgagccatctgatataattctccctgaacgacttaaaatcgaagcactctctttcaagggaaatcaggttgagagagagacactgactgttcttgaacaaattccaagcactgcagttcaacaacatctatggagtaactacaagaaagagataacatatcaatggtttgcttccagtggatctgaagtggatcagacttttgagccactggctaaccagtgctctcgctcatacaaagtacgtttcgaagatattggccgatgcctgaaatgtgaatgctcagtctctgatgtatttggacgatccagcgaattgatatccattgtgactgctccgatcttaccaggaaaacctaaaattgaaaaactggagattgaaggaagaggtttccacactaacctgtatgctgttcggggtacctattctggaggcaaagaaggcaagagcaaaatccaatggctcaggtctatggttggaagcccagatcttatctctatacctggcgaaattggaagaacatatgaagccaatgttgatgatgtaggttatagacttgttatcatttatacacctgtgagagaggatggagttgagggacaacctatctctgcttcaacggagccaattgcagttgagcctgaaatttacaaggaggtgaagcagaagcttgatgatggatctgtcaagtttgaggttttgtgtgacaaggacagaacaccaaaaaaggcacaagtgatgggacatttggagcgaagaattttagaagtgaataggaagaggatcaaagttgtaaagcctggatccaaggcatcattcccaactacagaagtgcgaggaacatatgttccacccttccatgttgagctatatcgcaacgatcagcaccgcttcaagattgttgttgatggtgagagcgaagttgacttgatggtgcaaactcggcacatgcgagacgtcatcattctggtgattagaggtcttgctcaaaagttcaacagcacatctctcaactcactcctcaagatagaagcatg

SEQ ID NO: 4605 - DNA, 4686 bp, Oryza sativa
atgggctctgcggcggcggctcgcacgccctgggctctgcagctcggcgtggcgctggccttcctgctggccactacctgccatggcctgaaccatgaaggctggcttctcctgacgctgaggaagcagatagttgacaccttccaccaccttgacgactggaaccccgaggatccatcgccgtgcgggtggaagggcgtcaactgctcgtcggggtctacgccggcggtggtgtccctcaacctcagcaacatgaacctgtcgggcaccgtcgacccgagcattggtggcctggctgagctgactaaccttgatctgtcattcaatgggttttctggcactatccctgcagagattgggaattgctcgaagttgacggggctcaacttgaacaacaaccagttccagggcacaatccccgctgagctcgggaagctggctatgatgatcacattcaacctgtgcaacaacaagctctttggtgcaatacctgatgagattggtaatatggcatcactcgaggacctggtagggtacagcaataatctctctggctctatacctcatactattggtaggcttaagaacctgaaaaccgtccggttaggtcagaatgcaatatctggtaacattcctgtcgagataggtgaatgcctcaacctggtggtgtttggtcttgcacaaaacaagttaggagggccattgcctaaggagattgggaaactgacaaatatgacagacttaatattgtggggaaatcagctttctagtgtgattcccccagagattggaaactgcataaatcttaggacaattgccctttatgacaataatctggttgggcctattcctgcaacaatcgggaacatccagaaccttcagaggctatacctctacaggaatttattaaatggtacgattccgttagaaattggcaatctttctcttgcagaggagattgacttttcagagaatgttttaactggaggggtaccaaaggaatttggcaagataccacgattgtatttactctatctcttccaaaaccaactcactggccctattcctaccgagttgtgtgtattgaggaatttgagtaagcttgatctttcgatcaatacactcagtggcccaattccagcctgttttcagtacatgagcagactaatccaattgcaactattcaacaatatgctgtcaggtgacatacctccaagatttggtatctatagccggctttgggtggtggatttctcaaataataatataaccgggcagatacctcgagatctttgcaggcagtcgaaccttattttgttgaatttgggggctaacaagctgattgggaacatcccccatggaatcaccagttgtaaatccttggtgcagcttcgtctcgctgataacagtctgacaggaagcttcccaactgatctctgcaatctggtgaatttgacaacaattgagctgggtcgaaacaagttcaatggtcctattcctcctcagataggcaattgcaagtctctccaaaggcttgacctaacaaataactatttcacatcagagttgcctcaagaaataggtaatctgtcaaagctcgtcgtcttcaatatatcatccaatagactaggcggaagcataccattagaaattttcaattgcactatgttgcaacgcctagatctcagccaaaatagcttcgaaggttcattgccaaatgaagttggcagcctgcctcagctggagctgctatcatttgctgacaataggctctctggagagataccacctattcttggtaaactttcacatttgacagctctacagattggtggcaatcaattctctggtggaataccgaaggagcttggactactctcaagtttgcagatcgccatgaatttgagttataacaatctctctggcaacataccatcagagcttggtaatcttgcattattggaaaatttgtttctcaataataacaagctgacaggtgaaatcccagatacctttgcaaatctgtctagtttgcttgagttcaatgtctcctacaataatctcaccggcgctctccccactataccactttttgataacatggcgtcaaccagctttcttggaaacaaaggactatgtggcggacaacttggcaaatgtgggtctgagtcaatatcttcttcccagtcatccaattcaggcagcccccctttgggcaaggtcatagcaattgttgctgctgttattggaggaatttcacttattcttatcgttataattgtgtatcatatgagaaaaccactagaaacagtagctcctttgcaagacaagcaaatattttctgctgggtctaacatgcaggtttctaccaaggatgcatatacatttcaggaattggtttctgccacaaataattttgacgagagttgtgttattggaagaggtgcatgtggaacagtgtacagagccatcttgaaagctggacagacaattgctgtaaagaagctggcttctaacagagagggaagcaacacagacaatagttttcgtgcagagatccttactctaggaaagataaggcatcgtaatattgtgaagttatatgggttcatctatcaccagggttccaaccttctgttgtatgaatacatgccaagaggaagccttggggagttacttcatgggcaatcttcgtcttcacttgattgggagacacgcttcatgatagccctaggatcagctgaagggctatcttacttgcatcacgattgcaaacctcgcatcatccaccgtgatataaaatcaaataacattttacttgatgagaactttgaagctcatgttggtgactttggattggcaaaggtgatagacatgccatactcaaaatcaatgtctgcaattgctggttcatatggatatatagcacctgaatatgcatacaccatgaaggttactgaaaaaagtgacatatacagttacggcgtcgtactgctggagctgctaaccggacgtgcccctgtacaaccattagaactgggaggtgatctgtgcacagttcagttggacgaaattgaagaattggagaaaggaagcggtcacatctcggtatctcacccgtggcagcgcgggagccgcatcactctcagcgtccacttccaccgaagtaccgaacaccccgtccccatcatcacctcaccatggcggcagagggagaggaggcgaggagcccgcacgtcgtgctcttccccttcctcgcgcacggccacatcccggccttcctccgcctcgccggccacctccagacgctccgcccgggcctcgccgtcacgctcgtctccaccccacgcctcctcggctccctctccctcccggccacctcccctccgatccggctccacgcgctcccctttgcgcccggccgaccacggtctgcccgacggcgccgagtccctcgccgacctccacgtccaccagttcatcaccctcttctctgcscgacggckccgagtcctcgccgacctccacgtccaccagttsatcaccctcttccgggmctccgagtccytccgcycggccttcgatggcttmgtcgctggcatccggccccccgtctgcgtcatcgccgactccttcttcgcgtggacggccgacgtcgcgcgcgcgcggggcgcgtcccacgccgtgttcctccccggaggcgccttcggccacgccgtcttcttctccgtgtgggagcacctcccgcacaccctcacggccggcggcgacgagttcccgctgctgcccgacttccccgacgtcgtcctccaccgcacccagatcccgcagtacatgctcgccgcgacgggggcggacccctggacggcctttcttccggcgggtcatcccgtgctgccgcaagaccgacgccgtgctcgtcaacaccatccaggaactggagacctccgggctagacatgctcagagcgagcttcggcgtccagacatgggcgatcgggccgatcctcgcggcgccggatccttcgaaatcgcaggacggacgacgacgaacaccagcatcatccggtggctggacgcgcacccgcggcgctcggtgctgtacatctcgttcgggtcgcagaacagcatcagcatccgtcagatggcggagctggcgctggggctggaggcgagcgggcggccgttcgtctgggccgtccggccsccsgtggggttcgaccccaaggacggattcgatcccgggtggctccccgcccgattcgaggaccggatgcgcgcgcgcaggcagggggctggtggtgccccggttggcgccgcaggcgcggatcctggcgcacccgtccacgggcgcgttcctgacccactgcgggtggaactccatcctcgagagcctccgccacggcgtgccgctgctcgggtggccggtgggggccgagcagttcttcaacgcgatggtggtggtggagtggggggtgtgcgtggaggtggcgcgcgggaacctggagagctcggcggtggagagtggggaggtggccgaggccgtgggggcggtgatgggggagacggagaagggcgaggcgatgaggaggaaggcgggggagatcgcgcgcgcgatggcggcggcgtgggagggtccggccgggtcgtcggcggcgagcttggaacggtttctcagatgcgttga

SEQ ID NO: 4606 - DNA, 1860 bp, Oryza sativa
atgaagcccgtcgagcgcgccaagctggtgcggagcctccggcaggagtckcggcggctkcgcctggtcgtcctcgtsatmggcttcttcctcgtcacactcaccttcgtcgtcatctccaagcccgacgccctcctcttcaaccgtacgccatgccgtcgccgcttcttcatcatcttcttcttctttttcttcttggatccttggatcgatggtaacaccaagcgcctcactcgtttctttgagttcgcagtgaacggccggctgtcggtggatcatgcgccgcgctcgctcctgatccgccagcggatccacgccgactccaggagatccgccgataccttccccgccgccgaggatcccaaggtggtggacgaagacgaaggcgccgaggacgccaccgccaaagggactagtgaggaggagaagaggctactcagtagtgagcccgagcaaggcaagaacgaggaggcggccactgcatctgaggtgttaggtggtggaggcgaagaggataataagaacggcgaggaagaggggcacacacagcatagcaaggtgaccctcccgactgtttccaattataccatccgtgatgctgaagacactgacaatggcaagcaagaagatggcaaaccgaatgaaaaatatgaatttgagatggacgcggacaagggagacaatgtggaaccagaaactgataatgaggagtggaacaagaaaccactatgtgatttctcaaacttcagagcaaatgtctgtgagatgcggggcaacattaggattcatcccaatgcaagttctgtcatgtacatggaacctgccagttcaaagagagaggagatatggaaagttaagccttaccctcgtaaaggtgacgagctctgcctcggccatattacagagataaccgtgaaatcaagcaaagtggcacctgagtgtagcaagtatcacaatgtgcctgcagtggtctttgctctgactggatacactggaaatctattccatgacttcaccgacgtgcttgtccctcttttcacaaccgcaagcgaattcaatggcgaagttcaattcctaatcacagacatggctatttggtggacaaggaagtataaggtggtgtttgataagctatccaagtaccccttgattgacttcaacaatgacgatcaagtgcattgcttcaagcatgcaattgttggccttcatgcttacatggagttcacaattgactcatcaaaagctccacataactactcaatggtggattttaataggttcatgcgcaggacctactcactgcctagggattttgtaactgcgcttggtgagattcccaaagccaagccaagactgctcattatatccaggcagaggacaagaatgtttctcaatcttaacgagatagtggcgatggctgaggagataggttacgaggtggtggttgaagaggccaatgtgagctctgatctctcccattttggcaaggttgtcaactctgttgatgtgatgatgggtgtccatggtgctggactcaccaactgtgtgttcttgccacaaaacgctacattgattcagattgtgccatggggtggactagactggatatcaagaattgatttcggcaacccagcggaacaaatgggcctgcgttacaagcagtatagcattggtgtacatgaaagcagccttactgatcaatatcccctagatcatgagatcttcacaaatcctctttcgttccacaaacatggatttgaattcatcaggcagaccttcatggataagcaaaacgtcaagcttgattgcaaccgattcaagcctgtactcttggaggttcttgatcaattgaatcaatag

SEQ ID NO: 4607 - DNA, 1872 bp, Oryza sativa
atggagtccggcctcgtcgcaagccaccgcctccgcgtccccttcgccgccgcccaccaccgccaccacccggccgcgccgccgcacctcctccgccagcggcggggcagcgtcgccgccaccccactccggctcgggctccacctccccacgccgaccccgctccgcctccccgcsgcgytcccgctccgcccttccctcccgcctctccgsgccgccgccgcktcggcggcggaaccggagccgttcctgggcgtggagacgaagacgctgaagaagatcgtgccgctggggctcatgttcttctgcatcctcttcaactacaccatcctgcgggacaccaaggacgtgctcgtcgtcaccgccaagggcagcagcgcggagatcatcccgttcctcaagacgtgggtcaacctccccatggccatcgggttcatgctgctctacaccaagctcgccgacgtgctctccaaggaggccctcttctacaccgtcatcttccccttcatcgccttcttcggcgccttcggctacctgctctaccccatgcgcgacgccatccaccccaccgcgctcgccgaccgcctcctcgccgcgctggggcccagcttcctgggcccagtcgccatcctccgcgtctggagcttctgcctcttctatgtcatggccgagctctggggcagcgtcgtcatctccgtgctcttctggggattcgccaatcagattactacggttgaagaggccaaagagttttacccactgttcgggcttggggccaatgtggcactcatcttctcgggtcgcacagtgaaatacttctcaaacatgaggcagaatttgggtccaggggtggacggatgggcgatttcattgaggggcatgatgagcatagtggttttgctgggccttgtgattgccggcatctactggggagtaaacaagtttgtaattgataaatcagctgcgccagtcgtcgagcggaagaagaaggataagccaaagctgagtatgggagagagtttgaaggtgcttgtgtcatctcggtatgtgagggatcttgccaccctggtcgttgcttatggtataagcattaaccttgtggaggtgacatggaagtcaaaactgaaggcacaatacccaagccctaatgaatattcttcattcatgggggatttctcgactgctactggcatagccacatttacaatgatgttgttagggagagtaattcttaggaagtttgggtggggagtcgcagctacaatcacccctgcagtgttgcttctcactggagttggattcttctcactgattttattcggtgagccattgactcctcttatggccacacttggaatgacacctttgcttgctgcggtctatgttggggcaatgcagaacattttcagtaagagtgcgaagtacagtttgtttgacccttgtaaggaaatggcatacattcctttggacgaggacatgaaggtcaaaggtaaggcagcaattgatgtggtctgcaacccattggggaagtctggaggcgccttgatccagcagttcatgatcttatcatttggatctctcgcaaattctacaccctacctgggaggaattctattggtaattgttcttgcctggttgggtgctgtaaggtcccttgactcacagttctccccactggcaaagcaagagcttgagaaggagaaaatgctgaaagcaaagacggtcgaaacaactgctcaagttgttgggtcaggaaatggttctctccaagaaactctagccagtgagaactctgcgaatggttcggccatcaaagtgtctcaggaacctgagagtacgacctcggagaagtctggtcaacaatctcaataa

SEQ ID NO: 4608 - DNA, 1080 bp, Oryza sativa
atggccgctcctctcttcctcctcctcctcctcctcctcgtctcctccgcctccgcgggttacgaggaggaggcgctgctgcggcgcscggargargagcgggactggatggaattagtggagtgggaacacaagagcaaagtggatggtgtgatgcatgcctgcggtcatgatgtgcacaccgcgatgctcctgggagctgcaaagttgcttagtgagcgcaaggagcagatcaagggcacagtgagacttcttttccaacctgccgaggaaggtggtgcgggtgcatcttacatgataaaagatggtgttcttgatggcgttgaagctatattcgggatgcatgttgactatcggatgccaacaggtgtaatagcagctcatgcagggcctacacaagctgctgtatgtttttatgaagcaaaaatagaaggtaaaactggaaaggctgaaactccacacttaaatgtggatcctattgttgctgcatcatttgtcatcctatccctgcagcagctcatttcaagagaagatgatcctcttcacagccaggtgctctcagttacctatgtcaagggtgggaacactattgatgccacacctccagttattgaattcggaggtactttgaggagcctcactactgaaggtctatatcgtctacagaaaagggtcaaggaggtggtagaagggcaggcagctgtgcacagatgcaagggagttgtccagataaaaagggacgactacccaatgtatccagctgtctttaatgatgagaaactgcatcaccatgtagaaactgtgggcagacgattacttggtccagacaaggtgaagccgggagagaagattatggctggcgaagacttcgctttctaccaacagttagttcctggagttatgtttggcattggtattagaaacggggaagttggttcagttcacactgttcataaccctaagttcttcgttgatgaggatgttatcccaattggagctgcactgcatactgcccttgcagaaatgtaccttactgagcgctccacagaaggtgaagacggaagccagcattcgcattga

SEQ ID NO: 4609 - DNA, 1010 bp, Oryza sativa
atggctcctctcggtgacggagcggcggcggcggcggcggcggagcccaacctggtggtgtcgttcggggagatgctgatcgacttcgtccccgacgtcgccggcgtctcgctggccgagtccggcggcttcgtcaaggctcccggcggcgcccccgccaacgtcgcctgcgccatctccaagctcggtggctcctccgccttcgtcggcaagtttggtgatgatgagttcgggcacatgctggtggacatcctgaagaagaacggggtgaacgcggaggggtgcctgttcgacgagcacgcgcgcacggcgctggcgttcgtgaccttgaaaagcaacggcgagcgcgagttcatgttctaccggaacccgagcgccgacatgctcctgacggaggcggagctcaacctggacctgatccggcgcgccaagatcttccactacggctccatctccctcatcaccgagccgtgccgctccgcccacgtcgccgccatgcgcgccgccaagtcggccggcatcctctgctcctacgaccccaacgtccgcctcccgctctggccgtccgaggacgccgcccgcgccggcatcctctccatctggaaggaggccgacttcatcaaggtgagcgacgacgaggtcgccttcctcacccagggcgacgccaacgacgagaagaacgtgctctcgctctggttcgacggcctcaagctcctcatcgtcaccgacggcgagaagggatgcaggtacttcaccaaggacttcaagggctccgtccccggcttctccgtcaacaccgtcgacaccaccggcgccggcgacgccttcgtcggctccctcctcgtcaacgtcgccaaggacgactccatcttccacaacgaggagaagctgagggaggcgctcaagttctcgaacgcgtgcggagccatctgcaccaccaagaagggtgccatcccggcgctgcccaccgtcgccgtcgcgcaggagctcatcagcaaggcagccaacta

SEQ ID NO: 4610 - DNA, 3093 bp, Oryza sativa
atgaactacacgcatagatgcctccacagccacaaactccctcttctcatcctcctcattgccatcgtcgtcatactcatacagccatactccatccatgctgctgccaacagcagcaacaccaccatcagatgcctgacatctcagtcatccgccctcctccagctgaagagctccttccacgacgcgagccgcctctcgtcctggcaaccggacaccgactgctgccgatgggagggcgtcacctgccgcatggcttctgggcatgtcgttgtgctggacctcagtgatggttatcttcagagcaatgggctgcaccctgcactgttcaacctcaccttgctcacaaacctcgccctcagtggcaatgacttcatgggagcacaactcccagattctgggtttgagcggctttcgaaacttgtcagccttgacctctctgcgaccaactttgctggccagatccccattggcattggaaatctgagcaacatgcttgctcttgacttgtctcataaccccaatttgtacctcacggagccaagttttcagaccttcatagcaaacctgagcaatctgagagagctctaccttgatgagatggacctctctagcagcggggcaacttggtcaagcgatgtagcagcttctgctccacagattcagatacttagcttcatgtcatgtggcttgtctggtttcattgatccctccttctcacgactccgttcactgacaatgatcaacgtcagactcaatgtcatcagtggcatggttcctgagttctttgccaacttctctttcttaacaattctggagctatctggcaatgcttttgagggtcagttccccacaaagatcttccaactaaaaaggctgcagtttattgatttatactggaacaataagctttgtgtgcagttgccagaattcctacctggtagtcgtctggaagtgttggatctcatattgaccaaccgttctaacgccataccagcatcagtggtcaatctcaagtatctaaagcatttgggccttacaacagtagaggcttcaatgaattctgatatccttttgatcagagaactccactggctggaagttctccggctctatggaggatcaggacaagggaagctggtgtcgttctcttggataggcagccttaaacatttgacatacctggagcttggcaattacaacttctctggattgatgccctcttcgattatcaatcttacaaatctgacaagtttaacgctctacaattgcagcatgtctgggcccataccttcttggattgggaacttgatccaactcaataatttgaacttcagaaacaacaacctcaatggaacaattccaaagtccatcttcgcacttcctgcgttgcaatcactatatctagattctaatcaactttctggtcatttagaagacatccctgttccattatcttcatctgtgtatgacattgatttaagcaacaattggcttcatggccccattcccaaatcatttttctgtcttccaaatcttgagtatctcaatcttgagtcaaatcacttgaccggcatagtggaacttaggcctttctggagactaagaagcctttattttckgggtttctctaacaataagctgtcggtgattgatggagaagattctccatctcaatatctccctaagattcagcacctaggactagcatgttgcaacctcacaaaacttccaagaattctgagacatctatatgacattcttgagctagacctttcaagtaataagattggtggagttataccaggatggatatgggagatttggaaggacacccttggatcattggacctctcgaacaatgcatttactagcctggagaactctccctctcttgttacatttacacatctaagccatctaaatctcagtttcaatagacttcaaggagaaatacccataccagccatatcattgccttatggtgtagttgtattggattactcaaacaatgggttctcttccatactacgtacatttggtaggtatcttaacaaagtagcctatattaacttgtccaaaaacaaactaaaaggctatgtacccatttccatttgtagtatgaagaaactccaattcctgtacttatctgataacaactttagtggtttcgttccatcttgtctggtagaaggcagaagcttaagggtactgaatttgagggggaataaattcaacgggatgttgcctaagggcattaaagaaggatgtaagcttgagactatagatttgaacagcaaccaaattgaagggaggctgcccagaacactatcaaactgcaaaagtctggaactcctcgatgttagtaacaatcacatcctcgatctgttccctttgtggctggggaatcttcccaagcttcgagttcttgtactgagatcaaaccaattatatggcacaattaagggtctccataatagtgatctaacaagggatcacttctcaagcttgcaaatacttgatttagccaataacactctatctggtcagttgcccccaaaatggtttgagaaactgaaatcaatgatggcaaatgtcgatgatggacaagttttggagcaccaaacaaacttttcacaaggatttatctatcgagacatcatcactatcacatacaaagggtttgatatgacattcaatagaatgctaactacctttaaagcaattgatttctcaaataactcatttgttggagttattcctggaacgatagggagtcttgtttcacttcatggacttaacatgtcacataataatttcactggagcaatcccgcaacagcttggtaacttggctcagctagagtccttggatctctcttggaaccagctctcaggggtaataccacatgagttaacatttctaacttctctttcttggctgaatctttcgaataacaacttgactggaagaataccacagagcaaccagttcttgtcgttttccaacagttcatttgaaggtcaaagggggaacctactgtatttgttagaaatatcactgaatctactttgctttggctttggaaaatag

SEQ ID NO: 4611 - DNA, 2289 bp, Oryza sativa
atgtgtaccaggcaagctcgacgacggtactacgagacatcgttactcgtactgatgctcctcctcctcctacaagctaggctcgcgcaatcgcttcctccatgctcgccggaccaggccacggcgctgctccagctgaagcggtcgttcaccgtgaacaccgcgtcggccaccgccttccggtcatggcgcgctggcaccgactgctgccactgggcgggcgtccgctgcgacgacgacgacaacgacgccgccgcgagcgggagcaccggccgccgcgccacttccctcgatctcggcggccgcggcctgcagagcggcggccttgacgctgccgtcttcagcctcacgtcgctggggtatctcaacctcggcggcaacgacttcaacgcgtcacggctcccggccgtcgggttcgagcggctcaccgagctgacccatctcaacatctccccacccagcttcacaggccagataccggcaggtataggacgcctcaccaacttggtttctctcgatttatcaactcttttctatgtgatcaatcaagaagacgatcgtgccgatatcatggcaccttcgtttcccaactggggcttctggaaggtagattttctgaggttggttgcaaatcttgacaatctgagggagctctatcttggctttgtgtatatgtccaatggaggggaaggatggtgcaacgctctggttaattccactccaaaagatcaggttctgagcctaccattttgcaagatctcagtcaatgactcagtagtgcgttctcccaaagtagcagaattgagcctagcatcctgcaacatatcaaagtttcccaatgcagtaaagcatcaagatgagctacacgtaattgacctttcaaataaccaaatgcatgggccaatacctcgatgggcatgggaaacttggaaggaattgttcttcttggacctgtcaaataataagtttaccagtataggacacgactctttgctcccctgcttgtacacaagatacatcaatctcagttataacatgtttgaagggcccatacctatacctaaagagaattcagacttggagttagattactcaaataatcggttttcgtatatgccatttgatttaattccttatcttgccggtatactatctctaaaggcctctaggaacaatatctctggagaaatcccatcaacattctgcactgttaagagtcttcaaatccttgacctctcctacaatatcttaaatggttcaattccttcttgcttaatggagaattcttcaacaataaaagtactaaacttgaaggcgaaccaacttaacggagagttgccgcacaatatcaaggaagattgtgcatttgaggcattggatttcagctacaatcgatttgaagggcaactgcccacatcattagttgcttgcaaaaacttggtggtacttgatgttgggaacaatcaaattggaggctctttcccatgttggatgcatcttcttcctaaacttcaagtccttgtcctgaagtccaataagttctacggacagttggggcctactcttaccaaagatgatgactgtgaattacagcatctccgaattcttgatctagcttcaaacaatttctcgggcatattgcctgatgaatggtttaggaaattaaaagctatgatgtcagtctccagtaacgaaatattggtcatgaaagatggagatatgtatggcacatataaccatataacatatctttttactactacggttacatataaaggacttgacttgacatttactaagatcttaaagacctttgtactaattgatgtctcaaacaataggttccatggcagcattcctgaaactattgccacactaagcgtgctcagtggtctcaacatgtcacataatgctcttacaggaccaattcccaaccagcttgctagtctgcatcaacttgagtctttggacctctcttcaaataagctttctggggagatccctcaaaaattagcatccttggacttcctatcaacattgaacctatcaaataatatgctggagggaagaataccagagtcacctcatttcttgacactccacaatagttcatttataagaaatgctggtttgtgtgggsctccactgtcaaacgaatgcagcaacaaatcaacatcttctgaagagaaatctgtagacgttatgctatttctcttcgttggattgggttttggtgttgggttcgctattgcagttgtagtttcatggaaaccttgcattggcaaataa

SEQ ID NO: 4612 - DNA, 2655 bp, Oryza sativa
atggcgtcgttcgcggtgtccggcgcgaggctcggggtcgtgcgggcggggggcggcggcggcggcggcggcgggggtggcccggcggcgcgatccggcggggtggacttgccgtcggtgctcttcaggaggaaggactccttctcacgtggcgttgtgagctgcgcgggtgctcctgggaaggtgctggtgcctggcggtgggagcgacgacttgctgtcctctgcggaaccagacgtggaaactcaagagcaacctgaagaatctcagatacctgatgataataaagtaaaaccttttgaggaggagggaagagattccagcagtggcagaagcaagcataaagaagtgattcaagacattgaggaaaatgtgactgagggtgtgatcaaagatgctgatgaaccaactgtggaggataaaccacgagttatcccaccaccaggagatgggcagaagatataccaaattgacccaatgctggaaggatttcggaaccatcttgactaccgcaaattaatttctgatatctggcgcttttgttgggaaacctactctgttaacttcagtatatcttttttggtaaaattaaagtcgcattactacagaaatgcctacaatattctacttggatatcaaatgatcaaactcaatatcattattccgtcctttccagcgctgaaggcattacctaccgagaaatgggcacctggagcacagtctgcagcattagtaggtgacttcaacaattggaacccaaatgcagatactatgaccagaaatgagtatggtgtttgggagatttccctgcctaacaatgctgatggatcccctgctattcctcatggctcacgtgtaaagattcggatggatacaccatctggcgtaaaggattcaattcctgcctggattaagtttgctgtgcaggctccaggtgaaataccgtacaacggatattccattttaacctttattttccatctcctaatgttgtttatacgcaactgcaggaaaaatatgtattccaacatccttcaacctaaacgaccaaattcgctgcggatatatgaatcacatattggaatgagtagcccggaaccgaagataaacacatatgctaattttagggatgaggtgctaccaagaattaaaaagcttgggtacaatgctgtacagataatggcaatccaggagcactcttattacgcaagctttgggtatcatgttactaacttctttgcgccaagtagccgtttcggaaccccagaagacttgaaatctctgattgataaagctcacgagcttggtttgcttgtacttatggatattgttcacagtcatgcatcaaacaataccctggatggtttgaatggttttgatggtactgatacacattacttccatggtggaccacggggtcatcactggatgtgggattctcgcctgttcaactatgggagttgggaagttttaagatatttactgtcgaatgcaaggtggtggcttgaagaatacaagtttgatgggtttcgatttgatggggtgacctccatgatgtatactcatcatggtttacaggtggcatttactggcaactatggcgaatattttggatttgctactgatgttgatgcagtagtttacttgatgctggtgaacgatctaattcatgggctttatcctgaggctgtagccattggtgaagatgtcagcgggatgcccacattttgtattcctgttcaagatggtggtgttggttttgactatcgtttgcatatggctgtaccggacaaatggatcgaactcctcaagcaaagtgacgaatattggaaaatgggtgatatcgtgcacaccctaacgaatagaaggtggtcagagaagtgtgttacttatgcagaaagtcatgaccaagcactagttggtgacaagactattgcattctggttgatggataaggtaatcatttgtaggttcacaatcgaccggatatctcaacttcctttcatgcaggatatgtatgattttatggctctagacagaccttcaacacctcgcattgatcgtgggatagcattacataaaatgattaggcttgtcaccatgggcttaggaggcgaaggctatcttaatttcatgggaaatgagtttgggcatcctgaatggatagatttcccaagaggcccgcaaagtcttccaaatggctcggtcctcccaggaaacaactacagttttgataaatgccgtcgtagatttgaccttggagatgcagattatcttagatatcatggtatgcaagagtttgatcaggccatgcagcatcttgaggaaaaatatggattcatgacatctgagcaccagtatatatcgcgcaaacacgaggaggataaggtgatcatcttcgagagaggagatttggtattcgtgttcaacttccactggagtaatagctattttgactatcgcgtcggttgtttaaagcctggaaagtacaagattgtgttggactcagacgatggcctctttggtggattcagtcggcttgatcatgatgctgagtacttcactgctgactggccgcatgacaacagaccatgttcattctcggtgtacaccccaagcagaaccgccgtcgtgtatgcacttacagaggactaa

SEQ ID NO: 4613 - DNA, 1668 bp, Oryza sativa
atgacaacctcgtcgtccgggagcgtcgagacgtcggccaattcgcggctggggacgttctcgttcgccagcgcgagcttcacggacctcctcgggggaaacgcgggagccggcggcggaggtgtgtccaggtacaaggccatgaccccgccttcgctgccgctctcgccgccgccggtgtcgccgtcgtccttcttcaacagcccgatcggcatgaaccaggccgacttcctcggctcgccggtgctcctgacctccagtatcttcccgtcgccgacgacgggcgcattcgcgtcgcagcactttgactggaggccggaggtggcggcggcgcagagcgccgatcaaggcggcaaggacgagcagaggaattcctactccgacttctcgtttcagacggcgcctgcgagcgaggaggccgtgcgaacgacgactttccagccaccggtcccaccggccccactgggggacgaggcatacagaagtcagcagcagcagcagccatggggctaccagcagcagcctgcaggcatggacgcgggtgccaacgcggcgagcttcggtgcggcgccgttccaggcgacctcgtcggagatggcgccacaggtgcagggtggcggcgggtacagccagccgcagtcgcagaggcggtcgtcggacgacggctacaactggcgcaagtacgggcagaagcaggtgaaggggagcgagaacccccgcagctactacaagtgcaccttcccgaactgcccgaccaagaagaaggtggagcggtcgctcgacggccagatcaccgagatcgtgtacaagggcacgcacaaccacgccaagccgcagaacacgcgcaggaactccggctcgtcggcggcgcaggtcctgcagagcggcggcgacatgtcggagcattccttcgggggcatgtccggcacagcggcgacgcccgagaactcgtcggcgtcgttcggtgacgacgagatcagagttggctcccctcgggccgggaacggcggcggcgacgagttcgacgacgacgagccggattccaagagatggaggaaagacggtgacggcgaggggatctccatggctggcaaccggacggtgcgggaaccgagggtggtcgtccaaaccatgagcgacatcgacatcctcgacgacggctaccgctggagaaagtacggccagaaggtggtgaagggcaacccgaacccaaggagctactacaagtgcaccacggccggttgccccgtgcggaagcacgtggagcgcgcgtcccacgacctgcgcgccgtgatcaccacctacgaggggaaacacaaccacgacgtgcccgccgcgcgggggarcgccgcgctttaccgccccgsgccgccggcggcggccgccaccagcagccacccgtacctgccgaaccagccgccgcccatgtcctaccagcccacggggccacagccgtacgcgctgaggcccgacgggttcggcggccagggaccgttcggcggcgtggtcggcgggagcagcttcggcggcttctccgggttcgacgacgccaggggctcgtacatgagccagcaccagcagcagcagaggcagaacgacgcgatgcacgcctcgagagccaaggaagagcccggagacgacatgttcttccagaactcgctctactga

SEQ ID NO: 4614 - DNA, 810 bp, Oryza sativa
atggccatggatcagtacagtgagaatatcaagtatgacgagctgcacaaatattcagacaccgccgctcgattggtgcgagccggatatgccgtttacgggattgatcatgaaggccacggtagatcatctggtcagagatgctacataccaaacttcggtgacatcgtctcagactgcgcaaactttttcacgagtatttgcgagaagccggagaacagggagaagaagaggttcctgtacggcatctccatgggtggaggcgtggcgcttctcctccacaggaaggagccaacctactgggatggcgccgtcttgcttgctcctatgtgcaagattcctgatgacatgcggcctcacccgatcgcggtcagcgctctgaaaatggtgtgcgctgtggctcctagttggagaatcatacccacaccggacataattgacaaagtttgtaaagatccagagatgagaaagcaggttcgctcaaatccgtacatatacaggggaaagctcccactgaagacctgtcatgaactcctgatggtcagcctagacattgagaagaacctgcatgaggtgacactgccgttcttggtcctacacggcggagacgacatcgtgaccgatccttcggtgagcaagctgctgttcgaagaagcatcaggcagggacaaaactttcaagctttaccctgggatgtggcatgctctgacggctgagcttcctgacgatgtcgagcgtgtctattctgacatcatctcctggctggacgaaaggtcggattgtgcaggcagtgttcctgaaactttctga

SEQ ID NO: 4615 - DNA, 1617 bp, Oryza sativa
atggcgaccgtctcgccggcgcggagggagccgacgccgcaggcggtgcgggcgtccccgatgccatcggcggcggcggcgttggtgaggagaggcggtggtggtagcggggggacggtgctggggaagtacgagctggggcgcgtcctgggacagggctcgttcgcgaaggtgtaccaggcgaggcacctggagaccgacgagtgcgtggcaatcaaggtgctcgacaaggagaaggccgtgaagggcgggatggtccacctcgtcaagcgcgagatcaacgtgctccgccgggtgcgccacccgaacatcgtgcagctgttcgaggtaatggccagcaagaccaagatctacttcgtcatggagtatgtccgcggcggcgagctcttctcccgcgtctccaagggacgcctcagggaggacaccgcgcggcgctacttccagcagcttgtctccgccgtcgacttctgccacgcccgcggcgtgttccaccgtgacctcaagcccgagaacctcctcgtggatgagaacggggacttgaaggtctcggacttcggcctcgccgccggccccgaccagttcgaccccgacggtctgctccacacgttctgcggcacgccggcctacgtcgcccccgaggtgctcaggcgccgcggatacgacggcgccaaggcggacatatggtcatgcggtgtcatcctctttgcgctcatggccgggtacctccctttccatgaccacaacatcatggttctgtaccggaagatctacaatggggagttcaggtgtccaaggtggttctccaaggattttactagattgataacgcgccttcttgacgcaaaccccaaaactaggatcaccgtgccagagatcattgagagcgattggttcaagaaaggatacaagccagtcaagttttacattgaggatgacaagctctacaacctgtctgatgacgtgctgaacttggagcctgctgatcctgttcccccaccattgggtttggcacctcctgttcctccacctccacaaggggatgatcctgatggttcagggtctgagtcagattcatcagtcgtatcctgcccggccacattgtcaactggggagagccagagagtccgtgggtcactaccacgcccagcaagccttaatgcatttgatatcatatcattctcaaaaggattcaacttgtctgggctgtttgaggagagggggaacgagatcaggtttgtatctggtgagcccatgtctgacattgtaaaaaagctggaggagattgcaaaggtcaagagcttcacagtgcggaggaaggactggcgggtgagcatagagggtacacgcgaaggagttaaggggcctctaaccataggcgcggagatatttgagcttacaccctcccttgtagtagtggaagtaaaaagaaaggcaggtgataatgaagagtatgaggatttctgcaacatggagttgaagccaggaatgcagcaccttgtgcaccagatgctcccagctccaaatggaactcctgtgagtgagaaggttgaaaggtcttcaagcttacaggctcccctcaccctgaagttgataggaacagaaggcagcatgagctag

SEQ ID NO: 4616 - DNA, 1827 bp, Oryza sativa
atgcaggtgcagcaacgcaagcccaaggcttgcgccgagagcgccgcggcggcgcraggagcggatcagcagcagtgcgacggcaggccgctggaggcgggcgaggagtccctggagcgctccgtgccgcggaagaggaagccagctgcggcggtggctgctgccgagaagcgatggagctccgtggcctacgtcgtgctcgccgcctttgtcatggcgacggtcttcgccgttcttggcgggcggcgccccgccgtctggatcgccgccaccaaggccctgcgtcgaggttccgacgataaatcgattccattggcacgaagcgccgctgacaaactcctcggcggcctcttgcccgaaggattcgacgagaaatcatgtcgcagcaggtacgagtcatacctgtaccgccggaacccgggccgacgaccatctccgcacctcgtggcgcggctgcggatgcacgaggagctccagagacggtgcggccccaacacggagtcgtacaaccgcgccgtgcaacggctgagggacggcggcgccgccgaggccgacgcgcactcgccggacgacgagcagtgcaagtacgtggtctccatctcgtaccgcggcctcgggaaccgcatcctcgccgccgcgtcggccttcctctacgcggtgctcaccggccgcgtcctcctcgtcgacccgagcaacgagatggacgagctcttctgcgagccgttccccggcacgacgtggctgctcccacgcgacttcccgctggcgtcgagctacgcgaacttcagcgccgacaccgccgagagctacggcaacatgctgaagaacaaggtgctcgggacggacgggagtactgacggtgacatgcccgcggcgcagatgccggcgttcgcgtacctccacctggaccacgactacggcgacggcgacaagatgttcttctgcgacgacgaccagcggctgctgtcgaacatccagtggctggtgatgaggacggacacctacatcgtgccgtcgctgttcctggtcaccacgttccaggacgagctcgacgcgctcttcccggagcgcgacgccgtgttccaccacctcggccggtacctgttccacccggccaaccatgtctggggcctcgtcgcgcggtactaccgcgcgtacctcgcgacggcgcggcagctggtcggcgtccaggtgcgcgtcttcgaccaccggcaggcgaagtcgccgcacgtcgtcctcgagcagatcacgtcgtgcgcgtggaaggagaagctgctcccggaggtactcgacgcggtggaggacgcggccatgcccacgccaccgacgacgccgcacggcgggagcaacaactccaaggccgtcctgatcacctctctccggccgtggttctacgagcgcgtcaaggctatgtactgggagcgcgcgacggcgaccggcgaggacgtgagcgtgcaccagccgagccacgaggagtaccagcacttcggcgagaagtcgcacgacggcaaggcgtgggcggagatgtacctcctgagcctgtgcgacgtgctggtgaccagcggctggtcgacgttcgggtacgtggcgcaggggctcggcgggctgaggccgtgggtgatgtacaagccggtgaacatcacggcggtgccggacccgccgtgcggacgggacgtgtccatggagccgtgcttccactcgccgccgttctacgactgcaagacgaagcgcggagtggacaccgggacaatactgccccacgttcggcactgcgacgacgtgagctggggattgaagcttgttgatccgaatggaagtccgaactag

SEQ ID NO: 4617 - DNA, 1734 bp, Oryza sativa
atgatgcggtgtagcgaccgcctcctctgcagcctcttcctcgccgccgcgctgttcggcgtcgccgccgcggcgacgcggcgccacgactgggacatcagctaccagttcacgtcgcccgactgcgtacgcaagctggccgtcaccatcaacggccacacgccgggccccaccatccgcgccgtccagggggacaccatcgtcgtcaacgtcaagaactcgctgctgacggagaacgtcgccatccactggcacggcatccggcagatcggcacgccgtgggcggacggcacggagggcgtcacccagtgccccatcctccccggcgacaccttcgcctacaccttcgtcgtcgaccgcccgggcacctacatgtaccacgcccactacgggatgcagcgctcggcgggcctcaacggcatgatcgtcgtcgaggtcgcccccggcgccgccggcgacggcgagcgggagccgttcaggtacgacggggagcacaccgtgctgctcaacgactggtggcaccggagcacgtacgagcaggcggcggggctcgcgtccgtgcccatggtgtgggtcggcgagccgcagtcgctgctcatcaacgggcgcggccggttcgtgaactgctcgtcctcgccggcgacggcggcgtcgtgcaacgtgtcgcacccggactgcgcgccggcggtgttcgccgtggtgcccgggaagacgtaccgcttccgcgtcgccagcgtcacctccctctccgcgctcaacttcgagatcgaggggcacgagatgacggtggtggaggccgacggtcactacgtgaagccgttcgtggtgaagaacctcaacatctactccggcgagacctactccgtcctcatcaccgccgaccaggaccccaaccgcaactactggctcgcctccaacgtcgtcagccgcaagccggccacccccaccggcaccgccgtcctcgcctactacggcggccgccgcaacagcccccgcgcccgcccgcccacgccgccgcccgccggcccggcgtggaacgacaccgcctaccgcgtccgccagagcctcgccaccgtcgcgcacccggcgcacgccgtgcccccgccgccgacctccgaccgcaccatcctgctgctcaacacgcagaacaagatcggcgggcagatcaagtgggcgctcaacaacgtctccttcaagctgcctcaaacgccgtacctcgtcgccatgaagcgcgggctcctcggcgccttcgaccagcgcccgccgccggagacgtacgccggcgccgccgcgttcgacgtgtacgccgtgcaggggaaccccaacgccaccaccagcgacgcgccgtaccggctccggttcggctccgtcgtcgacgtcgtgctccagaacgccaacatgctggcggcgaacagcagcgagacgcacccgtggcacctccacggccacgacttctgggtgctcggccacggcgccggccggttcgacccggcggtgcacccggcggcgtacaacctcagggacccaatcatgaagaacacggtggcggtgcacccgttcgggtggacggcgctccggttcagggcggacaaccccggcgtgtgggcgttccactgccacatcgaggcgcacttcttcatgggcatgggcatcgtcttcgaggagggcgtcgagcgcgtcggcgagctgccgccggagatcatgggctgcggcaaaaccaggggcggccactga

SEQ ID NO: 4618 - DNA, 720 bp, Oryza sativa
atggacttccaccacggagacgccgacgacttcgccctcgagttcatccgcgagcaccttctcggcgtcgacggcgccaccgccacggccaccgagccggcggacctcgaggtcgtcgaaccggcggcggcgtacccgcctatgtcgtggcaagagcagcggcagcaggagcagcatggttgtcacgtagaactaacggacgagcacctggaatccgcacccgctgctgaggcagcggcggcgttccgaacggcgcccgcgcagccggcggccgaggtgatgatcaagttcggtggcgagccctccccggtgaggccgtcgtcgtcgctgaccatatccctgccaccgagctcgttcggcagctgggcgtccgcggcggcgccggccgcggccgccgtggaggacttccgcaagtaccgcggcgtgcgacagcggccgtgggggaagttcgcggcggagatccgcgacccgaagaggcccgggtcgcgcttgtggctgggcacgtacgacacccccgtggaggccgcgcgcgcgtacgaccgcgccgctttccgcatgcgcggtgccaaggccatcctcaacttccccaacgaggtcggcacccgcggcgccgaactgtgggctcttccccggcsgcmaccggsgmattcggccgccgcttcgacgacgaacaagcggaagcggcagccgtcggaggacccgacgacggcktcgaggtga

SEQ ID NO: 4619 - DNA, 1479 bp, Oryza sativa
atggcgaccctgtctggcagatcagtgtctgaatttttgacaggcagttttcagggtgagcaggccctgctgaaagaagaatctactgaaagggtatgcattgacaacagcacctgcagcgactgcaccttagtgaaggtcgacagcatgaacaagaatggcatcctgttggaggtggtgcaagttctgagcgatctcgatctcgccatctcgaaggcgtacatcacctctgatggtggatggttcatggatgtgtttcatgtggtggacaagcaagggcagaaggtgactgatgagaagaccattaagcacattgagaaggcgttaggcccagacagcaacctgctgggtggcgcgaagggcgggtcgtcgccggtgaggtcggtggggatgcactccatcggcgaccacaccgccatcgagctcaaggggcccgaccggacgggcctcctctccgaggtcttcgccgtgctcgccgagctcggctgcaacgtgctcgccgccgaggtgtggacgcaccgcgcccgcgtcgcctgcgtcgtgtacgtgaacgacgtcgcgtcggggcaggccgtcggcgacccgtgccgcctgtcccggatcgagcaccgcytccgcctcgtcctccgcggccacgccggcggcgacgacggcgacggcgacgacggcccggcgcacgccaacttcttctcctccggcggcgccgggtcgaacacccacgtcgaccggcggctccaccagttgatgcacgccgacgtggacgccgacgacgacgacggcctcgacagccgcgccatcgtgtcgggcgaggccgggaacgcggcggcggcggaggagaggccggtggtgacggtggagcactgcgaggagaaggactactcggtggtgaacgtcaagtgcagggacaggtccaagctgctgttcgacatcgtgtgcacgctcaccgacatgcactacgtcgtctcccacgcctccgtctcctccgacggcatctacggcatccaggagctgtacattcgtcggaaggatgggcgcacgctacagaaggacgaagcagggagggtgatcaagtgccttgaagcggccatctccagaagagtatctgagggattcaccctggagctgtgcggcagggacagggtcgggctgctgtccgacgtgacgcgggtgctcagggagcacggcctgacggtgacgagggccgacgtcacgacggtcggcggccaggccatcaacgtcttctacgtccgcgaagcctccggcgagccggtggacatgaagaccatcgagggcctccgcgtccaggtcggccaaaccgtcatgctcaacgtcaagaaggtgccctcctccccctcctcctcctccgccgccgccgccgccgccgccaacggcaagtcgccggggcagcctgcctccggcgccctgtccaggaccagcttcttctccttcggcaacctcttcgccaagctcagagcatga

SEQ ID NO: 4620 - DNA, 6579 bp, Oryza sativa
  misc_feature (1)...(6579): n = A,T,C or G
atgagccgcaaccggggccgtttgctggggatgctctsgcgttgccaggccaagccacaggatgcggcattggccgccaccttcgarcaggcyttkcaggcgtcggtgcagcgccggcattttcgggcccaacagcagccgtccattactttggacccgcagctgccgattgcgcstnaagccsacgccatcatcggggtgatccgcgaacaccaggaactgcagagcgaactgggccagctggtcggctaccaggtgcgcttcaacgacaaggtcagcgaagacagccgcatcaagttcatgaccgacggcatcctgctggcggagatcgccagcgaccgctggttgtcgaactacgacacgatcatcgtcgacgaggcgcacgaacgcagcctcaacatcgacttcctgctgggstacctgaagcagctgctgcgcaagcgcccggacctgaagctgatcgtcacctcggccaccatcgacaccgaacgcttcgcccagcacttcgacaatgcgccggtgatcagcgtggaaggccgcacctacccggtggaagtgcgctaccgcgcgctggaaggcgagggcgaacaggagggcgagcgcaccgtcaacgacgccatcgtgtcggccatcgacgagatcacccgcctggatgcgcgcggcgacgtgctgatcttcctgccgggcgagcgcgagatccgcgatgcgcaccagtcgctggaacggcgcaagtaccgcaacaccgaggtgctgccgctgtacgcgcggctgtccaaccaggaccaggaccgggtgttcaaccccggcccgaaccggcgcatcgtgctggccaccaacgtggcggaaacctcgctgacggtgccgcgcatccggtacgtggtcgatccgggcttcgcccgcgtcaagcgctacagcccgcgcaacaagctggaccgcctgcacatcgagccgatctcgcaggccagcgccaaccagcgcaagggccgctgcgggcgtatcgccgagggcatctgctaccgcctgtacgccgagtctgatttccaggcgcggccggagttcaccgatccggaaatccgccgctccagcctggccggggtgatcctgcgcatgctgcagctgggcctgggccgcatcgaggaattcccgttcctggaagcaccggacgagcgcgcggtagccgatggctggcagcagctgaccgaactgggcgcgatcgatgccgagcggcgcatgaccaccatcggcaagcagatggcacgcctgccggtggacgtgaagctggcgcgcatgctggtcgctgcgcaggctgccggttkcctgcggccgatgctggtgatcgcctcgytcstcgggcatccaggacccgcgcgaacgcccgcccgaagcacgcgtgcgccggcaccggcgcgtgacggcgccgcggcggtgaaagccacccgaggccagctgcaccgtgccgcgcgcctggcccgcgaaggcaaggccgaggccgcaccgatgccggtggccgtgcgtgcgcagaaggaacagacgccagttggcggcggtttcagtgaacgcgtgcgcgccgccgcctaccagaccctgcaccgggcgctggtggcgggcctgccgacgcagatcggccaccgcaccgagaagggcgatttccaggcaccacgccagcgccgcttcctgccgttccccggttcggcgctgtccaagcggccgccgccgtggctgctggtggccaacctgctggatacgcagaaggtgtggggcatgaccctggccgcgatcgagccggactgggtgatcgccgaactgccgcacctgctgctgcgcaagcacttcgatccgcactggtcgcgcgcgcagggccaggtgctggcgtccgagcagatcagcctgttcggcctggtgctggcgccgaaaaagccggtgcactacggccgcatcgaaccgggcaaagcgcatgacatcttcgtgcgtcaggcgctggtgaccggcgagatcaaaacccgggccagcttcgtggccgaaaaccagaaagtgctggagaccgcccgcgaggaagaagccaagctgcgccgcgccggcatcgtcgccgacgaggactggcaggcgcgctggtacctggaccgggtgccgccgcaggtccattcggcggcggggctggatacctggtggaaggggctggcgccggaacagcgcaagaccctgcactggtcgctggtcgatctgttaccgggtgagggcagtgaacaggagcgctatccgaagtacctggccctgggccaggcgcgcttgccgctgcactaccgcttcgaaccgggtgccgacgacgatggcgtgaccctggatgtgccgctgcatctgctcaatgccctggacccagtgcaactgggttggctggcgccgggtttcgtcgccgacaaggcctctgcattgatccgcagcctgcccaaggcgatgcgccgcaactacgtgccggcgccggacttcggccgcgcgttctacgaggcgttcccgcagcccagcgccgatgccatcaccggcgaactggcgcgtttcctgtcgcgcgcaaccggcgcgaccgtgaccgcgctcgatttcgagcccggttcgatcgaaccgcacctgcacatgaacctgcggctgcgcgacgagcagggcaaggtgctggcgacctcgcgcgatctggatgcactgcgcgccaaattcggcggtcgtgccggcgatgcgttcgctgcacgcgccggccgcgagatggcggccgatggcctgcgtacgttcccggccacgccgattccgctgcaggtgcccggtgaagcgggcgtgccggcgtatccggcattgctggacgagggcgacagcgtggcgctgcgcatcttcgccgaccgccagcaggcgctggaggcccatccgctcggcgtgcgccgcctgctggaaatcgccttggccgagaaggtgaagcaggcgcgcaagcagctgccggtcggtgccaagaccggcctgctgtatgccgcgatcgaatcgcaggagcgcctgcgcggcgacctggtcgatgcagcgatgaacgcggtgctggccgagggcctggaagacatccgcgatgcggcgaccttcgagcagcgacgcgagcatgcggccaaggccctgttcggtgaggcgatgtcgcggctgaaactggccgaaaccatcctgggcctggtggcggaactgaagccgatgctggaagcaccgttgatgggctgggcgcgcggcaacctggacgacatggaagcgcagctggccggcctgatccatcccggcttcctgcgcgacacgccggctgacgcgctggcgcagtatccgcgctacctgaaggcgatgatcctgcgcaccgagcgtgccaagcgtgatccgccacgtgaccaggcgcgcatgctggaactgcacccgttcctggaagcgctggaagtgggggagcagcagggactgcgcgagcgcccgcaatggcaggcgctgcgctgggatctggaagagctgcgggtgtcactgttcgcgcaggagctgggggcacgcaccggcatctcggcgaagaagctggcgcagcgggtccccctccaccacacgctgggccagcgcaggcgccgacaaggacagcaacagtgcggcacaggccagcagccctggtcggtgctgggtgacaccctcgacgcactggcgatgctctccgccgacgaaggcgcggtggtcgcggccctgctgttcgacctgcctggcctgcgggctagcctggaacagctgccgctgggcaaccacaaggccgcggtaatcggcctgctggatggtcaggacgccgccgacccggtgtgggcgctgcatgccggccgtgaggcagggcgcaacagcgaaggcctgcgccgcctgctgctggcgatcatccgcgacctgcgcgtggtgcccatcctgctggcccggcagctggcgcggatgcgcgcggccgacaagctggatgacgagcaacgccgcgcgctggcacagctgacacgcgacatccacgcgccattggccaaccgcctgggcatctggcagctgaagtgggagctggaggacctggcgttccgccacctggaaccggagacctaccgtcgcattgcgcgggaggtggacgaaacccgcatcgcccgcgagcgttacgtcgagaacgtcaagaaggtgctgtcgcgcgagctggtcgcgcagggcatcaaggccgaggtcagcggccgtccaaagcacatctacagcatctggcggaagatgcagaagaagcgtctggcgttcgaccagctgtatgacatccgtgcggtgcgcgtgatggtcgacgacgtcgccgcctgctatgccgcgctgggcgtggtgcatgcactgtgggcgccggtgccgagcgagttcgacgattacatcgcccggcccaaggccaacgactatcgctcgctgcataccgccgtggtcggcccggaagggcgcaccatcgaagtgcagatccgtacccatgagatgcactcgcaggccgagctgggcgtggccgcgcactggaagtacaaggaaggtggcaagggcgcggagaagtccttcgaccgcaagatcacctggatgcgccagctgctggagcaggcgcaggacgggcagggcaatgagctggccggggcgctcgatgccgagctgaccgaagaccgggtctatgcactcagcccgaaggatgaggtgctggatctgccgcagggcgccacgccgctcgatttcgcctaccaggtgcacaccatggtgggccaccgctgccggggcgccaaggtcaacggtcgcatcgtgccgctgacctatcgcctgcgcagcggcgaccgcgtcgagatcctgaccggcaaggaggccgacccccgccgcgactggctgatgccggccaacggcttcctggccagcaaccgctcgcgcgaaaaggtggcgctgggcgataccggcccgaaccaggtcagccgtaccctgctggaagccgaacgtgcagcgagccagccggcgcccgcgccgaccctgccgcggccgaccgcgcgccgcgagaacctgggcaagtccaagttcaccgtgcagggcgtaggcaacctgctggtgcagctggcacgctgctgccagcccgtggctggcgagccgatcgtcggctacctgacccgtagccgtggtgtcaccgtgcatcgtgcagactgtgccgcgctggcccggctggcagccaccagcccgcagcgcatcctgccggtggagtggggccaggccggcggcggctacgaagtggacgtggtggtcactgcggtcgaccgccgctggctgctgaaggacatcaccaacctgatcgcccaggaagacgcctacgtgctcgacatccacagtgacaatgtacgcaacagtggccgtgcccacctgcgcctgcgcctgaaggtgagcgactacggccagctgtcgaccctgctcggcaagctggatgcgctgcccggcgcacgccacgcgcgccgggtgtggcgctgggcgctggtcgcggcgctggcggtgttcgtgctgctggtgctgctgcgcaagccattggccgactggttctgggatgagccgcagatcgaacagttgctggccgaaggtkaccgcgcgcttgccaccggccggttgagcgcggccgacggcagtkgtgcgcgcgagcgctaccaggccgtgctggcgctggatggtgatcgtccgcaggcccgcgaaggcctggcccgtaccggcgccgcggccctgcagcaggccagcgaaaaactgcaggccaacgacctcgagggcagcgcgaaggcgctggcactggcccgggagctgcaggtgccgcaggccgatgcggacgccgtggctcgccagctgcaggcccggcgcagtgcaggcgccggcatcggtgcactgctggcgcaggcgcgcaacgcctttgcagcgggccggctggacgaaggtgacagcagcgcgctgcccctgttccagcgcatcctggcattgcagccggacaatctgccggcgctggaaggtcgcgaggacgcactgagcgatctgctgcagcaggcccgcatcctggccgggcgcggcgagctggccgaggcagcgacgatactgcagcgtgcgcgccagttcgatgccggccacgccgatctgcccgcaagccaggaagcattggcacaggctgtcgaccagcgcctgcgccaggcccagcgcgccttgcagcggcggcagctggaatcggcagcgaagggattcctcgccgtgctggcagtggcggttgatgattccagtgcccagcgcggccgcgaacagaccttgcaggcggtgctggcgcgcagccagaagcgggccgacgacttccagttcgagccggcgcaggccgattccgcgctggcggcggaactgggtgcttcgccggccgcgcaacagcagctcgcgcaacgcctgcagcgcgcacaacaggcgcagaaggcgctgcagcagccggcggtcagcaacacgcaacgcgaacgccaactgcgcgaccacctgcgcaggatcgagcgcgctgaacgtgccgggcaatga

SEQ ID NO: 4621 - DNA, 3192 bp, Oryza sativa
atgtcgaacacctatctccccctcctccctgctctcgtcgccggcgtcctcctcctcgccgccggatgcgccgccgccgccggcgaccgcgacacgctcgttgccatcaggaaagggtgggggaacccgcggcacctcgcgtcgtgggaccccgcctcggcggcggcggcggaccactgcagctgggaaggcgtgacctgctctaatgccaccaccggcggcggcggcggcgccggcgtggtgacggagctgtccctgcacgacatgaacctcaccgggacggtgcccacggcggtktgcgacctcgcgagcctgacgcggctcgacctctccaacaaccagctcaccggcgcgttccccgccgcggcgctgtcccggtgcgcccgcctccggttcctcgacctcgccaacaacgccctcgacggcgccctcccgcaacacgtcggcaggttgtccccggcgatggagcacctcaacctgtcgtcgaatcggctctccggcgccgtgccccccgaggtggcggcgctcccggcgctccggtcgctgctcctcgacaccaaccggttcacgggggcgtacccagcggcggagattgccaacctcaccgccctcgagcgcctcacgctggccgacaacgggttcgcgccggcgcccgtgccgcccgcgttcgccaagctgaccaagctcacctacctctggatgtccaagatgaacatcaccggcgagattccggaggcgttctccagcctcacggagctgacgctgctcgacatgtcggggaacaagctcaccggcgcgattccggcgtgggtgttcaggcaccagaagctcgagaggctctacctgtacgagaactccctctccggcgagctgccgcgcaacgtcacgacggcgaacctggtcgagatcgacctgtcgtcgaaccagctcgggggcgagatatcggaggacttcggcaacctcaagaacctcagcttgctgttcctctacttcaacaaggtcaccggcgccatcccggcgagcatcgggcggctccccaatctcaccgacctccggctgttcggcaacgagctctccggcgagctcccgccggagctcgggaagaactcgccgctcgccaacttcgaggtctccaacaacaacctctccggcgcgctcccggagacgctctgcgccaacgggaagctgttcgacattgtcgtcttcaacaacagcttctccggcgagctcccggcgaacctcggcgactgcgtgctgctgaacaacctcatgctctacaacaaccgcttcaccggcgacttcccggagaagatttggtcgttccagaagctgaccacggtgatgatccagaacaacggcttcaccggagctctgcccgccgagatatccaccaacatctcccgcatcgagatggggaacaacatgttctccggctctatcccgacctcggcgaccaagctcaccgtgttccgggcggagaacaacctgctcgccggcgagctcccggccgacatgagcaatctcaccgacctcaccgatttttcagtgccgggcaaccgaatatctggctccatacccgcgtcgatcaggctgctggtgaagctcaactcgctcaacctgagcagcaaccggatctccggcgtgataccgccggcgagcttcgggacgctcccggcgctgaccatcctcgatctgtccggcaacgagctcaccggcgacatacctgccgatttggggtacctcaacttcaactcgctcaacgtgtcgtcgaaccggctcaccggcgaggtgccgctcacgctccagggcgcggcgtacgatcgcagcttcctcggcaacagtctctgcgccaggccgggctccggcacgaacctcccgacctgccccggtggaggcggcggcggaggcggccacgacgagctctccaagggcctgatcgtcctcttctcgatgctcgccggcattgtcctcgtcggcagcgccggcatcgcgtggctgctcctccggcggcggaaggacagccaggacgtcaccgactggaagatgacgcagttcaccccgctggacttcgccgagtccgacgtgctcggcaacatccgggaggagaacgtcatcggcagcggcgggtcgggcaaggtgtaccgcatccacctcacctcccgcggcggcggcgccaccgccaccgccggcaggatggtggccgtgaagaagatctggaacgcgaggaagctggacgcgaagctggacaaggagttcgaggcggaggtgacggtgctcggcaacatccggcacaacaacatcgtcaagctgctgtgctgcatctccagccaggacgccaagctgctggtgtacgagtacatggagaacggcagcctcgaccggtggctgcaccaccgcgaccgcgacggcgcgccggcgccgctggactggccgacgaggctggccatcgccgtcgacgccgccagggggctcagctacatgcaccacgactgcgcgcaggcgatcgtgcaccgcgacgtcaagtccagcaacatcctgctcgacccggagttccaggccaagatcgccgactttggcctcgcccggatgctcgtcaagtcaggcgagcctgagtccgtgtcggccatcggcggcacgtttgggtacatggcgccaggtgagaaatctcatgttcatttcccaattcaagatccatttcaattcttgtcccaatttaatcagagtatgggtacagcaagaagggtgaatgagaaggtggacgtctacagcttcggcgtcgtgttgctggagctgacgaccggcaaggtcgcgaacgacgccgcagccgacttctgcctggccgagtgggcgtggcggcggtaccagaaaggccctccgttcgatgacgtcatcgacgccgacatccgggagcaggccagtctgccggacatcatgtcggtgttcacgctcggcgtgatctgcacgggggagaacccgccggcgaggccgtccatgaaggaggtcctgcaccacctcatccggtgcgaccggatgtcggcccagggacccgaggcgtgccagctggactatgtcgacggcgccgctccgctgctggaggcgaagaaggggagccggcggaggagctcggagtctggcaggtgggacgacgacgacgacgatgacagcggcaatttcgtggtgcacgttgtttag

SEQ ID NO: 4622 - DNA, 3168 bp, Oryza sativa
atggcagtggcagcaagctggagtcgttcccggccaggacatctacagcaacaggatcatcaccgcgaacgggtaccgcgatccgggcgacaccttgaatgtaccgccaacgtgaccggcgacatcaaccccggctacctgcgtaccggacgccagttgcaggcgttcgtcgatgatgatttcgcgcgctggaataccgactggcgatccacctacatcaatctcgcgcagagcatctacaacgcatccagcaagggtccgcagggcatcggtgcgctgtcggtgcagggttacctcagtgacccggacatccaggacctgttgctgtccaagctgcggctggctgatctggatgtctccacgctggacaacgccatgggcgtgatccgggtgagcaacggcgccacctggcgtacgtccgcgacgacgggtgcggatttcatgctggtcgacaatggcaccatcgcgctggaaggcggcgccctgcgcgcatcggaagtgcgcgtgctcggcgcaggcatgctggtcggccatggcgacgtggcgggtactgcgatggaccgcgctgcattgctggacggcaccggcccgtcgtaccgcgaaaacgggttcaaccgcctgcgcgttttcggcacgctgatgccgcgcgagaatggtggcaccaccgccggccgcctgcgcgtgggcaccttcttcgatgacgagcagaccgagggggcactggtgatctccaagggtgccttcctcgaactgaacgtggcgcagggctactacggccaggacttccgtcgtgacctggttgagggcccgatctaccagggcggcttcgaagaggccgtgcgcctgggcgacaccagctacagcgccagcatcagcggtgatgtgttccgtccccgccacaattcgctgttgagcttcaacgtgaagcagacggccgatggcctgtggctgaccgccaacccgggctttgaccagctgggcctgttcgccaacggtacgtccggcgacggcctgggccgtgcgctggcgactgcttccgatcgccaggacaagggactgaaatcgctgctgggcgcactgcagttcgccgaccgcgatgtgatcgcacaacaggccggtgccctgcgcggtgatgcgcacgccagcctgcgcctggccgacaccgcgctggtgggcagcatcggcaacgtcgtgcagcagcaccagtcggccatgcgcagcggcggcgatgccgatggcctggcctcgcaggtggcgcagtcggtctcctcccagccgggcatgcgccatggcagcctgttcaaccagctggcgatgcacctggtcgagccggcgccgggcagcgttgcgggtaccgttaatcccggacgcagccatggcatctgggcacgtggtttcgccagccatggccgcatcgatgccgacggtggcgtggccggcctgagccacaacatcggcggcatcgtggtcggtgccgacacccgcgtggccgatgaccgcgtgaccctgggcgtaagcgtggccgcggcggacatgtcgaccaaggccagcgatggctctggtttcaccggtgatgtgcgcgcgctggacgtgggcggttacctcgatgcgacgtacgcgcgcggctatctgtcggcggccgtgcgctacaccgatctgcggcatgacacccgtcgcagcatcggcggtatcgatggcctgcagcagcccctgcgcgcgaagtacagcaacgatgcgatctccgcgcgtgttgaacatgcgttctcgttcaccaccggcaagggcctggtgatccagccgttgctgccggtggtggactacgcgcgtacttcggccacccgcttcaacgaagggcagggcgctggtgcgctggttggccgcagtggcagcctggagagcatccgcgtgggtgcgggcctgcagctgttcaagacctttgagggcaacaacggtgagcgcatcacgccgcgcgcccgggtggtctggcagaaggagctgggcgattcgcaggcccgctacagcaccggcttcgccgcggcaccggatctggtgttcggcgccagcagccaggcggtgggcgagcaggtgctggcctggaacgtcggcgtgaccagtcgcgccagcgagcgcctgtcgatcatggccgactacgtgggcccatccatgcagatcgccgtcttcagtgcccgtccctacgaccgccgcttccttgatgaggcgaaccagcgcgatgcgtctgaggacggctttgcgttcgtgtacttcgatgtggcgctggacgtgcatacggcggcgctggcgcaggattgcgcagccgtatgcgtgttcgtcaacgaccgcctggatgcgccggtactgcatgccctgcatgcgatgggggtgcgggccgtgctgctgcgctgcgcaggtttcaacaacgtggatctggcggttgcggaagcgctggatctgttcgtcgcacgcgtaccagcctattcgcctgaagccgtggccgagcatgcgctggcgctggtgatgaccctcaaccggcagacccatcgcgcctacaaccgggtgcgcgaaggcaacttcatgctcgatggcctgctcgggcgcaccctgcatggccgcaccgtgggcatcgtcggtaccggcaagatcgggctggccaccgcgcgcatcttcaggggcatgggttgcatcgtgctggggcacgacccgtacccgtcgccggccttcgccggcgtgggtgacatggttgggctggatgaactgctggcgcgcgccgatatcgtgtcactgcattgcccactgacgcccgatacccagcacctgatcaacgacgcctcgctggcgcggatgaagaccggcgcgatgctggtcaacacctygcgcggcgcgctggtcgatacccatgcggtgatccgcgcgctgaagtcgcggcggctgggtcatctggccatcgacgtctacgagcaggaaagcgcgctgttcttccaggacctgtccggcgagatcatcgatgatgaggccttccagcgcctgatgaccttccccaacgtgctggtgaccggccaccaggggttcttcaccgtagatgcgctgcaggagatctcggcaatcacgctggggaacctgcgggatttcgccgaggggcgggtgtgttcgaaccgggtggaggcgagctga

SEQ ID NO: 4623 - DNA, 2217 bp, Oryza sativa
atgggctcgtcggcggccgactcgttccccgcttgtggagatgatgcaatccgagacgtgtacggcatcggtggtkgtggggaggaggacgatccgtccctcttcctctacctctccgacctcgcccccgtctccccctccgcctacctcgacctccccccctcgccgccgccgccgacgacgacggcgacgacgatggtgaaggagggggaggaggcgccggaggacctggtgctgccgttcatgctcgaggatgctgatggaggaggacatcgacgacaagttcttctacgactaccccgacaacccggcgctgctccaggcgcagcagcccttcctcgagatcctctccgatccctcctccaactcccgctcctccaactccgacgacccccgcctctcccgacctcctcctccgacacctccgccgccatcaactcctacgacgccgccgccaccgccaccgccgttgccgccgccgcggtgcccgtgccgcagtacgagagcatcgagctcgatcccgccgcgttcttcgccgcggccaactccgacctcatgagctccgccttcctcaaggggatggaggaggcgaacaagttcctccccaccgagaacaagctcatcatcgacctcgaggcctcgtcggagaataattacctcaggggtctcgaggaggccaagaggttcctgcccagcgacgacaagcttcaggttggattcgctgcggcggcggcgcctgtggtgagcgtgaagaaggaggcggtggatgtggtggtggcaaccgcctcgggcggcggcggacgagggcggaagaacccgtacgacgacgaggagctggagctggagggagggaggagcagcaagcagaccgcggttcagggggacgatgtcgcggcgcgcgccatgttcgacaaggtgatgatgccctcccatgagaattgcaccgagatgatggagaagctgaggattgccatgaaggaggaggcggccaagaacgaggccagcgccggcgggaagggtgggaacgggaaggtgaagggagggcggcggggcgggagggacgtggtggacctgcgcacgctgctcatccactgcgcgcaggccgtggccaccgacgaccgccggagcgccaccgagctgcttaagcagatcaagcagcacgcgaaaccgaccggcgacgcgacgcagcgccttgctcattgctttgctgagggcttgcaggcgcggatcgctggcacgggcagcctggtgcaccagtcgctcgtggctaagcgcacctcagccgtggacatcctccaagcgtaccagctgtacatggctgccatctgcttcaagaaggtgtccttcattttctccaatcaaaccatctacaatgcttccttgggtaagaagaagatacacatcgttgattacggtatacagtatgggttccagtggccgtgcttcctgcggcggatatcacaaagggagggtgggccaccggaggtaaggatgactggcattgacctcccccagcctggtttccggccaactgagcgtattgaggagacagggcaccggctcagtaaatacgcccaggagtttggggtgccattcaagtacaatgccattgcagcggttaagatggagtcagtccgcaaagaggatctgaacattgatcctgatgaggtgctcattgtgaattgccagtatcaatttaagaacttgatggatgagagtgttgtgatcgacagcccaagggatattgtgctcagcaacatccggaagatgcagcctcatgtgttcatccatgcaatagtgaatggctcattcagtgcaccattctttgtgacacggttccgggaggctttgttcttttactcggccttgttcgatgttctggatgcaactaccccaagggaaagcgaacagcggctgctgattgagcaaaacatctttggacgagctgctctgaatgtcattgcgtgtgagggcatagatcgggtggagcgccctgagacatacaagcaatggcaggtgcggaatcaacgggctggcttcaagcaactgccattgaatccagaaattgttcaggtagtgcggaacaaggtcaaggactgctaccacaaggacttcgtgatagatatagatcaccaatggctcttgcaaggatggaagggacgaatactctatgccatctcaacatggacgccaaatgatgctctctcttatttttag

SEQ ID NO: 4624 - DNA, 732 bp, Oryza sativa
atggcggcggcggcgaacctggaggacgtcccgtccatggatctgatgaacgagctgctacgccgcatgaagtgcagctccaagcccgacaagcgcctcatcctcgtaggtccacctggctctggaaagggaacacaatcgcccattattaaggatgagtactgcttatgccatttagctacaggtgatatgttgagagctgctgttgctgctaagactcctttaggagtcaaggcgaaagaagcaatggacaagggagagcttgtttctgatgacttggttgttggaattattgatgaagccatgaagaaaccttcatgtcaaaagggtttcattcttgatgggttcccacggacagttgttcaggcacagaagcttgatgaaatgctggaaaagaaaggtacaaaggtcgataaggttcttaactttgccattgatgattcaattttggaagaaagaattactggccggtggatccatccctccagtggcaggagttatcacactaagtttgcacctccaaaggttcctggagttkatgatgtcactggagaaccactaattcaaaggaaagacgacacagctgaggttttgaagtctagacttgaagccttccacaaacaaactgaaccagtgattgactactactccaagaaggccttggtggccaatcttcatgccgagaagccaccgaaagaagtaactgctgaagtccagaaagttctttcgtaa

SEQ ID NO: 4625 - DNA, 696 bp, Oryza sativa
atggcggaggagaaggagctggtgctgctcgatttctgggtgagcccgttcgggcagcggtgccggatcgccatggcggagaaggggctggagttcgagtaccgcgaggaggacctcggcaacaagagcgacctcctcctccgstccaaccccgtccacaggaagatccccgtcctcctccamgccggccgccccgtctccgagtccctcgtcatcctccagtacctcgacgacgcgttccccggcaccccccamctcctccctccggcgaactccggcgacgccgacgccgcgtacgcgcgcgccacggcgaggttctgggcggactacgtcgacaggaagctctacgactgcgggtccaggctgtggaggctcaagggtgagccgcaggcggcggcggggcgcgagatggcggagatcctccgcacgctggaggcggagctcggcgaccgggagttcttcggcggcggcggcggcggcaggctcgggttcgtcgacgtcgcgctcgtgccgttcacggcgtggttctacagctacgagaggtgcggcgggttcagcgtggaggaggtggcgccgaggctggcggcgtgggcgcggcggtgcggccggatcgactccgtcgtcaagcacctcccctcgccggagaaggtctacgacttcgtcggcgtcctcaagaagaagtacggcgtcgagtag

SEQ ID NO: 4626 - DNA, 1926 bp, Oryza sativa
atgatgggaggtggtctggtgatggaccagggcatgatgttccccggcgtgcacaacttcgtggatctcctgcagcagaacggcggcgacaagaacctcggcttcggcgcgctcgtgccgcagacgtcgtcgggggagcagtgcgtgatgggggagggcgacctcgtggacccgccgccggagagcttcccggacgccggtgaggacgacagcgacgacgacgtggaggacatcgaggagctggagcgccgcatgtggcgcgaccgcatgaagctgaagcggctcaaggagctgcagctgagccggggcaaggaccccgcgggcggcgtcgtgggcgacccgtccaagccgcggcagtcgcaggagcaggcgcggcggaagaagatgtcgcgcgcgcaggacggcatcctcaagtacatgctcaagatgatggaggtktkccgcgcgcaggggttcgtgtacgggatcatcccggagaagggcaagccggtgagcggcgcctccgacaacctccgcggctggtggaaggagaaggtccgcttcgaccgcaacggccccgccgccatcgccaagtaccaggccgacaacgccgtcccgggcttcgagagcgagctcgcctccggcaccgggagcccgcactcgctgcaggagctgcaggacaccaccctcgggtcgctgctctcggcgctcatgcagcactgcgaccctccgcagcggcggtacccgctcgagaagggcgtccctccgccgtggtggcccaccggcgacgaggagtggtggccggagctcggcatccccaaggaccagggcccgcctccgtacaagaagccccatgacctcaagaaggcctggaaggtcagcgtgctcaccgctgtcatcaagcacatgtcgccggacatcgagaagatccgccggctggtccggcagtccaagtgcctccaggacaagatgaccgccaaggagatctccacctggctggccgtcgtcaagcaggaagaggagctgtacctgaagctgaaccccggtgcccgccctccggcacctaccggcggcatcaccagcgccatatcgttcaacgccagctcaagtgagtacgacgtcgacgtcgtcgacgactgcaagggcgacgaggccggcaaccagaaggctgttgttgtcgccgacccgaccgcgttcaacctcggcgcggctatgctgaacgacaagttcctcatgccggcgtccatgaaggaggaggccaccgatgtcgagttcatccagaagaggagcgcgtctggcgcggagcctgagctgatgctgaacaaccgtgtctacacctgccacaatgtccagtgcccgcatagcgactatggatacgggttccttgaccggaacgcgcgcaacagccaccaatacacttgcaagtacaatgatccactccagcagagcacggagaacaagccatcgccaccggccatcttcccggcaacctacaacacgccgaaccaggctctgaacaatctggatttcggcctgcccatggatggccagaggtcaattacagagctgatgaacatgtacgacaacaacttcgtggccaacaagaaccttagcaacgacaatgccacgatcatggagaggcctaatgcagtcaacccaaggatacagattgaagaaggcttttttggacagggaagtggcatcggcggcagcaacggaggtgtgttcgaagatgtcaatggcatgatgcagcaaccgcagcagaccaccccggcacagcagcagttcttcatccgcgacgatactccattcggtaaccagatgggcgacatcaatggcgcatcggagttcaggttcggctctggtttcaacatgtcaggtgccgtcgaataccccggcgcaatgcagggccagcagaagaatgacggctcgaattggtactactga

SEQ ID NO: 4627 - DNA, 1026 bp, Oryza sativa
atggcggcggcgaatgggagcgcctgcggcggaggcggcgtggacaaggagaaggaggagttcaagcagatctacggggtgctcaaggaggagctgctcagggaccccgccttcgagttcaccgactcgtcgcggcagtggatcgatcgcatgttggactacaatgtacctggagggaagtgcaatcgtggtctctctgtggtcgatagctataagctgttgaagggcaccaatgttctaagtcaggaagacatgtttctcgcgagcactcttggttgcttcaagcttactttctcgtgcttgatgatatcatggatgattctcacactcgacgtggttggctccattgctatcaatgatggaattatccttcgcaaccatatcacgcgaatgcttcggctccactttagaggaaaactttactatgctgatctccttgatttattcaatgaggtcgagttcaagacagcttcaggtcaattgctagaccttatcactactcacgagggagaaaaagatctaaacaaatataacataggagttcaccgccgcattgttcaatataagacatcctactattcattttatctgccggttgcttgtgcactgttgctatctggagaggacttgaccaaatatggtgctgtagaagacattcttgttaagatgggaatatactttcaagtccaagacgattatctagattgttatggtgaccccaaatttattggcaagatcgggactgacattgaagattacaaatgctcttggctagttgtgcaagcccttgagcgtgctgatgagagtcaaaagagcgttctatttgaaaattatggaaagaaagatccagcctgtgtggcaaaagtgaagagcctctacagagaactaaacctagaggcggtctttctggactatgagaacgagagttacaagaagttgattgcggatatagaagcccagccaagcatagctgttcagaatgttctgaagtccttcttgcacaagatctacaagagacagaagtag

SEQ ID NO: 4628 - DNA, 860 bp, Oryza sativa
atggctcctcttccggccgccggcgcggcggggcgcatcatcctggcgcacggcgcgtgccacggcgggtggtgctggtacaaggtcgccgcgctgctccgcgccgcggggcaccgcgtggacgcgccggacctcggcgcggccggtcagcgaggcctgggcgtgggcggcgcgccggcgtcgtcgttcgcggaccacgcgcgcccgctgctcgacgccgtccgcgcgctccccgacggcgagcgcgccgtgctggtgggccacagcttcggcggcatgagcgtcgcgctcgccgcggagacgttcccggacaaggtcgccgccgccgtgttcgtcgccgccttcctgccggactgcgcmaacccaccytccaaccccatcgacacggtaataaactcataccatgatgacaaaattacgctttcttttcctcttattttcgccatgaatttctgccactgccagtatcaagaatcagattggatggacaccgtgatcgatccaagccacgtcccaccttccatcctgttcgggccggagttcctgaagaagaagctctaccagctaagctcaccggaagattacacgcttgcgaagagcttggttcgagcgagctccttgtacgtggatgagctgcggcggcgggcggcgttcagggaggacaggtacggcgccgtgagaaaggtgtatgtggtggtcgagaatgacatggccatcgtccaggagcaccagcggtggatggtcgccaacgccgaggtggcggaggtgagggtgatggacgccggcgaccacatggccatgctctccgcgccggaggagctggctgggcacctcgccgacgtcgccaacacatacatcta

SEQ ID NO: 4629 - DNA, 1233 bp, Oryza sativa
atgtcgtcgtcgtcgctgcggaagaagtcggacgccgcgctggtgcggaaggtccccgtggcgccgctccgcccgctgctcgccaacctccaggaggtcttcctcgccaccaagctcgccgtcctcttccccgccgtcccgctcgccatcgccgcccagtgcttccgcttcgaccaggtgtgggtgttcgctcttagtttactgggcctcatccctctcgccgagagagtcagcttcctcacagagcagattgcactctacaccggtcccaccgggggaagactcgaggtggtcaagtgctccctgctgggctccgtcctctccaacctcctcctcgtcctcggcacctccctcttctgcggcggcgtcgtcaacctcggcgcccgccagccctacgaccgcaaccagtccgacgtcagcaccgccctcctcttcctcgccgtcctctgccactccgccccgctcctcctccgctacgccgtcgccgctggcgagcactccgtctccgccacctcggccgcggcgtccctcgacctctcccgcgcctgcagcttcgtcatgctggcgtcctacgtcgcctacctcttcttccagctcaagacgcaccgccagctgttcgagccgcaggaggtggacggcggcgacgccggggacgacgacgaggagccggcgctcgggttcgccagcgcgctcttctggctcgccctcatgaccgccgtcatctccgtcctctccgagtacgtcgtcggcaccatcgagccmacytcgcagtcatggggcctctccgtcagcttcatcagcatcatcctcctccccatcgtcggcaacgccgccgagcacgccggcgccatcatcttcgcgctcaagaacaagctggacatcactcttggggtagctctgggatcggccacccagattatccatgttcgtggtgagtgctgctgcttaacttacccagtgccactgagtgtgctcgtggcctggatcatgggggtccaaatggatcttgacttcaagctgctagagaccggctctctgttcatggcggtgctggtgacggccttcaccctgcaggatggaacatcacattacctgaaggggattctcctcctcctgtgctacattgtcatcggcgcatgttttttcgttgcaagacaacctgcaggccatgcaaacagcaatggagccttgctggatgtaccaaccggttccatgagtgttcaggccgcatga

SEQ ID NO: 4630 - DNA, 1053 bp, Oryza sativa
atgggggccgtcctcggcaccgggagggtggggactctgactcgggtggcgctgacgatcgtcgtcttcctgctgctgttgccgtcgcacgccctcgccgcggccgtcgcgaaggacacctccgccacactggtcgagacgctgccgctgcccacgacgctggtcggcccagagagcgtcgcgttcgacaagttcggcgatggcccctacagcggcgtctccgacggccgcatcctccgctgggacggcgccgacaaaggctggacgacgtactcccacgccccggggtacaacgtcgccaagtgcatggctcccaagctccatcccgcggagctcaccgagagcaagtgcggccggccgctcggcctccggttccacaacacctccggtaacctctacatcgccgacgcgtacaagggcctcatgcgtgtcggcccgcgcggcggggaggcaacggtgctcgccacggaggccgacggcgtgccgttcaagttcaccaacggcgtcgacgtcaaccaggtcaccggcgaggtctacttcaccgacagcagcacgcgcttccagcgatcccagcacgagatggtcacggccaccggcgactccacgggccgcctgatgaagtacgacccgacgacgggctacctcgacgtgctccagtccggaatgacgtacccgaacggcctcgccattagcgccgatcggagtcacctcgtggtggcgctgacggggccgtgcaagctggtgaggcactggatcgagggccccaaggccggtacgtcggagccgttcgccgagctgccgggctacccggacaacgtgaggcccgatgggaagggaggctactgggtggcgctgcaccgcgagaagaccgagacgccgtatggctcggacacccacctcctcgccgtaaggatcggtcgcaaggggaagatcttgcaggagttgagggggccgaagaacgtcaggccaacggaggtgattgagagaggcggcggcaagctttatttgggttcggtggaattgggtcatgtggctgttgttaaagctacttag

SEQ ID NO: 4631 - DNA, 1377 bp, Oryza sativa
atgatgcagatctttgtgaagacattgaccggcaagactatcaccctcgaggtggagtcctctgacaccatcgataatgtcaaggctaagatccaagataaggagggcatccccccggaccagcagcgtctcatcttcgctggcaagcagctggaggatggcaggacccttgctgactacaacatccagaaggagtcgacccttcaccttgtcctccgcctccgtggtggcatgcagatctttgtcaagactctgaccggcaagactatcacccttgaggtggagtcttctgacaccatcgacaacgtcaaggccaagatccaggacaaagagggcatccccccagaccagcagcgtctcatcttcgccggcaagcagctggaggatggcaggacccttgctgactacaacatccagaaggagtccaccctccaccttgtcctccgcctccgtggtggcatgcagatctttgtcaagacactgaccggcaagaccatcaccctcgaggtggaatcttctgacaccatcgacaacgtcaaggccaagatccaggacaaggagggcattcccccggaccagcagcgtctcatctttgccggcaagcagcttgaggacggcaggacccttgctgactacaacatccagaaggagtcaacgcttcaccttgtcctccgtctcaggggaggcatgcaaatcttcgtgaagactctgaccggcaagaccatcaccctcgaggtggagtcttctgataccatcgacaatgtcaaggccaagatccaggacaaggagggcattcccccggaccagcagcgcctcatctttgctggcaagcagctggaggatggcaggacccttgctgactacaacatccagaaggagtccaccctccaccttgtgctccgccttcgtggtggtatgcagatctttgtcaagaccctcacaggcaagaccatcaccctggaggttgagagctcggacaccatcgacaacgtcaaggccaagatccaggacaaggagggcatccccccagaccagcagcgtctcatcttcgccggcaagcagctcgaggatggccgcaccctcgccgactacaacatccagaaggagtctaccctccacctggtgcttcgtctccgtggtggtatgcagatcttcgtgaagaccttgactgggaagaccatcactttggaggttgagagctccgacaccattgataatgtgaaggccaagatccaggacaaggaggggattcccccagaccagcagcgtctgatcttcgctggcaagcagctggaggatggacgcaccctcgccgactacaacatccagaaggagtccaccctccacctggtgctccgcctccgtggtggtcagtaa

SEQ ID NO: 4632 - DNA, 2616 bp, Oryza sativa
atgttctcgcgatcctacaccaacctggtcgatctcgccaacggcaacctctccgccctggactatggtggcggagggggaaggggcggcggcggcaacggggccgggggccggccgccgcgggcgaggcggatgcagcggacgatgacgacgcccgggacgctggcggagctcgacgaggagcgggccgggagcgtcacctccgaccgaccgcctatcgtcgtcgccaacaccctccccgtgcgctgcgagcgccgccccgacgggcgcgggtggagcttctgctgggacgaggactccctcctcctcmacctccgcgacggcttccccgatgacatggaggtcctctacgtcggctccctccgcgccgacgtgccgtccgccgagcaggacgacgtcgcgcaggcgctcctcgaccggttccgctgcgtcccggctttcctccccaaggacgtcttggacagattctaccatggcttctgcaagcagacgctgtggccgctcttccactacatgctccccttcacctccgaccatggcggccgcttcgatcgctcccagtgggaggcatacgtcctcgccaacaagctcttctcccagcgcgtcatcgaggtcctcaaccccgaggatgactacatctggatccacgattaccacctcctcgccctcccgtccttccttcgccgtcggttcaacaggctccgcatcggtttcttcctgcacagcccgttcccttcgtcggaactctaccgttccctccctgttcgcgacgagatcctcaaatcactgctaaactgcgatctgattgggttccacacctttgattacgcgcggcatttcctgtcctgctgcagccggatgctggggatcgagtaccagtcgaagaggggatatatcggtctcgattactttggccgcactgttgggataaagatcatgcctgttgggattaacatgacgcagctgcagacgcagatccggctgcctgatcttgagtggcgtgtcgccgaactccggaagcagtttgatgggaagactgtcatgctcggtgtggatgatatggacatatttaaggggattaatctgaaagttcttgcgtttgagcagatgctgaggacacacccaaaatggcagcgcaaggcagtgttggtgcagattgcaaacccaaggggtggtggtkggaaggaccttgaagagatacaggctgagattgatgagagttgcaggaggataaatgcacaattttcacggccaggatatgttcctgtggtgattatcaatagagccctttcaagtgtggagaggatggcttattataccgtggcagagtgtgtcgttgtaactgcagtgagggatgggatgaacctcacaccatatgagtatattgtctgtagacagggatttccagatttggatggttctggggatgatgggccaaggagaaagagtatgttagttgtgtccgaattcattggttgctcaccatcacttagtggagcaattcgggtaaacccttggaacattgatacaacagcagaggcaatgaacgagtcgattgctttatcagagaacgagaagcaactgcggcatgagaagcattacagatatgtcagctcacatgatgttgcctattggtccaagagctatattcatgatttggagagaagctgcagggaccattttaggaggaggtgctggggtattggactaggatttggatttagagtagttgctcttgaccgcaacttcaaaaagcttactgtggattctatcgttactgattacaagaattctaagagcagggttatactgctagactacgatggaacgctagtaccacaaactacaatcaacaggactccaaatgaaagtgttgttaaaatcatgaatgctctttgtgacgataagaagaatgttgtttttattgttagtggacgaggaagggatagccttgagaaatggttttccccttgccaggatcttggcattgctgccgaacatggctactttatgaggtggaccagagatgagcaatggcaattgaataaccagtgctcagaatttggatggatgcagatggccaagccagttatgaacctgtatacagaagcaaccgatggatcatatattgaaaccaaagagagtgctttggtctggcaccaccaagatgctgaccctggttttggatcttcacaagctaaagagatgctagatcatttggaaagtgttcttgctaatgagcctgtctgtgtaaagagtggccaacagattgtggaagtgaaaccgcagggtgtcagcaaaggatttgttgctgagaagatcctatcaacgctgacagagaacaagagacaggcagattttgttctctgcataggcgatgatagatcagacgaggatatgtttgaaggaattgctgatatcatgagaaggagcatagttgatccccaaacatcattatatgcgtgcacagtcggccagaagccaagcaaggctaagtactatttggacgatactaatgatgttttgaacatgcttgaggcgcttgcagatgcatcagaggagactgattcacaggaagatgcagaagagataacatctatcccggacccggaatag

SEQ ID NO: 4633 - DNA, 2064 bp, Oryza sativa
atgagctcgagcgggcgaggcggcaagcggcaaggggcgccgcccccagcgccattcggggctgcggcgaagagggcccaaccccacggtgggcacctagcagatgactccatccgcgctagcggtgacctctcatctcctatcggttcagcgcctaacggtcgctgcctcctcttccacagcttttggttcgattccccattccttgcactgctccaagcctctaacctggagttttacctcttgaaaatgcagggcattcagcaagtgcttatggttaagaactacactacattacaaagttgccaagaaaatgcaagtgtgctacattgctcaggactgcctcagatcaagttgctttctaggttcaggagatcaagctgggtgagaacatcagagtataatggttgtgatggtgagagcaccatagtatggtggatagggctaggtgagtgtttattgccaaatcctgacatggaaaagggtgaagagaattttggtaatatagttgccatagtgacagtgcggatgagacttaataataggtctcctcggggaaatttggagtactatagttggaagtcggaactcgaaagatcgccaaaagattccagacaaagggtgtgtttagttgacgtcaaaattaccccggcaccttaccgagcggcggctcagcacgctgctgctacgcacatggacaagagccagggagtcctactgtccagcaacgtcggggccggctcccggccgtggccggagctgctcggctccgcccactgggacggcctcctcgacccgctcgacctcacgctgcgccgcctcatcctgctctgcggcgacctctgccaggtcacctacgactccttcaactccgactcccactccaagtactgcggcacctgccgcttctccaggtccacgctcctcgaccgcacgcagttcccggccgccggcgacctctccgtcgccgcctacctctacgccacctccgacgccacggcgttcccggggagcatggtgtactcgatgtcgcgcgaggcgtggagcaaggagtccaactggatcggctacgtcgccgtgtccaacgacgccgcagcggccgcctcgggccagcgcgtcatctacgtcgcgtggcgcggcaccatccggtcgctggagtgggtcgacgtgctcaagccggacctggtcgaccacgacgacatcctccccgaggggcacccggggcccggccggtcgcgcgtcatgaaggggtggtacctcatctacagctccaccgacgagcgctcccctttctccaagtacagcgcccgcgaccagatgctcgccgccgtgcgcgagctggtggcgaggtacaggaacgagagcctcggcgtcgtctgcacggggcacagcctcggcgcgtcgctcgccacgctctgcgcgttcgatatcgtcgtcaacggcgtgtccaaggtcggcgacggcgcgcacatcccggtgaccgccgtggtgttcgggagcccgcagatcgggaacccggagttcaagaagcagttcgaggagcagcccaacctgcgggcgctgcacgtcaggaacatgcccgacctcatcccgctctacccgagcggcctcctcggctacgccaacgtcggcaaaaccctccaggtcgactccaagaagtcgccctacgtgaagcgagacaccagcccaggcgactaccacaacctgcaggggatcctacacacggtggccggctggaacgggaaggacggcgagttcaagctccaggtgaagcgcagcgtcgcgctggtgaacaagtcgagcggcttcctcaaggacagcaaccttgtgccggagtcatggtgggtggagaggaacaaaggcatggtgctcggccagaacggggaatggcagctcgaggggcccgcagaggagaacctgcccgtgccaccggtggtgaccgggaagatcatcgacgacgacgtcgctgccgtggccacctccagcagtgccaaggaggataagaagacgggcaaagggtctaagcttctgtctggattgattgatcaactgctttgtgtgtaa

SEQ ID NO: 4634 - DNA, 1098 bp, Oryza sativa
atgggcagcytcgccgccgagaagaccgtcaccgggtgggccgccagggacgcctccggccacytcaccccctacaactacaccctcaggaagactgggcctgaagatgtggtggtgaaggttttgtattgtggtatctgccatactgacatccaccaggccaagaaccaccttggtgcttccaagtaccccatggtccctggccatgaggtggtcggcgaggtggtggaggtcgggccggaggtgaccaagtacagcgccggcgacgtcgtcggcgtcggcgtcatcgtcggctgctgccgcgagtgccatccgtgcaaggccaatgtggagcagtactgcaacaagaggatttggtcctacaacgacgtctacaccgacggccggccaacccagggcggcttcgcctccgccatggtcgtcgaccagaagtttgtggtgaagatcccggcggggctagcgccggagcaggcggcgccgctgctgtgcgccgggctgacggtgtacagcccactgaagcacttcgggctgatgtcgccaggtctccgcggcggcgtcctggggctcggcggcgtggggcacatgggcgtgaaggtggccaagtcgatggggcaccacgtgacggtgatcagctcgtcggcgaggaagcgcggcgaggccatggacgacctgggcgccgacgcctacctcgtcagctccgacgcggcggcgatggcggccgccggcgactcgctggactacatcatcgacaccgtgccggtgcaccacccgctggagccgtacctggcgctgctgaagctggacgggaagctgatcctgatgggggtgatcaaccagccgctgagcttcatctcgcccatggtgatgctcggccggaaggccatcaccggcagcttcatcgggagcatggccgagacggaggaggtgctcaacttctgcgtcgacaaggggctcacctcccagatcgaggtcgtcaagatggactacgtcaaccaggccctcgagcgcctcgagcgcaacgacgtccgctacgcgcgtgtcagttcgtcagacgtcgccggcagcaacatcgacgacgccgacgcgccgcccgcctga

SEQ ID NO: 4635 - DNA, 624 bp, Oryza sativa
atggggatggaggcggagtgcgataggataaaggggccatggagccctgaggaggacgaggcgctgcggcggctggtggagcggcacggggcgaggaactggacggcgatcgggagggggatcccggggaggtcggggaagtcgtgcaggctgcggtggtgcaaccagctgtcgccgcaggtggagcgccgcccgttcacggcggaggaggacgccgcgatactccgggcgcacgcccgcctcggcaaccgctgggccgccatcgcgcgcctcctccccggccgcaccgacaacgccgtcaagaaccactggaactcctccctcaagcgcaagctcgccaccgccacggacggcggcgagatcgaccggccgtgtaagcgcgtkagccccgggccggggarcccgacgggatcggagcgcagcgagctcagccacggcggctgcggaagcggaagcggcggcgggcaggagatgatccgcacggaagtccgcaactacatggccggcgtcgggctccgcgccggctgcggcccgggcgccgtggccgagtccttcatgccgcagctcgtcgacggcgtcatgggcgccgccgccgagagggtcggcgtcgtgacccgccaataa

SEQ ID NO: 4636 - DNA, 5496 bp, Oryza sativa
atggcgggaggaggaggagttggaggaggcgctggcgagcacgcggcggcggcgtactggtacgacgcgtgcgaggacggcgcgtcgctgctgtgcggcatcgacttcgccgcgtccgcggacttcgaccccggcctcatacccgcgatggacaccggcgccgacgacggcttcgtcgccgagatcgacaggatactcgagagcatcaacgcggagagctcccctgcgccccaaccccgccgccgccgccgctacctgagcccgtgcctgtggctccgccggagctacgattcaggaaaagcaattacaggtggcctctgcgcccgtggccaacaatgccgtggcggtkgtgggcsttgtgcagagaagcgtggaaggcgcgatttcgacagggtccgcaagcacgagcaccatcggcgcgaggcccggggtttctgggagcgtgaccgcggcggcaagatggtgttccgctcaggcacctgggagcaggagtctgaccgcgaggcaaagcgtgccaggacgcaagatggaggctccatggagaagaaggcagaggcagataggatgggggctgcgcagcgggagaagcctgtcgcggaggagcgtgcaaggcaataccagctagaggtgcttgagcaagctaagagcaggaacacaatagccttcctggagactggcgcagggaagactctcatcgccgtgcttctcatcaaaagtgtgtgcgataaaatgctcaaggagaacaagaagatgcttgctgtcttcttggttcccaaggtgcctcttgtgtatcaggtactagttatgacagcccaaattttgttaaacatcctcaggcacagtattattaaaatggatgcgatacatcttttgattttagatgagtgccatcatgcagtgaaaaaacatccatattctctagtgatgtcagaattttatcacacgactccgaaggagaagaggccagcagttttcggtatgacggcttctcctgtcaatctaaaaggagtgacgagtcaagaggactgtgccatcaagataagaaatcttgagagcaaactagattcagtagtttgtaccatcaaagatcgtaaagagcttgagaagcatgtccccatgcctttggaagttgttgtccaatatgacaaagcagccactctttggtccttgcatgagcaaatcaaacaaatggaaagcacggttgaagaagctgcactctctagctctaagagaactaaatggcagttcatgggggctagggatgctgggtctagagatgagctgcgtcttgtctatggtgtttcagagcgtacagagagtgatggtgcggctaatttaatccagaagttgagagctataaattatgctttaggtgaacttggacaatggtgtgcatataaggttgcacagtcctttttgactgcattacaaaatgatgaaagggcaaactatcaggttgatgtcaagtttcaagagtcttatttaaaaaaggttgttgatctgttacactgccagttgactgaaggggctgcaatgaaaagtgagaccagtgatgttgaaatgcaaaatactgaaaaacacaacacaaatgaccttgaggagggggagctgcctgacagtcatggtgagcatgtagatgaagttatcggtgctgccgtagcagatggtaaagttactcctagggtgcaggctttgatcaaaatacttctcaaatatcagcatactgaggattttcgtgccataatctttgtggagagagttgtgacagcattagttcttcctaaggtattggcagaacttccatctctaagttttattcgatgtgcaagcttgataggccataacaataatcaagagatgcgcgcgtgccagatgcaggatacaatttcaaaatttcgtgatggccgtgttacacttttagtcgcaacaagcgttgcagaggaagggcttgatattcgacagtgcaatgttgtcattcgatttgaccttgcaaagaccgtcttagcctacatacagtcacgtggtcgtgcaagaaagcctggatctgattatatattaatgcttgaaaggggcaatatatcacatgaaacttttttgaggaatgctcggaatagtgaggagacgttgagaaaggaagctatggaaagaaccgatcttagtcatttggatggtacttctgtgttgagtcctgttgatacatcacctggttcaatgtatcaggttgaatcaacaggtgctgttgtcagcttgaactcagcagttggactcatacatttttactgttcacagttgccaagtgacagatactcaattcttcatccggaattcattatgcaaaagtatgagaagccaggtggttcagtggaatattcttgcaagcttcagctcccttgtaatgccccgttcgaaaaacttgagggtcctatatgcagttcaatacgactggcacagcaggctgtttgtttggctgcttgtaagaagctgcatgagatgggtgccttcacagatacgctcttacctgacagaggaagcggggaaggggaaaaaactgagcagaatgatgaaggtgaaccacttcctggaacagctcgccatagagagttttatcctgaaggtgttgctgatattctacggggagaatggattttatctggcagagatggctaccaaaactctcaatttattaagttatatatgtattctgtgaactgtgtaaacgttgggacttctaaggaccctttcgttacacaactttcaaattttgcaattatttttggcaatgagctggatgcagaggttttatcgacgacgatggatctctttgttgcaaggacaatgataacaaaggcatctctcgtattccgtggacgaattgaaattacagaaagtcagctggtgttgctgaagagctttcatgttaggctcatgagcatagtacttgatgttgatgttgatccctcaactacaccttgggatcccgcaaaagcatacctctttgtccctgtaggagctgagaagtgtacagatcctttaagagagattgattggactttggttaacaacattgttaacactgatgcctggaacaatccacttcagagggcacgcccagatgtctatctaggcaccaatgaacgaacacttggtggggataggagggaatacgggtttgggaaattgcgccatgggactgcttttggacaaaaggcccatcctacttatggtattaggggagctattgctgaatttgacattgtgaaagcatctggattagttcctgctcgtgatagaggacattttagtgattatcagaaccaaggcaagttgttcatggcagattcatgttggaatgctaaagatcttgctggaatggttgtcactgctgcccactcagggaagaggttttatgtggactgcatttgctataacatgaatgcagaaaattcattccctaggaaagaaggctacctggggccattggagtatagttcatatgctgattactacaagcagaagtacggtgtggagttaatctataggaaacagcctcttatacgggcccgtggtgtttcatattgcaagaatcttctttctcctagatttgagcattctgacgctagagaaggtgacttctctgagaaccttgacaaaacatactacgtgtatttgccacctgagttgtgccttgtgcacccacttcctggatcactagttcgtggagctcagaggttgccctcaataatgagaagggtggagagcatgcttcttgcagttcaattgaaggacataattgattaccctgttcctgcaactaagatactagaagccttgactgctgcatcatgccaggagacattatgctatgaaagagcagagctgctgggtgatgcatacctgaaatgggtcgtgagtagattcctcttcctaaaatatcctcaaaagcatgagggacagcttacaaggatgcggcagcagatggttagtaacatggtcctgtaccaatatgctctgaataaaaccctccaatcatatattcaagcagaccggtttgctccatcaagatgggcagctccaggagtgctacctgtattcgatgaagagtctagagagtatgaaccttccatctttgacgaggaatcaactggttgcgagttacagaaggaatcctatgatgactatgcagataacatgcaagaagatggtgaaattgaaggagactctagctgctatcgggttctgtcgagcaaaactttagcggatgttgttgaggcacttattggggtgtattatgtagcaggagggaaaatcgctgcaaaccacctgatgaaatggattggaattcatgcagagttggatcctgaagagatcccacctccaaagccatatgacattcctgagagcataatgagaagcatcaacttygacacgttgawaggtgtcwtgsgtatcgaattccagaataaaggtgtctwgsgtatcgaattccagaataaaggtytactwgttgagrccataacacatgcatcgagaccatcttctggtgtttcctgttaccagcgtttggaatttgttggtgatgctgtgttggatcatctcataaccaggcatttgttttttacatatactgacctacctcctggccgcttgactgatttgagagctgcagctgttaataatgagaattttgcaagggttgcagttaagcataagctgcatgtacatcttcgccatggatcatctgcattagaaacacagattcgagagtttgtgaaagatgtccaagaggagcttttgaaaccaggtttcaattcttttgggcttggggattgtaaggctcctaaagttcttggtgacattgttgagtcgattgctggcgcgatattcctggatagtggatatgatacctcagttgtctggaaggtttttcagccactccttcatccaatggtgacgccagagacccttccgatgcatccagttagggagctccaagaacgctgccaacagcaggctgaaggcctggaatacaaagcatcccgagcaggcaacatagctactgttgaagtatttgttgatggtgttcagatcggtgtagctcagaaccctcagaagaagatggcacagaagttggcagcgaggaatgcacttgtggtcctgaaggagaaggaaaccgcaacaargaaagaagatgaaagggatggcgagaagaaaaatgaccctgaacgagatctgattgagaaggcagacctgaacgacatctgcttgagaaggcagtggccaatgcctcagtacaggtgcgtaaacgagggtggccctgcccatgctaaaagattcgtctattcggtgagggtgaacacttctgatcgtggatggacggatgaatgcattggagagccaatgcctagtgtgaagaaggctaaagactctgctgcagttcttctcctcgagcttctgaatagagatttccctgacaagcctgacggtaagcagccgtag

SEQ ID NO: 4637 - DNA, 1032 bp, Oryza sativa
atgggggagatcaccaatgtcacggagtaccaggccatcgcgaagcagaagcttccgaagatgatctacgactactatgcatctggggccgaggacgagtggactctccaggagaacagggaggccttcgccaggatcctgtttcgcccacgcatactgatcgacgtatccaagattgacatggccacaacagtcctggggttcaagatttcaatgcccattatgattgctccctctgccatgcagaagatggctcacccagatggagagtatgcaactgcgcgtgctgcatcagcagcgggcactataatggtttacaaagacaggagggtggtggagcagcttgttaggagagctgaaagggctggattcaaggcgattgcgcttacggtggatactccgcgacttggccgtagggaggctgacatcaagaacaggtttgttctgccaccatttttgacactgaagaactttgaaggcctggagctggggaaaatggaccaggctagcgattcaggactggcttcttacgtcgccgggcaaatcgatcgcaccctgagctggaaggatgtgaagtggctgcagaccatcaccacgctgccgatcctggtgaagggagtgatcactgcagaagacacgaggctcgccgtggagaacggcgcggccggcatcatcgtgtccaaccacggcgcccgccagctggactacgtcccggccaccatcagcgccctcgaggaggttgtgaaggcggctcgcgggcagctccccgtcttcctcgacggcggcgtccgccgcggcaccgacgtcttcaaggcgctcgccctcggcgccgccggcgtcttcatcgggaggccggtggtgttctcgctggcggcggcgggggaggccggagtccggaacgtgctgcagatgctccgcgacgagttcgagctcaccatggcgctcagcggctgcacctccctcgccgacatcacccgcaaccacgtcatcaccgaggccgacaagctcggcgtcatgccgtctcgcttgtaa

SEQ ID NO: 4638 - DNA, 1940 bp, Oryza sativa
atggttcatcagcatgatgagtcaacagcaaatgaagtcagcaccaccacacagcttccctcctatggatcatctgaagaaccgcgtgtgtacaaggtcaggtgtcctcctcaaaagaactttgcgagagagtttagagacacattgagagagactttcttccatgacaacccattacgccagtacaaggaccaatctggatcggcaaagttcatgatggcgctgcagttcctgttcccaatctttgagtggggcaggtgctacaacttaagaaagttcaaaggtgatttaattgctggattgaccattgcaagtctctgcattccccaggatatcgggtattcgaagcttgctaacttggatgcacaatatggactatactccagctttgttcccccattgatatatgctgcaatgggcagctcaaaggatattgcaatcggtccggttgcagtgaatgaagtcgaccctgtcaaaaacaaggaggaatatctgcgccttgctttcacggctaccttctttgctggtatcactcaagcagccctaggatttttaaggctaggattcctcatcgagttcttgtcacatgctgcaattgttgggtttatgggaggagcagccattactattgcccttcagcagctaaaatatgtgttgggcatcaagagctttacaaagaaaaccgatataatttctgttatgcgctctgtttggacttcagctcatcacgggtggaattggcaaactattgtgattggcataactttccttgcattccttctgcttgccaagtacattggaaagaagaataggaagttcttctgggtgccagctattgctcctataacttcagttattttggcaaccctttttgtgttcattactcgtgctgacaagcaaggtgttcagattgttaaccacatcaaaaagggcataaacccatcatcagtccacaaaatttatttcactggtccatttgttgcaaaaggtttcaagatcggtgtcatttccgccatgatcggtttaacggaagctgtggcaattgggaggacgtttgctgctctgaaggactatcaattagatggaaacaaggagatggtagcacttggaactatgaacatagcagggtcaatgacatcttgttatattgcaacaggttctttctctcgttccgcagtcaatttcatggctggctgccaaacaccagtgtccaatatcattatgtcagcagttgtgctcctgaccttgttggtcatcacaccactcttcaagtacacaccaaatgcgatcctcgggtcgataatcatttctgcggtgatcggccttgtggactacgaagcagtaattctcatttggaaagttgacaaaatggatttcatttcttgcatgggagcattctttggtgtggtcttcgcatctgttgagataggtcttttaatagctgtatcgatttcatttgctaaaattcttcttcaagtaacaaggccaaggactgtacttctgggaaaccttccaggcaccacaatatacaggaacactgatcagtatccagaagcaagacatattcctggggttgtaatagtgagggttgattctgctatctacttctccaactcaaactatgtccgggagagaactcttaggtggttgacggaggaagaagagaaagccaaagcagagggacagtctaaaatcaatttcttgatcatagagatgtccccggtcatagatatcgatacaagtggcatccatgctctagaagatctatacaagaatcttaagaagagagacattcagctcatcctagcaaatcctggatccatcgtcatggaaaagctcttgtcatccaagctcaacgagcacatagggagtaacaatattttcctcacggttgctgacgctgtgcgtttctgcacaagaaagtcgatgcaagaaccatg

SEQ ID NO: 4639 - DNA, 330 bp, Oryza sativa
atggagaatagtgccatgcaatctcagcgtagcatgtcttcaatcagtacggcagcacaatcgagcgatcagcatggagctggaagtagcaccaacccaaatgagtttgtaaatcaaggacttctcctgtggaaccagactaggcaacagtgggttggaaacagaaggcacaattctcagcgtcaacaacctcgagagccaaaaataagttggaatgctacatatgagagccttctaggaagcacaaaaccatttccacaagcgatccctcttggtgaaatggtagatttcctcgtgracggctgggagcaggaaggcctatatgattag

SEQ ID NO: 4640 - DNA, 2895 bp, Oryza sativa
atggcggcggcgagggcgccgtggctgtggtggtgggtggtggtggttgttggtgtggcggtggcggaggcggcctccggaggaggaggagggggagatggggaggggaaggcgctgatgggcgtgaaggccggtttcgggaacgcggccaacgcgctcgtcgactgggacggcggcgccgaccactgcgcgtggcgcggcgtcacctgcgacaacgcctccttcgccgtcctcgccctgtctttggatattagtgaggctatcttgtttgttatgctaaaaaggatttttgtgatgagagtgtttccctgtgtgaaaaacaggaacttgtcaaatctaaacctaggaggtgagatctcgccggccatcggagagctcaagaatctacagttcgtggatttgtctggcaacttgctgtatggagacatccccttctccatctccaagctcaagcagcttgaggagctgattttgaagaacaaccagctcacgggacccatcccttccacattgtcccaaattccaaatctcaagacattggacctggcacagaaccagcttacaggcgatatcccaaggctcatatactggaatgaagttctgcaatacctaggtttgaggggtaactcactgactggaactttgtcacctgacatgtgccaactgactggcctgtggtactttgatgtaaggggaaacaatctcacagggaccattccagagagcatagggaactgcaccagctttgagattctggacatttcgtataaccaaatctctggagaaataccttacaacataggctttcttcaagtagccacactgtcacttcaaggaaatagactgactgggaaaattccagatgtgattggcctgatgcaagctcttgctgttctatatttacatgggaacaaacttactggagtcataccgccggagcttgggaacatgagtaaacttagctacctacaactgaatgataatgaattggtgggcacaattccagcagagcttggcaaacttgaagagctttttgaactaaatcttgccaacaacaatcttcaaggtcctattcctgcaaacatcagttcttgcactgctctaaacaaattcaatgtttatggcaataagctaaatggttctattcctgctggtttccagaagttggagagtctgacttacttgaacctatcttcaaacaatttcaaaggcaatattccttctgagcttggtcacatcatcaacttggacacattggatctttcctacaatgaattctctggaccagttcctgctaccattggtgatctagagcaccttcttgaactgaatttgagtaagaaccatcttgatgggccagttcctgctgagtttggaaacttgagaagcgtccaagtaattgatatgtccaacaacaacttatctggtagtctgcccgaggaacttggacaacttcaaaaccttgatagcctgattcttaacaacaacaatttggttggggagatccctgctcaattggccaactgcttcagcttaaataacctgaatttgtcatacaacaatttatctggacatgtcccgatggcaaagaacttctcgaaattcccaatggaaagcttcttgggtaatccattactgcatgtttactgccaagattccagctgtggacactctcatggacaaagagttaatatttcaaagacagcaattgcttgcattatcttaggctttatcatattgctctgcgttctgctgttggctatatataaaacaaatcaaccacagccacttgtcaaaggatccgataagccagtgcaaggacctccaaagctagttgttctccagatggacatggctatccatacttacgaggacatcatgaggctgacagagaatttgagcgagaaatacatcattggctatggcgcctcaagcactgtctacaaatgtgaactcaagagcggcaaggccattgctgtcaagcggctttacagtcagtataaccatagcctccgagagtttgaaacagaactagagacaattggcagcatacggcacaggaatcttgttagcctccatggcttctcgctatctccacatggaaacttgctcttctatgattacatggaaaatggttccttgtgggatcttctccacggtccatcaaagaaagtgaagctcaactgggacacaagactgaggatcgcggtcggagctgcacaagggctggcctatctccaccatgactgcaaccctcgcataatccacagagatgtcaagtcctccaacatcctgctcgacgagaacttcgaagcgcacctctcagatttcggcatagccaaatgtgtcccctctgccaagtcccatgcctccacttatgtgctaggaaccatcggctacattgatccggagtatgccaggacttccaggctcaatgagaaatctgatgtgtacagcttcggcatcgtccttctggaattgctcacagggaagaaggccgtcgacaacgaatcgaacttgcatcaattgatactctccaaagctgatgacaacacagtcatggaggcagtggactcggaggtgtcagtgacgtgcacggacatgggactggtcaggaaggccttccagctcgcccttctgtgcaccaagaggcacccttcagaccggccgaccatgcacgaggttgcaagggtgctgctctccctgctgccggcctccgccatgacaacgcccaagacggtggactactcccggttgctggcgtcgacgacgacggcggccgacatgcgagggcacgacgtgaccgacatcggcgacaacagctcctccgacgagcagtggttcgtcaggttcggcgaggattgcccaaagattgtccctaggaatttgcagtga

SEQ ID NO: 4641 - DNA, 1188 bp, Oryza sativa
atggagccaaactacagcgactaccaccccaacagtgtccccttcgatgcctactacgagcacggccatggccatctcgacgatcatggccatggccaccaccacctgatccctgcccatcctgagccctcctactcctacggcaactggtccttcctccatgccgatgccaccgcaacgtcctcctccgagtcgtcgtcggcgtccgccagctccggcgcggcgcacattgttggcgcctccggtccttctgcatccttcgtgcggcagcttcatttcggcggcgagtactacgacgacgacgcggcggacatcagcgccctcatggaagccgcctccatctcctgctggacgacgaacggtggtgccggtgcgtcaacgtcgcaaaccacaggcttggagggggtggaggtgatgaggagagcggcggccccggcgccggacaacggatcaagtgacaaggaggaggcggcgcggccgctgatcggggtgcggaagcggccgtggggcaagtacgcggcggagatccgggactccacgcgcaacggcgcgcgggtgtggctgggcaccttcaacacccccgagcaagcggcgctggcgtacgaccaggccgccctctcggtgcgcggccccggcgcggtgctcaactacccgctccaccgcgtgcgggagtcgctgcgcacgctcgagctcggcgccgccgccgccgcctcggagtcccccgtgctcacgctcaaacggcgccaccgcatccggaagcgctccacgaccaagaaggcgctggcgggcaaggaggccgacgaggcacccgccacgacgtcgtcggaggggaagaagaagcggcaggtcaacaccaccagccatagtcatgacggcgcatggcgccgacacctcctctcctccgggcggctctcgatggaggggtcgacggcggctggcgggcacggcgggctcgcgggaggacgtggggaggcagccgggagcaacgtgcgtgcggccgacgacgacgaggacggcgaggcggcggccgggagcagtgtgcacgtggctaacgacgatgacgacggcagcgaggcggcggccgtgagcagcatgcacgcggccgataatgacgacgaggcggtagccggaagtggcgtgcgcatgacgacgacgacggcggcaaggaggcggtcgggagcgggctga

SEQ ID NO: 4642 - DNA, 1407 bp, Oryza sativa
atggtggaggctgcctcggctgcgccggcgacggtggtcgttccgctgacgcagacgctctgcgcgaatgcgcctgcgacgagcgtcaccgtcgtttcgaagcagaccgttcggcccgacggcgcgtcggcggttggagacgtcaagctctcggtctccgacatgccgatgctgtcgtgccactacatccagaaggggctcttcttcccgccccctggcgtgccgatcgcctccctcgtgtcstcgctcgtgygcgcgctytcccgggcgstcgcggtgttccctgccctsgccggccggctcgtcacgctggatgatggccgcatcgtcatccggtgcgacggcgtggccgttgagttctaccacgcggtcgcgcccgctctgtcgctgggagacttcctcgtgcccaacgccgacgtgccgaccaggctgacgaaggatttgttccccatggaccgcaccgtgagctacgacggccaccgccgtccgctcacctcgttccagctcaccgtgctcggcgatggagctgtcttcgtcggcttcgtcgctaaccacgccgtcgtggacggcacctccttctggcacttctttaacacgtgggcaggtctctgccgcggcacgccggtccagccgccggacttgcgccggaacttctttggcgactccacggccgtcatccgcttccccggtggcgcgggtcctgccgtcaccttcgacgccgacgcgcccctccgcgagcgagtcctccatttcagcgccgccgccattcgcgagctgaaggccaaggccaaccagtggaaaagatccgacaaatttgccgaggctaacgggaagcatgtggatgaaacgaaggctcatggcggttacagagagatctcgtcgttccaatcgctgtgcgcgcatatctggagggcggtgacgcgatcccggcggctgctggcggccgacgcgaccacgacgttccgcatggcggtgaactgccggcaccgcctgcgcccggcgatctccccgctctacttcggcaacgccatccagagcgtagccacaaccgcgacggtggccgagctggcgtccaacgacctgcggtgggcggcggccaggctgaacgcgaccgtggtggcgcacgaggacggcgccatccgccgggccgcggcggattgggaggcckcgccgcggtgcttcccgctgggcaaccccgacggcgcggcgctcacgatggggagctcgccccggttccctatgtacgacggcaacgacttcgggtgggscagggcgatcgccktgccgaaccgggcgcgccaacaagttcgacggcaagatgtcggcgttcccgagccaggctggggacggcagcgtcgacgtcgagttttgcctcgcgcccgacaccatggcccgcctgctcggtga

SEQ ID NO: 4643 - DNA, 1644 bp, Oryza sativa
atggcatcaacaggcattgcagtgagcccaagcaacaacgatgctttggacctagctgttgcacaattagatggtgatcaatcttcatatcatcatacaccagaggtcttcttactctaccttgcagttcccggtgttcctctagccaaaatgcaagtacttgagtctgattcggttgccgcagtgaagcttcggatccaaaacagcaaaggatttgtggcgagaaaccaaaggtatgggaagtgtgcttccatctcgtggatccgactatcagatccacgacgaaccgctgtgaggactgtttatggaaggaagtttaaattccaagtggaccaacgtcgaaatgctagatatatgaagcaagagatttcaagaaatgttgaaagtcccaatggtattggagagagcatgactttggtcaatggtgaaaagcttgatgaaagcacattaatctccaccatttgtgagaccaacacttctgataccgattttcttgcaaacaagtcagaaaattttaatggaaatgaaatagaagaatcttttgagcaattatccatttcttctgacattggaaacaatttacaatttgatgatgccaaggagaaatatcccctgattgaaccagttcttgtcaacccaagtgttacccttactccaaaaattacgggtatgatcgaagctacacttgctgggctagaaatggagcacacacctgtgatgtcctcagagggcactgggggagtctacttcatgctagattcatcaggccaagagtatgttgctgttttcaagccaataaatgaagagccaatggcaaaggacaatcctaatggctaccctttgtccagtgatggggaaggattaaagagaggaacaagagtcggtgaaggtgcattcagggaggttgcagcatacattcttgaccatcctattagtggttatcgcgtgagcgatgaactagggtttgctggtgttcctccgacagttcttgttcgatgtttgaatggttatgttgatcagactaagtatgattgcgcggagaaagaaccgaaaattgggtccttgcaaatgtttgtgaagaattctgggagttgtgaggagtttggtcctagggctttccctgtgcaagaggtgcacaagattgctgttttggatatgaggctagctaacacggatcgccatggcggcaacatactgattcgtaaggatgagaatgggcagattgagctgataccaattgatcatgggtattgtctgcctgaaagctttgaagactgcacatttgattggctttactggccccaagcacgccagcctttcaatgttgaaaccctggactacataaagtcacttgacgaggaagaggatatcaagttgctcaagctcaatggttgtgaaccatcatctaagtgtgttcgtgtttttcgtctaagcaccatgatgttgaagaagggtgctgtgagaggtctaactccatatgagatcggtaacatgttgtgtagggagaacattacaaccaaatcaaagattgaagagattgttgaagaggcagagcatgttgttcttcctgggataggtgaaaaggcattcatggaagccatctcaggtatcatggatcgctatctcaatgaactcttcaaatga

SEQ ID NO: 4644 - DNA, 603 bp, Oryza sativa
atggcgcccgccgccgccgcctccgtctccgcggccgcagatgcggcggcggcgtcgtacacgacgccgaggaacatcctgatcactggcgcggcggggttcatcgcgtcgcacgtggcgaaccggctgttgcgcgaccacccgtcgtaccgggtggtggcgctcgacaagctcgacgactactgcgccaccctcaacaacctggctccggcgatggcgtcgcccaacttcgccttcgtccgcggcgacgtcgcctccgccgacctcgtcctccacctcctcctcgccgagcggatcaacactgtcatgcacttcgccgcccacacccacgtcgacgacaactccttcgagttcaccaagaacaacgtgctcggmacccacgtcctcctcgagccatgccgccggaaggcgccgccggcgccatccgccgcttcgtccacgtcagcaccgacgaggtctacggcgacgctgccacggcgggcaaccacgaggcgtcgcgggcgcggctgctccccaccaaccaatcttttaaagagcgggcaaaggcatttagcagttagcttctcaatcagctatacccgctataacgggctaaagctatag

SEQ ID NO: 4645 - DNA, 1296 bp, Oryza sativa
atggccaacattaacatggcagatactgttccttcctgtgatacttacctgttgttcaatggagaaacactgcttccaattggtgtccgtgcgtttatttataccgctgtcctcgcgtactgttttattggtctatccgcgatcactggccggttcttcaaatcgatggagagcatcatgagacactcccgggaggttgtcacagtagacccacacacaaatgctactattgtcaagcatgagaaggtgtggaactacactatagcggacgttgctctcctcgcatttggtactagcttccctcaaatttcactagcaacgattgacgcaatccgaaatctgggtcagctgacagcaggaggtttaggtccaggtacccttgtgggttctgctgcatttgatctgttccccatacatgctgtttgtgtggttatgccaagggcaggctctaagaaaaagatatctgatctcggtgtttgggcaagaggtgagagacctgaagattgggttccggcggaagatgcttcagttgattatgatgataactatgatgggattggggatatactccctggccagaatgaggatattgtggatatattctcagcgcattcttacagtaatgaagggtatcaccatgtttcagaagaggatgtggaagaatcttcaacaggtcttacattaaagaacaaatgggaggatactcactggttttctatttggtggcaacaatttgttgatgctgcaacgttggagagttcagtgtcaagaaagatggattctacctgcttgagagtcatcggaatctcatggaatttaatcattgcaccttggaaaatgctatttgctttcgttcccccttatgaaattgcgcatggctggatcgcttttatttgctcactaatcttcataagtggtattgcttatggggttactaagattacagatcagataagctgtgtcacaggcgggataaacggtatatcttatttccacagcaattcggtgaacatatatgtcggcattggtgttccatggttggtggacacaatgtacaactattttgtctaccagaagcccctgtacatagacaatgctgctggcctcagcttctcccttctggtcttcttcgcgacgtcattcggttgcatcacggttttggttcttcgtcgcgtcatacttggcgccgagcttggtggccctaggatgtgggcttgggcaacatcagtgtacttcatgatcctttgggttgtctttgttgtactttcatccttaaaaatctctggagtaatatag

SEQ ID NO: 4646 - DNA, 710 bp, Oryza sativa
atgaagggagaatttgtgcctccatggttagagctcttgctttccacacagttttttaacacctgcactagccatcacaactcccctcgcaatgaatgcaacctgttttgcatcgattgccaagcaccagaagctgccttttgctattactgtcgttcatgtcatcattcttctcatcgtgtaatccagattaggcgatcatcataccacgacgtggtaaaagtatctgagttagaggatatccttgatatcagcgatgtacaaacctatgtaatcaacagtgcaagggttgtgtttttgaatgagcgacctcagctacgtggttgtggtgttttggcaataaaatcatcgccatcctcattgtcctcttataattgtgagacttgtagccgtgttcttcttgatgcattccgcttctgctcacttggttgcaatctcataggcataaaaaatgatgtggagacagttgtagctaacgatggtattgcccacaatgataaagacatagagattgatggcagcaatggtactgcaaacaccaatggtactggaaagggcatagagatttgtggcaacaacggtactattgcaaatactggaaatgaggatgaaatatgtagtgatgctagcaagaataaggaaatactatcatcaacaagggttgttcgtcaccgacggaagggaattcctcgtcgtgcaccatttttctg

SEQ ID NO: 4647 - DNA, 1698 bp, Oryza sativa
atggctctcctccgctgcctcttcctcctcgccgtccttcttccccaccgcaatgccgccgtcgtcgccgccgcgtcgccgcaccacggccccgcgccgcacgactacagggacgcgctcaccaagtccatcctcttcttcgagggccagcgctccgggaagctgccgccgtcgcagcgcgtctcctggcggggtgactccggcctctccgacggctcctccatcaaggcaagaaactctccgctcctccgcgtttcaccatttcgtcggcattggcgccgtctctctctctctctctctctctctctctctctctctctcgccatggtctcatggcttgatgcgtttgtctctcaggtggacttggtgggagggtactacgacgccggcgacaacatgaagttcgggttcccgctggcgttcagcatgacgatgctggcgtggagcgtggtggagttcggtggactcatgaagggtgagctccagcacgccagggacgccgtccgctggggctccgactacctcctcaaggccacgcacgaggcacgtctacgtcagtacacctcaactaccatcctcacacattcacttgtctcgtccatttgctcgccgtcgacattcctaccgggttccgtcggtgatgccaacagggaccacgcgtgctgggagcggccggaggacatggacacaccgaggaccgtgtacaaggtcgacccgagcaccccgggcaccgacgtcgcggccgagaccgccgcggcgctcgccgccgcctcgctcgtcttccgcaagtccgacccggcctacgccagccgcctcgtcgccagggccaagagggtgtttgagttcgcggacaagcacaggggcacgtacagcacccgtctctcgccatacgtctgcccatactactgctcctactccgggtaccaggatgagctgctgtggggggcggcatggctacacagggcgaccaagaacccgacgtacctgagctacatccagatgaacgggcaggtgctgggcgcggacgagcaggacaacacgttcgggtgggacaacaagcacgccggggcgaggatcctgatcgccaaggcgttcctggtgcagaaggtggcggcgctgcacgagtacaagggccacgccgacagcttcatctgctccatggtgcccggcacccccacggaccagacgcagtacacccgcggcggcctcctcttcaagctcagcgacagcaacatgcagtacgtcacctccagctccttcctgctgctcacctacgccaagtacctcgccttctccaagaccaccgtctcctgcggcggcgccgccgtcacgccggcccgcctccgcgccatcgcgcgccagcaggtggactacctgctggggagcaacccgatggggatgtcgtacatggtcgggtacggcgccaagtacccgcggaggatccaccaccgcgcgtcgtcgctgccgtcggtggcggcgcaccccgccaggatcggctgctcgcaggggttcaccgcgctctactccggcgtcgccaaccccaacgtcctcgtcggcgccgtcgtcggagggcccaacctgcaggaccagttccccgaccagcgcagcgaccacgagcactccgagccggccacctacatcaacgcgccgctcgtcggagcgctcgcctacctcgcccactcctacggccagctctag

SEQ ID NO: 4648 - DNA, 2187 bp, Oryza sativa
atgcggggcgcggcgcggctactcctgccactggtggtgctgctgctgcacgcagcacgcggatcagcgggatcgacgggcggcggaggcaacggcagctgcacgcagagctgcggccgcatgagggtgccgtacccgttcggcttctccagaggctgcacggttcagctcggctgcgacgacgcctccggcaccgcgtggctcggcgggacgcgcgggctgggcctgctcgtgagcaacgtgacgccgcgcgccatcgtcctcamcctgccccccaactgctcccgcccgctcaacgagtccctggatgcgctcttcaccgacaactacgcgcccaccgcgcagaacgccctggtcgtgagctcgtgcgacccgcaggccgccgcccgcctcagcaactgcagcatcccacccgaggcctacctcgagaagagctgcaattccatccgctgcgtcttaccttctaccaaagccaacgtcgacgggacaaacgtcacagaccctttcttgaatagaagcgagatgcggcggctcggctcggactgccgcgggctcgtgtcggcgtcgatctattcgaacacggcggggccggcgctgcagctgaccgcgctggagctggattggtgggtgcaggggcggtgcggctgctcgagccacgccatctgcgacgggttcaccccgccgtctacgcagaaggaggcgttccgcgaaaggctttgcttaccggcctttcaaagggaaaaaaaaaagcctctgttactggtaggtgcgagagcgttcgctataacattccttgcacaactgcaagtgctgtcaactgggttctcataccgtcacacatttccaaagtgtaatccttcaaaatacctatcaggatcatgtggcaagttggttcagatcggccttcttgtggcaggagtcttttttggagccatggtgatgggcatcacctgcttggtgtaccacctgctgcggcgccggtcggcggccctccggagccagaagagcacgaagcggctgctgtcggaggcgtcctgcacggtgcccttctacacgtaccgcgagatcgatcgcgccaccaacggcttcgccgaggaccagcgccttggcacgggcgcgtacggcacggtgtacgcggggcggctgagcaacaaccgcctcgtggccgtgaagcggatcaagcagcgcgacaacgccgggctggaccgcgtgatgaacgaggtgaagctcgtgtcgtcggtgagccaccgcaacctcgtccgcctcctcggctgctgcatcgagcacgggcagcagatcctcgtctacgagttcatgcccaacggcacgctggcgcagcacctgcagcgggagcgcggcccggccgtgccgtggacggtccgcctccgcatcgccgtcgagacggccaaggccatcgcgtacctgcactcggaggtgcacccgcccatctaccaccgcgacatcaagtccagcaacatcctgctcgaccacgagtacaactccaaggtcgccgacttcgggctgtcgcggatgggcatgacgtccgtcgactcgtcgcacatctccaccgcgccgcagggcacgccggggtacgtcgaccctcagtaccaccagaacttccacctctcggacaagagcgacgtgtacagcttcggcgtcgtgctcgtcgagatcatcacggccatgaaggccgtcgacttcagccgggttggcagcgaggtcaacctggcgcagctggccgtcgacaggatcgggaaaggcagcctcgacgacatcgtcgacccctacctagacccgcacagggacgcctggactctcacgtccatccacaaggtggccgagctggcgtttcggtgcctggcgttccacagcgagatgagaccttccatggctgaggtcgccgacgagctggaacagattcaggtcagcgggtgggcgccgtccacggatgacgccacattcatgtcaacgacgtcctcgctttgctcgtcggctccatcacgttgcacggacaagtcttgggggaccgctaagagcaagaggcaggccgcggcaaacgcagtggtaaagcaagagacgacgaagtgtgcagtcgccgactcccccgtgtccgtgcaggagagatggttcagcgataggagctccccttcctcaaatagcctgctgaggaatagctccctgaactaa

SEQ ID NO: 4649 - DNA, 690 bp, Oryza sativa
atggcggacgagcagtacatggacctgggcggtggcggggcggcggcggcgccggggargggcggggccggggagaggaagcggcggttcacggaggagcagatacggtcgctggagtccatgttccacgcgcaccacgccaagctggagccccgcgagaaggcggagctggcgcgcgagctgggcctgcagccgcggcaggtggccatctggttccagaacaagcgcgcgcggtggcgctccaagcagctcgagcacgactacgccgcactccgctccaagtacgacgccctccactcccgcgtcgagtccctcaagcaagagaagctcgctctcaccgtccagttgcacgagctaagagagaggctgagggaacgggaggagaggagcggcaacggtggtgccgccacgacggcagcaagcagcagcagctgcaacggatcaggcagcgaggaggtcgacgacgacgacgacaagaggaacgccgccgcggggtgcctggacctcgagccgccggagagctgcgtgctcggcggcgcgacgtgcgccacgccggcggacgtgtcggtggagtcggatcagtgcgacgaccagcttgactacgatgagggcttgttcccggagtccttctgcgccacgccggagctgtgggagccatggccgctcgtcgagtggaatgcggtggcttga

SEQ ID NO: 4650 - DNA, 1520 bp, Oryza sativa
atggggaaggggacggtagtggggacggcggtggtggtgtgcgctgcagcggccgcggcggttggggtggcggtggtggtgtcgcggaggaggaggagcaagcgggaggcggaggaggagcggcggaggagggccgccgctgtgatcgaggaggtggagcagaggttctcgacgcccacggcgctgctgcgcggcatcgcggacgccatggtggaggagatggagcgcggcctccgcgccgaccytcasgccccgctcaagatgctcatcagctacgtcgacaacctccccaccggggatgagcacggactgttctatgctctcgatcttgggggcaccaatttccgtgttatacgtgttcagcttggaggaagggaaaagcgtgttgttagtcaacagtacgaagaggttgccattccacctcacctgatggttgggacttctatggaactgtttgacttcattgcggctgagttggaaagttttgtcaagaccgagggagaggatttccacttgccagagggcaggcagagagagttaggcttcaccttttctttcccagtgcaccaaacatcaatatcatcaggcactcttattaagtggacaaagggattttccatcaatggcacggtgggggaagatgttgtggctgaattgagcagggctatggaaaggcaagggcttgatatgaaagttacagctcttgttaatgacactgtaggcacattggctggcggaagatatgttgataatgacgttgctgctgctgtaatattaggcactggcacaaacgcagcctacgtggagcatgcaaatgcaattccaaaatggactggattactacctagatcaggaaatatggtgattaacatggaatggggaaacttcaagtcagaaaggcttcctcgttcagattacgataatgccttggactttgaaagtttaaacccaggcgagcagatatatgaaaagatgatttccggcatgtatcttggagagattgtgcgcagaatcttgcttaagcttgctcatgatgcttccttgtttggagatgttgttccaacaaagctggagcagcgctttatactgaggacgccggacatgtcagcgatgcatcatgatacctcacatgatctgaaacacctgggagctaagctgaaggatatcctgggggtcgctgatacttccctggaagcacgatacatcacccttcatgtctgcgacctcgttgcagagagaggtgcacgcttagctgctgctggtatatatggcattctaaagaagctgggcagggacagagtgccaagtgacggtagtcaaaagcagaggactgtcattgctctggatggtggtctctatgagcattacaagaagttcagaacctgcctagaagcaacgcttgcagacctgcttggagaggaggctgcctcatcagttgttgtcaagttggcaaacgatggctctggcatcggagctgcacttcttgcagcatctcactcccagtatgctagcgtcgagta

SEQ ID NO: 4651 - DNA, 3192 bp, Oryza sativa
atggcaaaagcaccgggccctgtgtacctcctcttcctgctgctcgcgctgccttgctgcctcatcccgcaccgcggcgcggcccagcccgcggcgaacgaggcgcggctgctcctccagatcaagcgcgcgtggggcgacccggccgtgctcgcgggatggaacgacacggccgcgcccgcggctmactgctcctggccctacgtcacatgcgacaccgccgggcgcgtcacgaacctctccctcgccaacaccaacgtgtccggccccgtgtcggacgccgtcggcggcctctccagcctcgtgcacctcgacctctacaacaacaacatcaacggtacgttcccgacgagcgtgtaccgctgcgtttctctccggtacctcaacctgtctcagaactacctcggcggggagctccccgccgacatcggcgtcggcctcggggagaacctgacaactctagtcctcagcggcaactacttcactggcaccatccccaagtcgttgtcccgattgcagaagctggagtggctgatgctggacaacaacaacctcaccggcacaatcccgggagagctcggcgacctgacgagccttacgacgctgacgatctcgacgaacaagctcggaccgggtcagctgccggagtcgttcaagaacctgactaagctgacaaccctctgggcgagaaagtgtcagctcgtcggcgacatgccagcctatgtggccgacatgccggacttggtgacgctcgacctggcggtcaacaacttgacaggaagcattcctccggggatctggagcctgaagaagctgcagtgcctgtttctatttgcgaacaagctcaccggcgacatcgtcgtcgccgatggtgctttcgccgcagtgaatttggttttcatcgacctgtccgcgaatcccaagctgggtggaccgattcctcaagactttggtctcttgcagaagcttgaagtcatccacctgtactttaacaacttctccggtgagataccggcgagcatcggtcggttgccggcattgaaggaaatacacctattcaataatagtctcaccggcgttctaccaccggagcttgggcagaagtcaccggatttgtgggatcttgaggttgatttcaacaagttcaccggcccgattcctgaggggctgtgtgacggcggcaagctcaacatattcaccgcagcgaacaacctcttgaacggctccatcccggagaggctcgccggctgcaccacgctccagaccctgtttctccccaacaacaagctgtccggcgatgtgccagaggcgctatggacggcgacaaagctccaattcgtgcagctgcagaataatggcctcaccgggactctgccttccaccatgtacagcaacctttcgagcttaaccgtggagaacaaccaatttcgtggtagcatccccgcggcggcggctgctcttcagaagttcatcgccgggaacaacaatttttccggggagatcccggagagtctcggcaacggcatgccggtgctgcagacactaaacctgtctggtaaccagctctccggcgggatcccgaagagcgtttccaagcttaaagtcttgactcagcttgatttgagcaagaaccagctctccggcgagataccggccgagctgggcgccatgccggtgctcaacgcacttgacctgtcgtcgaacaggctctccggcggcataccgtcgtctcttgccagtctgaatctcaactcgctcaacctctcgtccaaccagctcagcggccaggtgccggccaagttcgccataggtgcctacgcccgcagcttccttgacaaccccaccctctgtacctcaggcctgggctccagctacctcgccggcgtgcggtcctgcaacgccggatcgccaggcagcgcttcctccggtggcgtctcgccagggctccgcgccggtctcctcgtagccggggccgcgctcctcctcgtcatcgtggcgttggccttcttcgccgtccgcgacatcaggagaagaaggaagcgcgtggcgcagcgcgaggactggaagatcacgcctttccagaccgatctgggcttcagcgaggcggccatactccggggtctaacggaggagaacctcgtcggccgcggcggctcggggagcgtgtaccgcgtcgcctacaccaaccggtacaccggcggcgacggcgccgtggccgtgaagaagatacggacgggcgccgcgaaggtggaggagaagctggagcgcgagttcgagtcggaggcgcgcatcctcggcaacgtccggcacaacaacatcgtcaggctgctctgctgcgtctccggcgacgaggccaagctcctggtgtacgactacatggacaacggcagcctggacgggtggctccacgggcgccgcgccatcaacgacgggcgccccgtggtggccgctgtggcgagggcgcggtccgcgcggggcggcgcgcccgctttggactggccgacgaggctcagggtggccgtcggcgccgcgcaggggctgtactacatgcaccacgagtgcaccccgcccatcgtccaccgcgacgtcaagacgagcaacatcctgctcgactccgagttccgggctaaggtcgccgactttgggctggccaggatgctggcgcaggccggcacgcccgacaccgtgtccgccgttgcaggctcgttcggctacatggctcccgagtgtggttacacgagaaaggttgatgagaaggtggacgtgtacagctttggggtggtgctcctggagcttaccacgggcaaggcggccaacgacggcggcgagcacggttccctggcggactgggcgcggcaccactatcaatcgggagagagcatccccgacgctacggatcagtgcatcaggtacgcgggttactccgacgagatcgaggtggtgttcaggctaggcgtgatgtgcacgggggccacgcccgcgtcacggccaaccatgaaggacgtgctgcagatcctggtcaaatgctccgagcagacgcaccagaaatgcaaggcggagagcgggcaggaggagtacgaagtggcgccgctgttgctgccgcaacgaggcagccgccggaaacagcccgcgaaggccaaaggagcagacgacgacgctgacgagaggagcgatttcgattccattgtctga

SEQ ID NO: 4652 - DNA, 2769 bp, Oryza sativa
atggcgatgcgaggtgagccgtggcggcgccaggagggggagcaggcgcaggcggaggccgatcgggaacgcgagctggacctcttccgcagcggctccgcgccgcccacggtcgagggctccatgggcgcgctccaagccgccgccgccgccgacgtgttcctggaggacgagctccgggccgacccggcctaccactcctactactactccaacggcaacatcaaccctcgcctcccgccgccgctgctgtccaaggaggactggcgctccgcgcagcgccttcgccccggcttgggtgggatcggcgacgggaggaagcccagaggtggaggtggaggccgcggcggcggcggcgctggagggatgggtccaggggatggcctcattgggatgcccggtctcgagattggccgccagaatagcttctccggttttggcactataaaacgcctttctgtcgcaaaagtattggtcctgaaacttcttataattctattcaaggctaaagaaataacttctgacctatatatgatgcaggatgactcgtatcaacacgatacggatagacagggtgccaactgcaatggtacagacttgttgagttcttctaaagtgcagtatggtctacatcgtgagactggagctattagtggccttcactcagacagcaaagcaccatgcttgccagaaaaccagaatgaatcatcacactcatatgcatcaataataggatcatcactttcaagaagtgcatctccagatcctgaactagtgaggagagttcctagtccttgcctccccccaattggtgtgaaacttggtgctacagataagaagaataatgttggttcatcttctttcaattgtagttctcccaatattattgaatctgatgatytgrtgtstgckctatctggtatgaacctgtcgtcatcaagagcaatgaacggaaacacaatggaccaatctaagctccatcaggatgtggatgatgttcgtaagttcctttttgatcagtacatggatcaaacaaatggcaatcagcgccattcctacatgaaacgttctgaacaaggacacgtgaaggttcctcaagaatattctggtgcttctatgaatccttctgttatgagaagccagatcaatgctggtggtttcacatcatttaacaactcatcggtgggatctggctttgcttctcctaggcttggatcccgatcaccaggtgggagtttatcttcacggcaaaatctaactggtgcatctaaccttccaaactacgttggaattggaagtccaactgcagcttctgcccaccagatgcctgttgatccactgtatgttcagttccttcgggcagcagaaattgctgcccttgcagctaactgtgaggatcctttgatggatagggctaatctaggaggttcttacatggatctatttggccctcagaaggcgtaccttagtccattgcttcagtcacagaagcaatatagttactacgggaatctcggggttggtcttggctatgctggtaactctttaacaagtcctattcttccctcgtcaccaggtggacctggtagtccacttaggcacggggatcgcagcatgcgctatccatctgggatgagaaattttggtggttcctttggctcctggaattcagatctcggtggtaagatggaggccaatttagttccatcacttctggaagaatttaagagcaacaaaagcaaatcatatgagctctctgaaatcgctggtcatgttgttgagttcagtgcggatcaatatggaagtagattcatacagcaaaagcttgaaacagccagcactgaagaaaaagacatggtttttgctgaaatcatgcctcaggctctcacattgatgactgatgtctttggaaactatgttgttcagaagttttttgagcatgggagctcagctcagataaaggagttggctgatcagctaattggacgtgtcttagcactcagcctccaaatgtatggttgccgagttatacagaaggccatagaagttgttgatttagatcagcagactaaaatggttgctgagcttgatggacaagtgatgcgctgtgtacgtgatcaaaatggaaatcacgttatacagaaatgtattgaatgcattccacagcatgctatccagttcattgtttcaaccttctatggtcaagttgtgatgctatcaactcatccatatggttgtcgggtgatacagagggtgctggagcattgtgatgatcctaaaacccagcaaatcatgatggatgagatcctacaatctgtttgcttgctggctacagaccagtatggtaactatgttgtccagcatgttctggaacatggcaaaccccacgagagatctgctattattgagaagttgattgggcagatagtacaaatgagccagcaaaagtttgcttcaaatgtcattgagaagtgtttagcctttgggaatcctgtggagcgtcaagtcctgattggtgaaatgcttggctccagtaatgagagcgaacatcttgaggtgatgatgaaagatcaatttgcaaactatgtggtacagaaggtgttagagacctgtgatgatcagcagagagagatgatccttacaaggataaaagctcatctgaacacactgaagaaatatacttacgggaagcatatagtggcacgcgtggaaaagctcgtcgcagccggagaaaagcggcttgggcttcaaccatcaactgcagcttga

SEQ ID NO: 4653 - DNA, 2570 bp, Oryza sativa
atgtcggcagggaccgccccggccgcgccgcggtacgcgccggacgacccgtcgctccccaagccgtggcgcgggctcgtcgacggcaccaccggctacctctactactggaacccggagaccaacatcacccagtacgagaagccgctgccgcccgaggaccagctcccgccgcccccgcygcyccccscgscytccccgctccggccgaggcgaccgagaccgcgaccgccgcgaccgctcccgatcccgcaccccgccgcggcgcgaccaccgggaccgcgaccgggaccgcgacaggcgccacgacgaccacagggggacaacgtgccagctccgataacttcgtttgagactggtggattcccaccggaaatcctcaaggagatacaacgtgctggattctcaagtccaacgccaatccaagctcagtcatggccaattgccttgcagtgtcaagatgttgtagctattgcaaagacaggatctggaaaaactcttgggtatctacttcctggatttatgcatattaaacgcttgcaaaacaacccaaggtctggtccaacagtgctagttttggcaccgacaagggagcttgcaactcagattttggaagaagctgtgaaatttggcagatcatcaagaatttcttccacgtgtctatatggtggtgctccaaaaggcccccagctaagagatttggatagaggggtcgatgtcgttgttgctacaccaggaaggttgaatgacatcctagaaatgcgaaggataagccttaagcaagtgtcgtaccttgttctagatgaagctgaccgtatgttggacatgggatttgaaccacaaattcggaagatagtgaaagaaattcctcctcgtcggcaaaccctcatgtacactgctacttggcctaaggaagtccgacgaattgcagaggatcttcttgttcaccctgtccaggtgaccattggaagtgttgatgagcttgttgctaatagtgctattactcagaatgtggagctgatcacaccgtccgaaaagcttcgccgtctggagcaaattttgcgatcccaggattcaggttcgaaggtactaatattctgtaccactaagagaatgtgcgaccaacttgcaaggacacttactaggcaatttggagcttctgccattcatggtgataagtcccaaagtgaaagagagaaggtcctgagccattttagatctgggcgatctcctattttggttgcaacagatgttgctgcacgaggcttagacatcaaagatatcagggttgtgatcaattatgatttccccactggcattgaagattatgttcaccggattggcaggactggaagggctggtgccactggtgtggcctatacgtttttctgtgaccaggattcaaaatatgctgctgatcttattaaaattctggaaggcgcaaaccaacgtgtgcctcgtgacttggcggacatggcctctcggggtgggcgtggtggtaggaagcgtaaccggtgggcaacccgctctgataggggtggttcgcattctgaactggattctaggtatggtggaagagatggtctgtcagggtcttctggcagattggatagtagtcgcagtagtcgcaggcatgactatggtgatgatggacggtctcgcaggtctgggagaggtcgcagtaggagccgtagcagaagtgacagtgataggtatagccgaagtcctaagaggtcacgccgtcatagccgtagcaggaccaggagtcggagccgaagcaggagcaggagctacactaggaaccgtcgtgctagccgcagcaggagccgtagccctggtgctagccgtaggcatgaaagaagcgctactggctctgggtctgcactgccagactctgggcacggtgagcgcaaaagaacaccagaagctgacccatcaagaaaccatacaaaccactcagacccgaaagatgaccgacacccagaggatgggaaggtgggaaaggttgatctcgatcggtcgcctactccacaagacaagtctggcccatatagtcctgcttacaatggaaaaaccagtcgctcagtgagccctggtaatcaggtggaaggaaacaacaaagctgcggaggtttctaagaatcctgatccttcatcgccaccccatcatggtaagaccagggaggacgaagaggaaggcgctcttggactccatgcttgccaaccggcgctccctatccatgaaggccctgcggcggctgtgggagaagcggcgtggtcggcgtggcccagcggctgcagcgggaggagcggcgtggtcggcgtcgtcggcgtggcgctgcggctgcgggaggagcgactggagtcgtcgcctcatcggcgtggccttgcggcctttgcggctgcaaccagcgggaggagccggtgggcagggcagcgctgcagcctgtggcgtgccggcggcggaaggagaagggcgaggcagcgctgcggcggcgcaagagaaggcgacagcggcgcaagagtaggcgacggcggcagcctgctactctgcggcggcgcatgcgcatg

SEQ ID NO: 4654 - DNA, 1968 bp, Oryza sativa
atggagaggaccggcgcccacggcggcaaacgcttgctgcctcgcctcctcttcctcgccgccctgtcggtcacgccgtggcttctcatcttctgcctccacttctccgtcttcgatggcgcaccgccggtcagctcgccagcggcgcgccagtcgctcgtcgccgtcgtgtccgagggcggcgaggactcgcagcgttttctcctcgagcaagaggagcagctcaggaggctcccgtccgcacgcgacgtcacgacgacgacggcggcggcggtggctggggacgcgcacgcctgcgaggggcggtacgtgtacatccacgacctgccgccgcggttcaacgacgacatcctccgcaactgccgcgagtggtaccagtggatcaacatgtgcgtgtacctcagcaacggcggcctcggcgagccggtggacaacgcggacggcgcgttcgccgacgaggggtgtacgagtgcctcaccgacgaactcctcccgcgccgccgccgtcttcgtgccgttctacgccggcttcgacgtcgtgcagcacctgtggggcagcaacgcgtcggtcaaggacgccgcgtcgctggagctcgtcgactggctcacgcgtcgccccgagtggcgctccatgggcggccgcgaccacttcgtgatgtccgggaggacggcgtgggaccaccagcggcagacggacagcgactcggagtggggcaacaagttcctccggctgccggccgtgcagaacatgacggtgctcttcgtcgagaagacgccatggacggagcacgacttcgccgtgccgtacccgacctacttccacccggcgaaggacgccgagatcttccagtggcagcagcggatgcgcggcatgaagcgcgagtggctcttcaccttcgccggcggcacgcgccccggtgaccccaactccatccggcaccacctcatccggcaatgcggcgcgtccagcctctgcaacctgatccagtgccggaagggcgagaagaagtgcctcatcccgagcacgttcatgcgcgtgttccagggcacgcgcttctgcctgcagccgccgggcgacacgtacacgcggcggtcggcgttcgacgccatgctcgccggctgcgtgccggtgttcttccacccggcgtccgcgtacacgcagtacaagtggcacctccccgacgtgcacgaaacctactcggtgttcatcgccgaggaggacatccgcagcggcaacgtgagcgtagaggagacgctccggaggatcccgccggacgtcgcggagaagatgacggagacggtgatcagcctcgtgccgaggctgctctacgcggaccctaggtcgaagctggagacggtcaaggacgccgtggatttgacggtggaggcggtcatcgagagggtcaagaagctgaggaaggagatgcacggcgccggcgcgtcgtcgcgactctcaacggcattaggtgcaaacaccaatggagggcgtttgagcaggaggacggcggtgggaggcaaacgcggcaggttcgacgacgacgacgacgtcctccaccgtccagattgggtgattggctccggcgtgctggcactagcgtggagcgtggcgcagctgggttgggtggccgggccgcttgccctcgccggcttcgcctgcgtcacctactacacctccaccctgctcgccaacgcctaccgcgcgccgcaccccgtcaccggcaccagggaccgcacctacatggacgccgtcagatcatacctcagtcctagagaggtgttccgtgttcatgtgcggaatctcccagtacgtcaacctgtggggcaccatggtcggctacacaatcaccgcaaccataagcatggttttcgtatttctcttggcaaccgtgatcgatcggttgctgttcttgatcgtcttgctgcacgcgtggattttcgatatgtgggtagtaatagatctcggctttaa

SEQ ID NO: 4655 - DNA, 957 bp, Oryza sativa
atggatgagctccgtgctccggcgtgcggcggcggcgtcgggacggtgatcgaggaccttccgacggacgtcctcgcgctcgtgctccggcggctcgacggcgcgtcgctggcggcggtggggtgcgcgtgctccagcttccgcgagctcgccgtcgaccaggagacgtggcgcggcctctgcctcgccctgtggccgtcggttcgcgacgtgctcggctgcggcggcggcggcggcggagacgggtaccgtgcgttcttcgccgacgcgttcccgttcccggaggcagcggcggcggtggcgtcggcggcgccggcgccggtgcccgggtccctcccatcacgcctcgtctccgccgttgacctgcaccacggcggcgtctgcatcatgtcgcgcgtcgtggagacggacacctcgtcggcgtggttcctgggctcgccgttccgcgtcgacgcgctcgtccaggagggcttctcggcgccgtcgccgatcacgccgagctcgctgacgctgagctggatactcatcgaccccgcgtccggccgcgccatgaacgcctcgagccgacgcccggtggccgtcgaccggaagtggctcaccggggagacggtggcgcggttcaccgtgatgctcggcggcggcgtcgccctcgacgcggccgtcacctgcgacgacaggtacgggcacgtcagggaggtgagcctgtgcgtcgaggacggcgagggcggcggcgtgagcggccaggacgggctgggcgcsgtkgccgcggccatggcgggcgcgcggcggggcaagggcgcggaggcggcggcgaggcagcggtacgaggagttcgtgaaggggaagagggcgaggaaggagtggaaggcgaggcgtgagggcatcgtcgacctctgctgctccggcgtcggcgcggcggcgttcgtcggcttcctcgtcatgctcaccttccggtga

SEQ ID NO: 4656 - DNA, 1500 bp, Oryza sativa
atggcggcggaggcggcgacgctggagttcacgccgacgtggatcgtggcggcggtgtgctcgctcatggtgctcatctccctcgtcgccgagcgctgcctccattacctcggcaagatgctcaagaggaagaatcagaagccgctctacgaggcgctcctcaaggtcaaggaagagttgatgcttcttgggttcatctcgctgctgctgacggtgttccagggcctgatccagaggacctgcattcctcctcgctggacagtccacatgctgccatgccagagggaagcggtgggccccgcaaaggagcacgttgctgctgctcagatcgttggcagaattgggaggcgattgctcagtgaaggtggggcgggggcagagctttgccagaagaaggggaaagttccattgctgtcccttgaagccatacatcaattgcatattttcatatttgttctggctatcacacatgttattttcagtgtttcaactatgcttctagggggtgctaagatacaccaatggaaacaatgggaggttgaaattcagaaagatgctgtgggaagtggtcaaccagggcctgccaaggtgacccacgtgcatcaatttgaatttatcaatgatcattttaagggcatgggcaaagactctaaaatattgagttggctgcattcttttgttaagcagttttatggatcagtttctaaatcggattatacaacaatgcgtcttggctttatcatgactcattgtcgtggaaacccaaaatttgatttccataaatacatgatgagggtcttagagtctgactttaagaaagtggttggcataagctggtacttgtgggtttttgttgtgatcttcctcttgctgaatgtcaacggttggcacacgtacttttggattgcttttcttcccctaattcttctactagctgttggcactaagctggagcacgtcatagctcagttagcccatgatgtggctgagaagaactctgcaattgagggtgatttggtcgtaaaaccatcagatgaccacttctggcttgggcggccaaggattatcctctacctgatccacttcattctcttccagaacgcgtttgagatcgcgttcttcttctggatactcaccacatacgggttcagttcctgcataatggggcaagttagtttcatcgtgccgaggcttgttatcggggtcaccatccagcttctctgcagctacagcaccatgcctctgtatgcagttgtcactcagatggggagcttctacaagaaggagatcttcaacgatcacgtgcagcagggcgtgctgggctgggcacagaaggtcaagatgaggaaaggactcaaggagggaagcgctggcgccggcgtcgccgccgagccgtcgaacggcggcggcggcgacacggcggggccttctgtcaagatcgaaatgatgagaagggcagcgcgggaaggcaatgatgaagctggtgtaagcatagagtga

SEQ ID NO: 4657 - DNA, 1446 bp, Oryza sativa
atggcgatgaggaagaggatgcgcggcgcgctgctggcgctcgcgctgctgctcaccgcgacggccgtcgtgccgctgctcctcctcggagaggccggggacgacggcgtcggggccgtcgccgccgcgccgccgttcaacgcgtcccgcgtcagggcggtgtcgtggaggcccagggtcttcgtctacaaggggttcctctccgacgacgagtgcgaccacctcgtcaagctggggaagaggaagatgcagaggtcgatggtggcggacaacaagtccggcaagagcgtcatgagcgaggtgcggaccagctccggcatgttcctcgacaagcgccaggatccagtggtgagcaggattgaaaaaagaattgcagcatggacctttcttcctgaagaaaatgctgagaacattcagatactccgatacgagcatgggcagaagtatgagccgcactttgattatttccatgacaaggtcaatcaagcactgggaggccaccgttacgcgacggtgctcatgtatttgtccactgtcgagaagggaggcgagactgtgttccccaatgctgaggggtgggaaaatcagcccaaggatgacactttctctgaatgtgcacaaaaaggattggcagtgaaaccagttaaaggcgacacggtgctcttctttagccttcatatcgatggcgtaccggacccgctcagcctccatgggagctgcccagtgatagaaggtgaaaaatggtctgcaccaaagtggatccgtatcaggtcctatgagcatcctcctgtctcaaaggtgacagaaggatgctccgacaacagtgcacgttgcgcgaaatgggctgaagctggagaatgcgagaagaacccggtatacatgacagtgaacagtagcatactatttcttcaaaaacaacggcttacatcctttgcacatggttttgaaatctcaagtttacttctagtggaggtgaagactgtgaagtttgccaggtcagcgaggcgggtatcagcgacaacattggccatcctatttggaggcctcattttggtgtcattgttggtggagacaagcgcgaaaccgccgtctccggggagtagtgttcttggtgttgggggtagaaggatgatgatcaatggaggactagttcacagtcacaggagcttggaagatttcaatgctggtgatgctttcagcagcatgaagaggagggtgccaaatggaccagatccaatccacaacaggctttcaattccttcctttatttactctggttttctaatggtcttcaccttgaattcttcagaggaactggagaatcaggaagatcaccaggccgagcgtagaaaagcacattgcaagtttgctatagaggaaaaggagtgtagctttgaacagccaaagttgcaccctgaatgtggcctaaaagcaaagcttgtgtga

SEQ ID NO: 4658 - DNA, 1395 bp, Oryza sativa
atggccggagccagagatagaggagacgggcgagccccacgcggccacgtggtgctgttcccgctgccgttccagggccacctgagcccgatgctgcagctcgccggggcgctccacgcgcgcgggctcgccgccaccgtgctccacacggcctacaacgcgcccgacgaggcggcgcacccggagctcgcgttcgtcgccgtgccgtcggccgacgccatcgcgcgcgcgctcgccgcggcgccccgggacggcatcgccaagatcatggcgctmaacgccgccatcgaggcgtccgggtgcgcccgcgamgcgytcgcgtcgctgatgtccgggccggagcggccggcgtgcctggtcatcgacgccgcgctccccggcgcgcagaaggccgcggcggagctcggccttccgacgatcgtgctgcacaccggcagcgcggcggcgttccgcctgttcaggtcgtacgccatgctccgcgagaagggatacttgccagcgaaagagtctgagctgaacaggccagtggaggagatgccaccactgcgtgtatcagacctgttcgacccaagcaagtacttcaacgaggaaatggccaacaaaatcctggctctctctaccgaaaccacaacgaactcctccggcacagtggtgaacacattcgaagctcttgaaacccctgaactgcgctcagttcgtgacgagctcggcgccaccattccggtcttcgccattggccctctccacaagctcaccagcaatggcgacaggagcagcctgctggaccaggaccggagctgcatcgagtggctggacacgaaggagcccggatccgtgctatatgtgagttttgggagtgtggtcatggtgagccaggatgagttcaacgaggtagcctggggtttggcaaacagtggaaggcctttcctatgggtggttcgtcctggtctcgttatcggtgtctcggggaaaccggagctaccggaagggtttgtggaagcggtggagggtaggtgcaaagtggtcgattgggcaccgcagacggaggtgctagctcaccatgcggtgggtgggttttggacgcacaatggttggaactcgacgttagagagtatttacgaaggggtcccgatgttgtcaaggcctatctttggagatcaactggttactgcgaggtacgtgcaggagacgtggcagataggttttcgggtggagggtaagctagagagatggaaaattgaggaggccattaggaggttgatggaaggtgaggagggggctgaggttaagcagagggcagatgaacttaagaagaaaatattgatatgcttgaagaatggaggttctactcagcaagctattgataagttggtggaccatatgttatctctttag

SEQ ID NO: 4659 - DNA, 1490 bp, Oryza sativa
atggccagcgtcgacggagcgacgcgccgcggcggcggcgatggaagcatcaggcggcgccgggtgctggtgttcccgcttccgttccagggccacatcaacccgatgctgcagctcgccggcgcgctccacggccgccgtggcggcggcggcggcgagctgtccgtcaccgtgctccacacccgcttcaacgcgatcgacccgtcgcgctacccggagctcgcgttcgccgaggtgcccgacggcatcccgcccgacgtcgccgcgaatggtaacatcgtcgacatcatcgtagccctgaacgtcgccatggacggcggtgagtcgtcgccgtccttccgcgacgtgctcgcgtcggtggtcgccgccgacgacgaggggcggaagccccgcgcgtcgtgcctcatcatcgacggtaacctcatggccgcgcagaagaccgccgccgagctcggcctccccacgctcgtgctccgcaccggcagcgccgcctgcctcggctgctacctcgcctaccccgcgctcctccaaaagggctatttgcctcccaaagagtcgcaactctatgaaccagtggaggagctaccgccactgcgagtaagggacctgtactacacgagcaacgccaaccaagaactggtccgtaaagttcttggttggatcgccgaaacggcgagaaactctaacggtgtggtgatcaacacgttcgacgagctggagccggccgagctcgagaggatccggcgcgagcttgacggcgacggcgtcgccatcgtgctcgccgtcggcccgctccacaagctctcccccatgaacgccgggggcagcctgcacctgtgcccggaccggagctgcatcgagtggctggacacgcaggcgacgggatccgtgttgtacgtgagctttgggagcttagcgtcattggactccaacgagttcttggaggtggcatggggattggagagcagtggccagccttttctatgggtggttcgaccagaccttgtgaagggtttggataaaccaagtttgccggatgggttcgagcgtgcggtggagggtaggggtaaggtgattaagtgggccccacagcaagaggtgctagcacaccacgcagtgggagggttttggacgcacaatgggtggaactcgacgctagagagtgttagtgagggagtcccaatgatatgtaaacctcaatttgcagaccaaatgttgaatacaaggtacttagaagcggtgtgggctgtaggctttgagcttgttggcaagctagaaaggggtgaaatcaagaaagcgattaagaggttgatggtagaaaaggagggagctgagatcagggaacgagcaaaagagcttaagaagaaaatggaccaatgcttggaaagtagtggatcttctcaaattgccatcaacagatctctcgtaggccctatgcatgatattcacgtcatgtggccagtggcggagctagaaagtttccacgtcta

SEQ ID NO: 4660 - DNA, 2450 bp, Oryza sativa
atgggggaagctgccggcgaccgcgtcctgagccgcctccacagcgtcagggagcgcatcggcgactccctctccgcccaccccaatgagctcgtcgccgtcttcaccaggctggttaacctcggaaagggaatgcttcaggcccaccagatcattgctgagtacaacaacgcaatctctgaggctgatcgtgagaagctgaaggacggtgcttttgaggatgtcctgaggagtgcacaggaggggattgttatctccccatgggttgcccttgccatccgcccgaggcccggtgtctgggagtatgtgagggtcaatgtgagcgagctcgctgttgagttgctgacagtccccgagtacttgcagttcaaggaacagcttgtggaagaaggcaccaacaacaactttgtgcttgagctggatttcgagccattcaatgcctccttccctcgtccttctctgtcgaagtccattggcaatggtgtgcagttcctcaacaggcatctgtcatcgaagctcttccatgacaaggagagcatgtacccactgctcaacttccttcgtgcacacaactacaagggcatgaccatgatgttgaatgacagaatccgcagtctcagtgctctccaaggtgctctgaggaaggctgaggagcatctttctggtctttcagcagacaccccttactcagaattccaccacaggttccaggaacttggtctggagaagggttggggtgactgtgccaagcgttcccaggagaccattcacctccttttggaccttcttgaggcccctgatccgtccaccctcgagaagttccttggaacaatcccaatggtgttcaatgttgtcattatgtccccacacggttacttcgcgcaagccaatgtcttgggttaccctgacactggagggcaggttgtctacattttggaccaagtccgtgctatggagaatgagatgcttctgaggatcaagcagcaaggtctcaatattacaccacgcatccttattgtcaccaggttgctccctgatgcaactggcaccacctgcggtcagcgtcttgagaaggtccttggcaccgagcacacccacatcctacgtgtgcctttcagaactgaaaatggaattgttcgcaagtggatctcacgttttgaagtctggccgtacctggaaacattcactgatgatgtcgcgcacgaaattgctggagagctccaggccaatcctgacttgatcatcggaaactacagtgacggaaaccttgttgcatgcttgcttgcacacaagatgggtgttacccattgtaccattgcccatgcgcttgagaaaaccaagtaccccaactctgacctctactggaagaagtttgaggatcactaccacttctcatgccagttcacaactgacttgattgcgatgaaccacgctgacttcatcatcaccagtaccttccaagagattgccggaaacaaggacactgttggtcagtatgagtctcacatggcattcaccatgcctggtctgtaccgtgttgtccacggtattgatgtttttgacccgaagtttaacattgtctcgcctggtgcggacatgtccatctacttcccttactctgagtctcgtaagaggctcacctccctccacccagagattgaggagttgctctacagcgaagttgacaacaacgagcacaagtttatgctgaaggacaggaacaagccaatcatcttctccatggctcgtcttgaccgtgtcaagaacttgactggtctggttgagctgtatggtcgcaaccctcgcctgcaagagctggttaaccttgtggttgtctgtggtgaccatggcaacccatctaaggacaaggaggagcaggctgagttcaagaagatgtttgaccttattgagcaatacaacttgaatggccacatccgctggatctccgcgcagatgaaccgtgtccgcaacggtgagctctaccgttacatctgcgacaccaagggtgcttttgtgcagcccgctttctacgaggcattcggtctcactgttgttgagtccatgacctgtggtctcccgacattcgcaaccgcctatggtggtccagctgagatcatcgtgaacggagtgtctggcttccacattgacccataccagggtgacaaggcctcggcgctgctcgttgagttctttgagaagtgccaggaagaccccagccactggaccaagatctcgcagggcggtcttcagcgtatcgaggagaaatacacctggaagctctactctgagaggctgatgaccctcaccggcgtctacggattctggaagtacgtctcgaacctggagaggcgtgaaacccgccgctaccttgagatgctgtatgccctcaagtaccgcaccatggctagcaccgtcccgttggccgtcgagggcgagccgtcgaacaagtg

SEQ ID NO: 4661 - DNA, 1245 bp, Oryza sativa
atggccgagatctgctgcgaggaggccatgtcgccgccggccactgccacggctgctgtcgcggcagcggtctccgcctcggccgccgcagccgtctcctcggcgatagacaggcggcgccgcaggatggagattaggcgcatccgcatcgcaagtgatctcgagctgcaggccggagaggatgggcgccctggaaagcggcagaggctggcgcgcacggcgtctggcgccccgcgtcctgacgaggattcggcgtctgagcggccgagttgtggccgtacggaggagttcccgaggtatggggtcaccgctgtgtgcggccgccgtcgcgagatggaagacgccgtgtccatcagaccggacttcttgccggcatccggcaagttccatttttacggcgtcttcgacggccatggctgctcccatgttgcgacgacgtgccaggacaggatgcacgagattgtcgccgaggagcacaacaagggggcctccggcgaagtggcgccttggagggatgtgatggagaagagcttcgcgcggatggatggggaggtcggtaaccgggcgtccacccgcagcgacgacgagcccgcctgcccgtgcgagcagcagacgccttcgcgtcgcgaccacgcgggttccaccgccgtcgtcgccgtcgttagcccaacacaggtcgtcgtcgccaacgccggcgactcccgcgccgtcatctcccgtgccggcgtccccgtcgcactatccgttgaccacaaacccgatcggcccgacgagctggaacgaatcgaggcggcgggcggccgcgtcatttactgggacggcgcccgggtgctcggcgtcctcgccatgtctcgagccatcggggatgggtaccttaagccgtacgtgacgtcggagccggaggtgaccgtgacggagcgcaccgacgacgatgagtgcctgatcctggccagcgacgggctatgggacgtcgtgaccaacgagatggcgtgtgaggtcgtgagggcgtgcttccacaacaacggtccgccggcaccggccgcgcggccgagcggcgtgccctcctcggccgaggcggcggaaaccgagaacggaggagccgcatcggtgaaggggataagcaaggcggagtcctccgacaaggcgtgctccgacgcggccatgctgctgacgaagttggcgctggcgcggcggagcgcggacaatgtcagcgtcgtcgtcgtagatctccgccggggattgtga

SEQ ID NO: 4662 - DNA, 4017 bp, Oryza sativa
atggattactccgtattaatcaaccgggccccatgtgccacttccacactttcttcttcctctcctctctcctgcagcaccaagcgccgcctggctgaatcttacggcggccggcgatgggagggcgaggagactctgggctacgtgttggggaggcggtggaaagcccgcggctgtgcagagcggcttggtgtggcagagggttggctcggggtgaatgacagaatgaggcgtcggcggtgcccagggagttttccggagagagacgaggtgcgcgcgccggagctccgcatcgtcggggggtggggggacgttaggaaggggctaaggtggtcttgccactatggccatctgcggcggggaggtggcgcgggcggcggccgctggtctccaaaggaggaaggcaccgatgtagcgtgggcacaagtcgcgcgacgtgactttggcatggcgcttcgatggcaggtcaggtgtgttagtcctccagggatgagatggggaatgagcccagacagaaggttagcagcttttgcattctcaaagatcttcgcaagtgcatcacttactaaattgaatagcaggggagagagggggtcaccctatctaagccctctgaataaaagcagtctgagtatgagaaatctcattgttagctacaacagtggatgtggggcttgtgtaatccttatagccaagtataatccaaagacagatgaagtgactgaattcaatgtaaactcatgcctaacacttctttacagtatacatttctgttcaattattaccactgagggtctggggaataccaaagatggcttccattctatacagaaaagaatgtccgggtttcatgcctcccagtgtggtttttgcacccctggcatgtgcatgtctattttctcctctcttgtcaatgctgacaaatccaagaagcctgcaccaccaaaagggttctcaaagctatctatatcagaagcagaaaggtctttctcgggtaacatgtgtcgatgcaccggttaccgaccgattgttgatgcctgtaaaagttttgaatcggatgttgacctagaggatttgggccttaatatattctggaaaaagggtgacaaacacccagatcctaccaaattgccaagctacactcttggtggtgggatctgtaccttcccagacttccttaaatctgagatcaaatcttcgctagacttcaatgatgctagtatttcaggccccagggagggatggtattgtcccaaaagtatcaaacagtactataagttagtaaattctggcttatttagtgaaagctctgtgaaagtggtggttgggaacacaagtactggtgtttataaggatcaggacctttatgacaagtatattgacattgcaggcattccagaactttctgctattgtaaggaaagataagggcattgaaattggagcagctacgtcaatttccaggaccattgagatacttaaccaagaaagtgaattaacatcctctccaaatgggagtgtggttttcagaaaacttgctgagcacatgagcaaagtggcttcgccatttgttcgtaacacagcaagcattggaggaaacataatttttggcacacmaatacccttttcgctcagacattgcaaccatacttcttggtgctgccgcaactgtcaatcttcaggacatgtttccttggataaatcatcaggtgacaatatattgagtaacctgcacttggcttttggtgcctatggaactaaacatgctattagagcaaggaaggttgaggaatacctgacaggaaaaatactttctgcatctgttgtgcttgaagcaattcgattgctgagagaaacaattgtaccggtggaaggaacaactcatcctgaatacagagtcagtgtggctgttggatttctcttcagtttcttatctccactttgtaaaggtgtgatagagtctggaaaaactctcagtatttctgaagatttggtagatactgataatgtccataacaagccattgtcttcacgacgagaaacactttctgatgatgaatatacacctgttggagatccaatcaagaagtataaagttgaggttcaagcatccggggaggcaatatatgtagatgatattcctgctccaaagaattgcctatatggagaatttatttacagcacacaacctcttgctaatgtgaagagtattaaattcaaaccttctttggcatcgaagaagatcattacagttgtttctgccaaggatattccaactggagggcgaaatattggatcaacattctggtttggggatgaagaaccactatttggtgatccaattgctgagtttgctggacaagttctcggtgttgtgattgcagaaacacagccatatgctgacatggcagcaaaacaggcagttgttgaatataccacagatggtttaaaggcaccaatcttaacagtggaacaagctgtgcaaagcaatagctatttccaggttccccctgaaagggctcccaagcaagttggtgatttttccaacggaatggcagaagctgatcacaagatcatgtcggaagaatttgtaattggagtgaccaattttcctcaagctataagtaaggctcatctaaggcaacatagtataacatcttctcatgtcaaactttcttctcagtactacttctacatggaaacmcrgacrgcactagcaattccagatgaagataacaccmtgacagtatacagttcatcacaattctctgaacttgcacagaatgtcatttccaagtgcctcggcattccattcaacaatgtacgtgtcattacaagaagggctggaggtggctttggtggaaagagaagggtatttttttacccagcctctacatccaaccagatatatacggccattgaaatagggaacttagcctcacaaacaacccaatctaaaattcgctccataggagatttgaactcaggaccttggggtactactcagattgcaacagcagctgcactctgtgcacacatgctacgtcgtccagtgcgcatgtatctcaatcgcaatactgacatgatcatggttgggggtcgccacccgatgaaagctcgttactccgttggtttcaagcctgatgggaaaattacagccttgcacctggatttactaataaatgctgggatatctgctgatgcaagccccataatccctggcactattatatcaggtctgaagaagtacaactggggtgctctttcatttgatgtcaagctctgcaaaacaaacaacacatccaaatcagtgatgcgagctcctggagaaacacaagggtctttgattgctgaagccatcattgaacatgtcgctgcagtactctcccttgacgccaacactgtcaggcagaagaatttccactcctatgatagccttgttttgttctacccggaaagcgcaggcgaatcgtctacgtacacattacattctatttttgacagattagcttcaacttctagctacctaaaacgtgctgaatccatcaagaagtttaacagttgcaataagtggcgaaagcggggcatttcttctgtgcccctcattctgaaggtaagagtgagaccagcacctggaagagtttctgtactcagtgatggctccattgttatcgaggttggtgggatcgaacttgggcaaggactttggacaaaagtacagcagatggcggtttatgctttgggacaattgtggcctaacgggtgtgaaggtcttcttgacagaatccgtgttcttcagtctgatacattgaacttaattcaaggtggcgttactgctggcagcactacatctgaatctagttgtgcagcaacccttcaggcgtgcaacatgctggttgagagattaaagccagtcttggataggctgcagttgcagtcaggcatagtatcatgggatacattgatttcgcaggtgattccagttttctataatgtcagtttatgcacagtaaagtag

SEQ ID NO: 4663 - DNA, 4062 bp, Oryza sativa
atgatgatgatgaagaagaaggtggtggcgccggtggagcgggtggtgttcgcgctgaacggtgagcgtcaggaggtggccgccgccgacgtggacccgtcgacgacgctgctggagttcatccgcaccaggacgccgttcaagggccccaagctcggctgcggagaaggtggatgtggggcttgtgtaatccttatagccaagtataatccaaagacagatgaagtgactgaattcaatgcaagctcatgcctaacacttctttacagtatacatttctgttcaattatcaccaccgagggtctggggaatactaaagatggcttccatgctattcagaaaagaatgtccgggtttcatgcctcccagtgtggtttttgcacccctggcatgtgcatgtctattttctcctctcttgtcaatgctgacaaatccaagaagcctgatccaccaaaaggattctcaaagctatctgtatcagaagcagaaaggtctttctcaggcaacatgtgtcgatgcactggttaccgaccaattgttgatgcctgcaaaagttttgcatcagatgttgacctagaggatttgggccttaatatattctggaaaaagggtgacaaacacccagatcctaccaaattgccaagctacactcttggtggtgggatctgtaccttcccagacttccttaaatctgagatcaaatcttcgatagacttcaatgatgctagtatttcaagccccagggagggatggtattgtcccaaaaatatcaaacagtactataagttagtaaattctggcttatttagtgaaagctctgtgaaagtggtggttgggaacacaagtactggtgtttataaggatcaggacctttatgacaagtatattgacattgcaggcattccagaactttctgctattgtaaggaaagataagggcattgaaattggagcagctacgtcaatttccaggaccattgagatacttaaccaagaaagtgaatcaacatcctctccaaatgggagtgtggttttcagaaaacttgctgagcacatgagcaaagtggcttcgccatttgttcgtaacacagcaagcattggaggaaacataattttggcacacaaatacccttttcgctcagacattgcaaccatacttcttggtgctgccgcaactgtcaatcttcaggtttcttcgaaaacactacatgttactttggagcagttccttgagcaacctcctctggrtcacartactttacttctgagcatatttattccacattgggcttcagactgtaagaaagagcatactttggtatttgaaacttatagagcagctccacgtcctcttggcaatgctgtttcatatgttaattctgctttcctaggacatgtttccttggataaatcatcaggtgacaatatattgagtaacctgcacttggcttttggtgcctatggaactgaacatgctattagagcaaggaaggttgaggaatacctgacaggaaaaatactttctgcatctgttgtgcttgaagcaattcgattgctgagagaaacaattgtaccagtggaaggaacaactcatcctgaatacagagtcagtgtggctgttggatttctcttcagtttcttgtctccactttgtaaaggtgtgatagagcctggaaaaactctgagtatttctgaagatttggtacatactgataatgtccataacatgccattgtcttcacgacgagaaacactttctgrtgatgaatatamacctgttggagatccaatcaagaagtataaagttgagcttcaagcatccggggaggcaatatatgtagatgatattcctgctccaaagaattgcctatatggagaatttatttacagcacacaacctcttgctaatgtgaagagtattaaattcaaaccttctttggcatcraagaagatcmttacagttgtttctgccaaggatattccaactggagggcgaaatattggatcaacattctgtttggggatgaagaaccactatttggtgatccaattgctgagtttgctggacaagctctcggtgttgtgcaaaacagcagttgttgaatataccacagatggtttaaaggcaccaatcttaacagtggaacaagctgtgcaaagcaatagctatttccaggttccccctgaaagggctcccaagcaagttggtgatttttccaacggaatggcagaagctgatcacaagatcatgtcagaagaagtcaaacttgcttctcagtactacttctacatggaaacacagacagcactagcaattccagatgaagataacaccatgacagtatacagttcatcacaattccctgaacttgcacagaatgtcatttccaagtgcctcggcattccattcaacaatgtacgtgtcattacaagaagggctggaggtggctttggtggaaaggcagtcagatcactccatattgcaacagcagctgcactctgtgcacacacgctacgtcgtcccgtgcgcatgtatctcaatcgcaatactgacatgatcatggttgggggtcgccacccgatgaaagctcgttactccgttggtttcaagtctgatgggaaaattacagccttgcacctggatttactaataaatgctgggatatctgctgatgcaagccccgtaatccctggcactattatatcaggtctgaagaagtacaactggggtgctctttcatttgacgtcaagctctgcaaaacaaacaacacatccaaatcagtgatgcgagctcctggagatacacaagggtctttcattgctgaagccatcattgaacatgttgctgcaatactctcccttgatgccaacactgtcaggcaaaagaatttccacacctatgatagccttgttttgttctacccagacagcgcaggagaatcttctacatacacgcttcattccatttttgatagattagcttcgacttcaagatacctgcaacgtgttgaatccatcaagaagtttaacagtaccaataagtggcgaaagcggggcatttcttctgtgcccctcatttttaaggtagaaccgagaccggcaccaggaagagtttctgtgctcaatgatggctccattgttgttgaggttggaggagtcgaacttgggcaaggactgtggacgaaagtacagcagatgacagcttttgctttgggacagttgtggcctaaggggtgtgaaggtcttcttgacagaatccgtgttcttcaatctgatacattgaacttaattcaaggtggccttactgctggcagcactacgtctgaatctagttgtgcagcaacccttcaggcgtgcaacatgctgattgagagattaaagccggtcatggagaggctgcaattacagtcagacacagtctcatgggatacattgatttcccaggcctctcaggaaaatattaatttgtcagcgagcgcgtactgggtacctgagcaagactcgaacttttatttgaactatggagctggtacaagtgaggttgaggttgatcttcttactggagcaattaccataataaggagtgatcttatctacgactgtggcaaaagcttgaatcctgctgtagacttggggcagattgaaggttcatttatacaaggaattggtttcttcatctatgaagaacaccagacgaacagtgacggtctggttattagcaacagcacctgggactacaagattccaagcgtcgacaccatcccgaagcaattcaacgcagaggtgctgaacactggatatcataagcaccgtgtgctttcttcaaaagcttctggtgaacctgccgtggttcttggagcatctgtccattgtgcggtgagagaagcaatccgagcagcaaggatagagtttgcaggcaacaatggatctggaagttcattactcacatttcagcttgatgtccctgcaccaatgacggtggtgaaggaactgtgtggcttggatattgtggagaagtacttggaagatttatctaaccgtggagctgcaagtggcaactag

SEQ ID NO: 4664 - DNA, 2160 bp, Oryza sativa
atggctttccgagaggacaaatatgtgagatttcatgactggagatcagaacattctgttggttccgaaaagacagttttagaaggaaggcataatgtgtttgactcgctaatggatagaactgtaggagccttttcattcctagggaattcctcacatcctgaaaccctcaacaaaccagcttctgaggaaaagaagtccaaaacaagagttcttgatcctcaagggccattcttgcagagatggaacaagatatttgttatatcatgccttattgcagtttctgtggacccgttattcttctatattccagtgattgatggtgacaatatctgcttatatctggacaaaaagttggaaatcatagcaagtgtcctgcgattttttacagatatattctatttactccatataatttttcagttcaggacaggctttattgctccttcctctagagtgtttggtcgaggtgtcttggttgaggacacctttgcaatagcaaagcggtatctatcaacatattttctgattgatttcttagctgttctgccccttcctcaggtgctcgtattggtagttctaccccgtctgcaaggctcctcagttatgacggcaaaaaatatattaatggttatagttatttgtcaatatgtacctcggttgattcgaataataccattgtaccttcaaatcaccagatcggctggtataattacagagacagcatgggctggtgctgcatttaaccttttaatttatatgcttgctagtcatgtccttggagctctttggtaccttctttccattcaacgagaagacacctgttggaaagatgcatgtagtagacatgatggctgtgattcgggatctttattttgtgggagtaatgcagctagaaataacagtttcttacaagatttttgcccgacaaatggaactgacaatgcagatccaactttcggaatttatcttccagctcttcaaaatgtttcacaatcaacgagtttctttgaaaaattgttttattgcttttggtggggtctgcaaaatctaagttctcttggtcaaaatcttaagacaagcacgtatacatgggagaatctatttgctgttttcgtctcgacatcaggtctagttttgtttgcactccttattggtaatgtgcagacctatctacaatctgcctctgtgcgtatagaagaaatgagagtgaaacggcgtgacacagagcaatggatggcacatcgattacttcctgataacctcaaggagcgaatactgcgtcatgaacaatataggtggcaagaaacaagaggggttgatgaagagggccttctttcaaatcttcctaagaatcttaggagagagataaagaggcatctttgcctgtcgcttctcatgaggatgttagttctggactttctggttttgtgtcagacctttcctcttctgggtcatagtgttccaatgtttgaaaacatggatgagaagctcttggatgccatgtgtgatcgtctaaagcccatgctgtacacagaaggcagctgcatcattcgcgaaggagacccagtgaatgaaatgctcttcatcatgagaggaaatcttgagagtatgacgacaaatggtggacagactggctttttcaactccaatattatcaaaggtggagatttttgtggtgaagagcttctcacatgggcacttgaccctacttcagcttcaaaccttcccagctcaaccaggactgtgaaaacgctgtctgaagtcgaagctttwgctttgagggctgatgacttgaagtttgtagccacccaattcaggagactccacagcaaacaactccagcatacatttagattctattcacagcaatggagaacctgggcagcttgttttatacaggcagcttggcatagatactgcagaaagaaactggaggatactttgtttgagaaggagaagaggttgcaagcggcaattgtcagtgatggttcgagttcgctcagtcttggtgcggcgctatatgcttcacgttttgctggtaatatgatgcggatcttacggagaaatgccactcgaaaggcccgtttgcaggaaagagtgcctgcaaggttattacagaagcctgcagaaccgaactttttcgctgaagatcagtaa

SEQ ID NO: 4665 - DNA, 1536 bp, Oryza sativa
atggaactctccccaatctcagcttctctcttgctcatcctgatcctgctcgcttttctacccctcctctacttcctctacatgcaccaggatcccaagaagaagcctcgcattcatggactcaagtcctaccctgtggtcggcacgctgccgcacatcatcaagaacaagcaccggttccttaagtggtcgaccagcatcatgaagtgcagccccacgaacaccatgtcgtacaaggcgctcggcctcaccggtggcgtcatcaccgccaacccggccaacgtcgagcacattctcaagactaactttgacaactaccccaagggcaagctcaccgtgtccatgctcgaggactttcttggccacggcatcttcaattccgacggcgagcagtggctatggcagcggaaggccgccagctacgagttcaacaagcgctcgctgaggaacttcgtggtcgacaccgtccggttcgagatcgtcaagaggctgcttccgttgctggagcaggcggggctcgatggacggactctggacttgcaagatgtgctcgagcgattcgcgttcgacaacatctgcctcgtggccttcggtgaggacccggcgtgcctcaccaaggagaggatggccgcgccccagagcgcggagttcatgcgcgcgttcaacgacgcgcagaacgccatcttggcccggttcaactcgccggccaaatcgctgtggcgcgtcaagaagctcttcaacatggagcccgagaggcggatgcgagaggcgctcgccacgatccacggcttcgctgagcggatcgtccgggagcgcagggagagaggggaggccgggctggctcgcggtgacgacttcctgtcgcggttcgctgcgagcggcgagcacagcgacgagagtctccgcgacgtggtcaccaacttcgtcctcgccggccgcgacacgacgtcgtcggcgctgacctggttcttctggattgtctccggccggccggacgtcgaggacagggtcgtgcgcgagatccgcgcggtgcgcgcgtcgagcgggagcacggacgcgacgttcagcttcgacgagctgcgcgagaagcactacctccatgccgccatcaccgagtccatgaggctatacccacccgtggccatcgacacgcacagctgcaaggaggacgacttcctgccggacggcacgttcgtggggaaagggtggctagtgatgtacagcgcgtatgccatggggcgtatggagggcatctggggcgcggactgcgaggagtacaggccggaacggtggctggacgaggcgggcgcgttccggccggagagcacgttcaagtacccggtgttcaacgccgggcctcggatctgcatcggcaaggagatggcctacatacaaatgaagtcaatcgtcgcttgtgtgctcgagaagttcagtctccggtacgccagcgacgccaacgagcgccctcggtccgtgctctcgctgacgctgcgtatgaagtggggcttgccgatgaaagtgaccatcaggaagtaa

SEQ ID NO: 4666 - DNA, 963 bp, Oryza sativa
atgagagctctcgctctcgcggtggtggccatggcggtggtggccgtgcgcggcgagcagtgcggcagccaggccggcggcgcgctctgccccaactgcctctgctgcagccagtacggctggtgcggctccacctccgattactgcggcgccggctgccagagccagtgctccggcggctgcggcggcggcccgaccccgccctccagcggtggcggcagcggcgtcgcctccatcatatcgccctcgctcttcgaccagatgctgctccaccgcaacgaccaggcgtgcgccgctaagggcttctacacctacgacgccttcgtcgccgccgccaacgcctacccggacttcgccaccaccggcgacgccgacacctgcaagcgcgaggtcgccgccttcctggcgcagacgtcccacgagaccaccggcggctggcccacggcgcccgacggcccctactcctggggctactgcttcaarggaggagaacaacggcaacgcccccacatactgcgagcccaagccggagtggccgtgcgccgccggcaagaagtactacggccggggacccatccagatcacctacaactacaactacggcccggcggggcaggccatcggctccgacctgctcaacaacccggacctggtggcgtcggacgccacgtctccttcaagacggcgttctggttctggatgacgccgcagtcgcccaagccgtcgtgccacgcggtgatcaccggccagtggacgccgtccgccgacgaccaggcggcggggcgcgttccgggctacggcgagatcaccaacatcatcaacggcggtgtggagtgcgggcacggcgcggacgacaaggtggccgaccggatcgggttctacaagcgctactgcgacatgctgggcgtcagctatggcgataacctggattgctacaaccagaggccctacccgccttcctag

SEQ ID NO: 4667 - DNA, 906 bp, Oryza sativa
atgagagcgctcgccgtggtcgtggtggccacggcctttgcggtggtggccccagtacggctggtgcggatccacctccgcctactgcggctccggctgccagagccagtgctccggcagctgcggcggcggcggcccgaccccgccctccggcgttgcggcagcggcgtcgcctccatcgtgtcgcgctcgctcttcgaccagatgcttctccaccgcaacgacgcggcgtgcccggccaagaacttctacacctacgacgccttcgtcgccgccgccaacgccttcccgagcttcgccacaaccggcgacgcsgccacccgcaagcgcgaggtcgccgcgttcctggcgcagacgtcgcacgagaccacgggcggktgggcgacggcgcccgatggcccctactcgtggggctactgcttcaaggaggagaacaacggcaacgttgggtccgactactgtgtccagagctcgcagtggccgtgcgccgccggcaagaagtactacggccggggacccatccagatctcctacaactacaactacggcccggcggggcaggccatcggctccaacctgctgagcaacccggacctggtggcgtcggacgccaccgtctccttcaagacggcgttctggttctggatgacgccgcagtcgcccaagccgtcgtgccacgcggtgatgacagggcagtggacgcccaacggcaacgaccaggcggcggggcgcgtgccgggctacggcgtggtgaccaacatcatcaacggcggcgtggagtgcggccacggcgcggacagcagagtcgccgaccggattgggttctacaagcgctactgcgacatgttgggcgtcagctacggcgccaacttggactgctacaaccagaggcctttcaactcctaa

SEQ ID NO: 4668 - DNA, 876 bp, Oryza sativa
atggagcagcagcggagcaggtcgacggcggcaggaggagaggtggaggtggagcagctgccgggattcaggttccatccgacggaggaggagctgctggagttctacctgaagcaggtggtgcaggggaagaagctcaagttcgacatcatccccaccgtccacctctaccgccacgacccgcgcgagctccccggactcgcccgcatcggcgagcgcaatkgkaacttytttgtcccccgggaccgcaagcaggccaccggcggcggcgccgccgtaggcccagccgaaccacggagcgcggcyttgsaaggcaacmggtycraacgggcmatccgctgcgccgccgaccccaagsgcctcatcggcctcaagaagacgctcgtctactacgagggccgcgcccctcgcggcaccaagaccgactgggtcatgaacgagtaccgcctccccgacgccgccgccattcccgacaccatgcaattgcaaatgcaacacgacgacatggtgctctgcaaggtctaccggaaggcggtctccctcaaggagctggagcagagggtcgccatggaggagcttgcacgctccaccacgtcctccggcacccacaacaccggctcgcccctgcagcaggactcctcctccatctccatctcctcctcctcggacgccatgaagaaagaggtggtgggggtggatgaggcgtcggcggcggcgcatgagctggtccgcccggcgacgctgagcctgccgcagctggaggtggcgaggccgcagagcgggctggagtggatgcaggagccattcctgacgcagctgcggagcccatggatggagacctggtcgccctactacgccagcgtcctcaacttctga

SEQ ID NO: 4669 - DNA, 2289 bp, Oryza sativa
atggtgactgttgtggaggaggtcgaccaccttcctatatatgatctggaccctaagttggaggaattcaaggatcacttcaactataggataaaaagatacctcgaccagaaatgcctgattgaaaaacatgaggggggccttgaagaattttctaaaggctatttgaagtttgggattaatacagttgatggtgccacaatatatcgtgaatgggcgcctgctgcacaagaagcacagctcattggtgagttcaataactggaatggtgcaaaacacaagatggagaaggataaatttggcatttggtcaatcaagatttcacatgtcaatgggaagcctgccatccctcacaattccaaggttaaatttcgctttaggcatgggggtggagcatgggttgatcgtattcccgcatggattcgttatgcaacttttgatgcctctaaatttggagctccatatgatggtgtacactgggatcctccagcctgtgaaaggtacgtgtttaagcatcctcgacctccaaaacctgatgctccacgcatctatgaggctcatgtggggatgagtggtgaagagccagaagtaagcacatacagagaatttgcagacaatgtgttaccacgcatacgggcaaataactacaacacagttcagttaatggcaatcatggaacattcctactatgcttcttttgggtatcacgtgacaaattttttcgcagtcagcagcagatcaggaacaccagaggatctgaaatatcttgttgacaaggcacatagtttaggattacgagttctgatggatgttgtccatagccatgcgagtaataatgtgaccgatggtctaaatggctatgacgttggacaaaacactcatgagtcttattttcatacaggagataggggctaccataaactctgggatagtcgtctgttcaactatgccaattgggaggtcttaagatttcttctttctaatttgagatattggatggacgaattcatgtttgatggcttccgatttgatggggttacatcaatgctataccatcaccatggtatcaataagggatttactggaaactacaaggagtatttcagtttggataccgatgtggatgcaattgtttacatgatgctcgcaaaccatttaatgcataaactcttgccggaagcaactattgttgctgaagatgtttcgggcatgccagtgctttgtcggccagttgatgaaggtggagtagggtttgacttccgcctggcaatggccattcctgatagatggattgactacctgaagaacaaagaggaccgcaaatggtcaatgagtgaaatagtgcaaactttgactaacaggagatatacagaaaaatgcattgcctatgccgagagccatgatcagtccattgttggtgacaagactatagcatttctcttgatggacaaggaaatgtacactggcatgtcagacttgcagcctgcttcacctaccatcaaccgtggcattgcactccaaaagatgattcacttcattacgatggcccttggaggtgatggctacttaaattttatgggcaatgagtttggccatccagaatggattgactttccaagagaaggcaacaactggagctatgataaatgcagacgtcagtggagccttgtcgacactgatcaccttcgatacaaggttgtgcctaagtatatcaattatatgaatgcatttgatcaagcaatgaatgcactcgaggaggaattttccttcctgtcatcatcaaagcagattgttagcgacatgaacgagaaagataaggttattgtctttgaacgtggagatttggtttttgttttcaattttcatcccaacaaaacttacaagggttacaaagtcggatgtgacttgcccgggaagtacagagtagctctggactctgatgctttggtctttggtggccatggaagagttggccatgatgtggatcacttcacgtctcccgagggaatgccaggagtaccagaaacaaatttcaacaaccgccctaactcattcaaagtcctttccccgccccgtacctgtgtggcttactatcgcgttgatgaagatcgtgaagagctcaggaggggtggagcagttgcttctggaaagattgttacagagtatatcgatgttgaagcaacaagtggggagactatctctggtggctggaagggctccgagaaggacgattgtggcaagaaagggatgaagtttgtgtttcggtcttctgacgaagactgcaaatga

SEQ ID NO: 4670 - DNA, 1368 bp, Oryza sativa
atggcggcggtagatggtgagacgagctgttcttcctgggacagcgacgatgagtaccagaagttcatccaaaagatgaaccctccaagggttgtgattgacaacacatcatgtaagaatgcaacagttgtgcatgtagacagtgccaacaagtatgggatactgttagaggtagtgcaggtcctcaccgagctgcaactcatagtgaaaaaagcctacatatcatcagatggtggatggttcatggatgtgttcaatgtgactgatcaaaatgggcagaagataatggatgaatcggtactggatgagatagtaaagtatattcataagtgtcttggggctgattcttgctttcttccttcgcggaggagatctgttggagtggaaccttcctctgactacactttgatagagctaactggaactgataggcccggtctgctctcagaagtgagcgctgtgctcacaaacctggaatgcaatgtggtgaatgcagaggtgtggactcataacaaacgagcagcagcggtcatgcaagtcatggataggaaaacggggctggcaatctcagacacacaacggcttgctagaataaaggagcgacttagctatgtgttcaaagggagcaacaggagtcaagacaccaagacaacggtgacaatggggataacccacacagagcggaggcttcaccagctgatgctggaggatcgggattatgaaaggtatgataaggataggacgaacgtcaaccccacaccggtggtttcggttgttaattggctcgacaaggattattccgtggtgaatattcggtgcaaggatcggccaaagcttctcttcgacacagtttgcaccctgacagatatgcaatatgtggttttccatgggagtgtggattctgagggccctgaagcttaccaggagtattacattaggcatattgatggctcacctgtcaactctgaggcggagcgacagcgagtcatccagtgtcttgaagctgctatagaaaggagagtatccgaggggctgaagctagagttgtcgacaggtgatagagtgggactgctatccgatgtcacacgcatcttccgtgagaatggcttgacggttacgagagctgaagtttctactaggggtgacaaggctgtcaacactttctatgtccgcgatgcagcagggagctccgccgtcgatctgaagactcttgaagctatacgccaagagataggccagacagtgcttcaagtaaaagggcaccctgatcaccgcaaatcacctccgcaagagtcgccatctaggtttctcttcagcagtctgttcagaccaagatcgctgtacagcctagggctgatcaggtcctga

SEQ ID NO: 4671 - DNA, 795 bp, Oryza sativa
atgaccaacgcaggaagcacccccaccattgatgatggatatggaggggttgggatggaggcggagggggacgtggaggaggagatgatggcgtgcggcggcggcggggagaagaagcggcggctgagcgtggagcaggttcgcgcgctggagcggagcttcgaggtggagaacaagcttgagcctgagcggaaggcgcggctggcgcgcgacctcggcctgcagccgcgccaggtcgccgtctggttccagaaccgccgcgcgcggtggaagaccaagcagctcgagcgcgactacgccgcgctccgccattcctacgactccctgcgcctcgatcacgacgcgctccgccgcgacaaggacgccctcctcgccgagatcaaggagctgaaggcgaagctcggggacgaggaggcggcggcgagcttcacgtcggtgaaggaggagccggcggcctccgacgggccaccggcggcgggatttgggtcgtccgacagcgactcaagcgcggtgctgaacgacgtggacgcggccggcgccgcgcccgcggcgacggacgcgctggctccggaggcctgcacgtttctcggcgcgccgcccgccgcgggcgcgggcgcgggcgcagcggcggcggcragccacgaggaggtgttcttccacggcaatttcctcaaggtggaggaggacgagacggggttcctcgacgacgacgagccgtgcggcgggttcttcgccgacgatcagcccccgccgctgtcgtcgtggtgggccgagcccacggagcactggaactga

SEQ ID NO: 4672 - DNA, 1485 bp, Oryza sativa
atggagctgacgacactgctgcttctggccttgatatccttcttcttcctcgtcgagctcatcgcccgctatgcctcgccgtccggcagggagagtgcgctgcggctgccgcccgggccgtcgcagctgccgctcatcggcagcctgcaccacctcctcctgtcacggtacggcgacctgccgcaccgggccatgcgcgagctgtccctgacctacggccccctcatgctcctccgcctcggcgccgtgcccacgctggtcgtctcctccgccgaggccgcggcggaggtcatgagggcgcacgacgccgccttcgccggccgccacctcagcgccaccatcgacatcctcagctgcggcggcaaggacatcatcttcgggccctacaccgagcggtggcgcgagctccgcaaggtgtgcgcgctcgagctcttcaaccaccgccgcgtgctctccttccgccccgtcagggaggacgaggtggggcgactcctccgctccgtctccgccgcctccgccgagggcggcgccgcctgcttcaacctcagtgagaggatctgccgcatgaccaacgactccgtggtgcgcgccgcgttcggcgcgcggtgcgaccaccgggacgagttcctgcacgagctcgacaaggcggtgcggctcaccggcgggatcaacttggccgacctgtacccgtcctcacggctggtgcgccggctcagcgcggccacgcgggacatggcgcgttgccagaggaacatctaccgcatcgccgagagcatcatccgcgatcgcgacggcgcgccgccgccggagcgagacgaggaggacctgctcagcgtccttctccggctgcagaggagcggcggcctcaagttcgcactcaccaccgagatcatcagcaccgtcattttcgacatcttctcggccgggagcgagacgtcgtcgacgacgctagactggaccatgtcggagctgatgaagaacccgcggatcttgcggaaggcgcaatcagaggtgagggagacgttcaagggacaagacaagctaaccgaggatgatgtcgccaagctgagctacctgcagctggtgatcaaggagaccctacggctacacccgccagcgccactcctgatccccagggagtgccgcgagacgtgccaggtcatgggctatgatgtgccaaagggcaccaaggtctttgtcaacgtgtggaagataggcagggaaggcgaatattggggcgatggcgagatatttaggccagagagatttgagaatagtacagttgattttagaggggcggactttgagttcatcccgtttggagctgggcggaggatgtgtcctggtatagcgctaggtttagctaatatggagcttgctcttgctagccttctttaccactttgattgggagcttcccgacggcatcaaatctgaggagctagacatgacagaggtatttggtatcacgattgctatactctaa

SEQ ID NO: 4673 - DNA, 1260 bp, Oryza sativa
atggacactccggcggccgccgactggtcggagcttccggccgacgtgctcggcctcgtcctcctcgagctcgagttccccgacctgttccgctccgccgccgtctgcaagctctggcgcgccaccgcccgcgacatacgccgcctcggcctctactcccgcgcgcagacgccctgcctcctctacaccaccgccgccgccggcccgcgcgccgccgtgctctacagcctcgccgacaagacgacgtcctacacggtccccctcccggacccgcccatcgcggagcgccacatcgtcgggtcatcccacggctggctcgtcaccgccgaccaccgctccgagctccacctcctcaacccggccacaggcgagcagctcgacctcccacccgtcgccaccatcgaacacgtaaggccactctacgacgacgccgggaacctcaacaactacaagttggtctactacgacggcggcggcaacagtcaccggagcaacgacgatgacatgcacacggtgacgcacccgccggagacgttcagggagttcttgtatctcaaagccgtcatctcctccgacccatcgcgcggcgacgactacacggtgatgctcatccatcacccatatcttcagctctccttcgcgagatccggcgacaagaagtggacatggatcaagatggggaacaatgagtgtgagtggttcgaagattgcatctaccacgacggcgtgttctacgcccagaccgttcacggcgccatccacgccattgatgtcgtcagtgcttcttcctccttcacccatagactgattctcaagccgaccatgggtgaattgggcaccctctacattgtacgtaccacggaaggtgacatcctgcaggtcttgcgagtcacggaagaagatgaaggtagcgagcataaggacgtacgaacaactgaaatcggggtgtacaaggttgactacaagaagcaagatcttgatgacgtcgatgacataggtaacaatgcattgtttattggcactagttactcgatgtgcttgccagtgaaggattatccacacttgatgccaaatcacatatatttcgacgatgactacgggtacttggttcaccgtaaacatcttcgtcgggacgttggagtttatgattatacgaatgacactgcgatcgatgtggagtatcctcagccgtggctgaattggccactagctccagtttggattactccaagttttactaaaactgcaaaatatagttga

SEQ ID NO: 4674 - DNA, 3669 bp, Oryza sativa
atggggcaagggaacccgggtatgcacccgttgccatctctagatgtgtgtccgtattcatatggatccgcgcctcgaaacattcatctcgtctcgtcgggcgaagaagcccgatttccaaccaattttccccgtttccagaagcagcagccgagccgccgccgacgagcggcgatcgccggcggtgggttgggctggcggctagcggcggaatgggggtgccaggaggcggtggcgctggagatacctgcagcgcagcaggccgaggaggaggttgaggaggaggaggggtcgccttcgcctccggtggtggccagggtgccgccgcggatcaggaggcggctcctcctccggcaccgcgggggagcgccggccaccgcggaggagatcgaggccaagctccgcgatgcggacctccggaggcagcaatttcatgaagcgttatcgtgcaaagcgaggtgcacagtcagatacccttcgtgtccatctcaggaggaggatcctaagaagcgccttgaagcaaagcttgtggctgccgagcagaaaaggttaagcctcctggctaaggaacaaagtcggcttgctaagttggacgagctgcgtcaggctgctaagaatgatgcggagttgaggttcaagaaggagagggaggaacttggcatgaaagttgaatctagagttcggcaagcggaggagaaacgtacacaactcatgcatgctcgttcgcagaggagggctgcactggaggaaagaacaacaaagtaccttgtgcagagagtggcgtgggaaaacaagtacagggagcgtgtacattcagcgatcctgcagaagcgcactgcagctgagaagagaaggacggggctattggaaggtgagaaaaggagagcccagggtaggttttcacaggtccaacttgctgccaggactttatcttgccagagagaagctgacaggagcaagttaaaagaacaactagaagacaaacttcagagggcaaagcggcagagagctgagtatttgaagcagcgaggaagtactcacagctttacatacaccgcttcagttaaacacggtgattttctttcaagaaatctggcaagatgctggagaagattcataacatctaggaagacaacagtggtgttggctagggcctttgacatgctaagaataaatgaggaatctgttaagcctatgccatttgaaaaactagctctttgcattgaatctcccacagttcttcagaccacaagggcatttcttgatcgcttggagagtcgttttactttatctcagtcatcaagtccatcatcaccagaaaatattgatcatctgctcaagcatctgggatcaccaaagaggactctatcaaaaagtgggggaagaactagagtgacaccaacaaaggcagctagaaattcagatgttagcaagttacctagatattcaccgaggatagttctttgtgcttacatgatactaggtcacccaagtgttgtttttaatgaacgaggtgagcgagagaaactacttgtggagtcagcagaaaactttgtgaaggaattcgaactgctgattaagacaatacttgatgggtcaagtggtgcatgcatactgaaacagccaatactagatgatctgtctcctggatcttctaattatcaggaatcttctgccgttgttgctgatcggaagaaattcagatctcagttggcttcttttgacaaagcttggtgtgcctatctttaccacttcgtggtgtggaaagcaaaagatgcaaagtcactagaggaagatcttgtcagagctgcatgcaaacttgagctatcaatgatgcaaacatgtaaatttaccgctgaaggccaaccagagaaccttaatgataatttaaaggccatccagaaagaggttatggtagaccagacacttctaagggagaaggttcggcacttgggtggtgaagctggtattgagcggatggaagttgctttatcagaagcaaggacaaagttttttgaagcaaagggaaacaggagccccttggcaacaactataaaaaatgtagcagctacatgttcttctggagaatctcctatttctgacatgaaggagaattccaacattaatgataaaaggccaagtcaggctgtccaatctatgttcagagttccctcttcaccatctgaaagtamcacagcaggcatcaccatgagtaatccaatgacagtgagcagcactctgtcagaaaaacggccaacagagaacgagcagatggtcaatgagattcttcatggttttctagctgacagctctagtaatattgggactgttgagggtggtttcaaggaaaaagtaagggaaacaatggagaaagctttctgggatgtggttgtggattcacttagaggagacatgccagactacagctatctggttcagctggtaaaggaagtcagggatacattgtatgagatggttcctaaaggttggaaagaagaaataatcaacaatattgaccttgaaattttgttgcaggtacttgaatcgggcacccaggacatgcaatatttgggacagattttgcagtactctctgggtatgctgcgaaaactatcctctcctgcaaaggaagacgaaatgaagagaagccatgacaaattattgggtgaattaactgaacactctgagtgtaataacagtggttcaaattcatttgtaattgctgttatcaaaggtttgcgcttcaccatggaagaactaaaggctctgaagacagaagtcagtagagcacgtatccaactattagaaccaattataaagggctcaggtggagtggaatacctgcagaaggcttttgctgatcgctatggattcccgtccaatgcatcagttgctctccgttcaactgctcagtggatttccacatcaaaagataccgtggaagtagaatggaatgagcatgctcagccatttgttgccaccctccgatcaggtcatggagttccagatcagcgacagtctacaatacctgtgtcagatgatacggggctaccagagtgcacggggcaaaggcttgaccagctaataaggattgggttgttacagctcatcagtggcatagagggtgtgcaaatgcagtcagtaactgagaccttcaagctcaattggttgaggctgagcatgcttgtgcagcgtcaagttttggcgaccgacgacccaaacatcactcccacagagctggaaagcgcgacatcacaactgttcaacactctcgcagagctactggacaacttccccgacgttagcaccgccaagatcatggaggtgatgctccgttcgtcgtcgtcgtcgtcatcaggctcgacaaccggctctccatcagatgaaagaaccgagagcaggaagcagatactggccagggtcttcctcaagagcctccagaccgatgaccccgtcttcaagaaggtctcccggtccgtctactgtgcgttccgcgcgatcaccctcggtggcagcggtgccaggggacggaagctcgccgacgccgccctgaggcgcatcggcgcgacgaagctcaccgaccgggtggtgagatcggccgaaatcctcatcagggccgcgtccatttcacagcaggtccacggcccttggtacaatcacttggtgtga

SEQ ID NO: 4675 - DNA, 1602 bp, Oryza sativa
atgagggcgcggagggttgtcgcggcggcggcggtgctgctgctgttcgccgttgtggcggtggcgcggctcgacctggacgacgacggggacgactcggaggtgctggacgagctgctcgcggtggacgaggaggaggagagaggggagctcggtggaggaggggargcggcggcggcggaggcggtgcggcgggcgcagtcgatggtgctggtgctcgacaacgacaacgcgcggcgcgccgtggaggagaacgcggaggtgctcctgctgggctacgcgccgtggtgcsagcgcagcgcgcagctcatgccgcggttcgccgaggccgccgcggcgctgcgcgccatggggagcgccgtcgcgttcgccaagctcgacggggagaggtaccccaaggccgcctccgccgtcggggtcaaggggttccccaccgtcctcctcttcgtcaacggcaccgagcaccaattcactggcctccacaccaaggacgcgatagttacttgggtaagaaagaagactggtgcaccagctagtaggattcagtcaaaggattccgctgaggaatttctgaaaaaggatcaaacttttgctgttggtcttttcaaaaattttgagggagcagaatatgaagaattcgtgaaagcagcaacctcagaaaatgaagtgcaatttgtcgaaaccaatgataggaatgtggccaaaattctttttcctggtattgcatctgaagagcaattcctgggccttgtgaaaagcgagccagaaaagtttgagaagttcaacggggcatttgaagaaaaggagataattcaatttgtggagcttaacaagttcccacttattactgtattcactgatctcaactctggtaaagtttatgggagccctattaagctacaggtcttcacctttgcagaggcttatgatttcgaagatcttgaatctatgatccaagaggttgccagaggattcaaaacaaagataatgcttatatatgtggatactgctgaagaaaagcttgctaaaccattcctgactctctatggactcgaaccagaaaaacctactgtgacagcatttgataccagcaaaggtaccaaatatctgatggaggcagaaattaacgcgaagaacctacaggacttctgcttaagccttctggagggtacacttccgccatacttccgatcagaaccagtaccagaagaaaagggacctattgaaaaggttgttggccgtacatttgattcttcagttctagaaagtcctcaaaatgtgttccttgaggttcatgcaccttggtgtgttgactgtgaggccataagtaaaaacgtggagaagttggccaaacatttcaatgatttgggccagactaatcttaaatttgcacgcatagatgcttctgtgaatgaacatcccaaattgcagataaacaactaccctacactgttgctatatcctgcccaagacaaaagcaacccgataaaactttcaaagaaatcaaatctgaaggacatggcaaaattcgtcaaggagaagctgcaaattgcggatgtcgaaacagtagccgctggtgacattgtcaaggatgagctatag

SEQ ID NO: 4676 - DNA, 888 bp, Oryza sativa
atgacgcagtgtcaacgtctcagtattataaacagcacaggaggagagacacaggagcaaacaatcaagcgtgtcaggttgcgacttgtgacaaacatgcatacggacgcaggcgacgatttttccgagagttgcaggagcacggagcacttcgtccttgtgcatggcgccggccatggcgcctggtgctggttcaggctcctccgcctgctccaagactccggccaccgtgtctccgccgtcgacctcgccggcgcggccggcagcctcgtcgatcccaaccacgtccgctccttcgacgactacaacgcgccgctccttgacctcatggccagcttaccggccggcgacaaggtaggtgattcagattatggttcactgttccatcaacatcttttactcaaagtccaacttcagataaatatgttttacgtcagtggtcaaccatttaacctgatgcacagttctcttgtttgtcagggtgtacctgatttatccgagcatggagatgtgtatgacctgacatttggtctaggagctgatcatccgcctacagctgtggcattaagaaaggagttccaacgcattattctctatcaacaaagcccccaagaggactctgcactagcttccattctactccggccatggccaacggcgctcagcacggccagattcaccggcgacgatggaggagttgagagcttcatcgacagggtccgccgcgtctacataaagacggagaacgaccggatggtgcagccggagcaacaggaggcaatgatccgccggtggccgccaagcaaggtgatggtcatggacaccgaccacagccccttcttttccgcgccggagcttctcttcaacctcatcctcaagtcgctgtga

SEQ ID NO: 4677 - DNA, 2178 bp, Oryza sativa
atgcacctcgccggcggccgcctcctcctcctcctctgcgtcggcgtgcaattcctcttgattctcccctatggagctctctccgccagccccgccgccgccgccaccggcggagatgagcggtgcaggaggaagtgcggtgggttggatgtcccctaccctttcggcttctccggcgactgccccatcctgctggcctgcgacgagggcaactccacggcggcgctgctccgcccgaccaacggcacgtcgacgaccatggagccgttgtcgtacgccgtcgtcggcaagtcgttcaactcgaccgcctccaccttcgtcgtctccctcctgccttcctgcaaccgcaccgtctccgacgcgaggctgtggctcaccggcgccaactacggcgtgtcgtcgagcaccggcctgttcgtccgcggctgtcagaacgcgaagaacaacagctgcagcgtccccgccgaagccatgtcctcgatgctcaccacagcgaagtgcggcggcggcggcggcggcaacggaaccgcgtcgtcgccggtgacgtgcatcccgacgatgtcgacggaggcggacatggcgaagggtgtgggcctgttcgcgcagtgggacaaggtcgaggagcctagatgcgacaacctgctgacatccgtgtacggcgagacgacgaacgatggggtgttcacgctggagatcgccgtggcggagatggggtggtgggtcaacgggaactgcagcaaccacagcgccgccgccgctgacctcgtcgggctgtgcgcggcgaacgcgacgtgccacgacgtgcggaccccgagcggggcgtggggacaccagtgcaggtgtctggaggggatggacggcgacgggttcgccgccggcgaaggatgccactttcccgctaagaagagctctacgaagaaaatccttatcatagttggaggtgtcttggcgggaacggtggcggccggagtgctcttcctctgctgcgcgcgttgccggcgatccggcggcggcggcggccggtccggcttcgacaggctggcggcgaagcggctgctgtcggaagcggcgtcgtcgagcggcgtgccggtgtactcgtaccacgaggtggcgcgcgccaccaactccttctcccacacgcaccgcctcggcacgggcgcctacggcacggtctacgtcggcaagctgccggcgagctcgccgtcgctggtggcgatcaagcggatgcggcggcggcacgacgacggcgacgacgacgccgccgtggcggtgctcctcaacgaggtgaagctcatctcgtcgctgagccacccgggcctcgtccgcctgctcggctgctgcctagaccgcggcgagcagatcctcgtctacgagttcgtccccaacggcacgctygcccaccacctcgccggtggggggctcccatggcgcgcgcggctcggcgtcgcggcggagacggcggcggcgatcgcctacctgcacgccaagcggccgcccatcctccaccgcgacgtcaagtccagcaacatcctcctcgacggcgacctccgccccaggctcgccgacttcggcctctcccgcgccgtcggccgcctcgaccaggcgtcgctgtcgcacgtctcgacggcgccgcagggcacgccggggtacctcgacccggagtaccaccagaacttccacctctccgacaagagcgacgtctacagcttcggcgtcgtcctcctcgagctcatcaccgccatgaaggtcgtcgacttcgcccgccccgcggcggaggtcaacctcgcgtcgctcgctctcgaccgcatcgggaaggggcgcgtcgacgacattgtcgacccggcgctcgtcgaccgcgccgacgagtgggtgatgcgctccgtccgccatgtcagcgagctcgcgttccggtgcctggcgttccagaaggacgtcaggccggccatgagcgaggtcgccgccgagctcgcccggatcagggacgccgcgccggcgtccgtgccgggagcccggaccggagccggcagccgcccgcccatggtgatcgacgtcggcgtcggcttcgacggcgtcgacgccgcggtgaagaaggtcgggtcgccggtgtcggtgcaggacgtgtgggtcagcgaccagagctcgccgtcgaccaacggctccatgccgcgatttgcttag

SEQ ID NO: 4678 - DNA, 3375 bp, Oryza sativa
atggcgagattaggtcttgccgtgtgcgccgtctccttccacctctgccttcttctgtcgtcgacctcctcgctccggctaaaccccacgacggaggacacagccaaccatggcagaagaactgcttatcacttccagcctgcaaagaactggcagaatgagcaaagtaacagtggtagcaatttcgaggggatgagtgttaagcaacttatatttggtggaaaacctagttttgaggagttagtttgtcatacaaaggatgtgctggggtggagcaatcagtctatagctatacaaggtagatatgatgttggagcaggacccatttcacacaagtacatgctagatttgaatggggagttggagtggaacacatatgtggatatagtgttgggctcccaattcaagtcgcttgaggtggttgcttcgaagcttgatcgagctatgaaaagtcagtcggttaagtctttgacagttgaaagtcatagattctcaaggatgggggttgatgttaacatgcaaaagaaggaagcagttgatgcgaakgagggaaggagtcaggaatctgaaagggtggagataaatgtggagttgcagaaggaggaagcagttgaggctaataaggcaagcargcttgaatcagaaggsgtggaggtaaatgtggaattgcagaaggaggaagcaatagaggtgaatgaggcaaggagtcaggcagttccgatagttggaaatcatgttgatgatgataatgaattggcagatggatcaatgggggsaggtggagaagagcgtacaacggatgctcaattagcatccatggaagaaagggaggtgtttgagaaattagttggacgcaatccagaggttgttcagttcgaggatgttagcaattctaagctagcagttgttgatggaggagtaacatacaatggcatcatcgatgcaatgggtgaggagccaaagaaggatgagcacatagggatcgacatcaacgccatgtgctacataccggaggatatgaagtttctcaggtgccccttgatttgcttctacgccgttgagtggcagctcatccatcgcgtgctaaggcagttcggcttgcgtcaacccataccaaaaccattcccgacggggctcgacctccacaagttggacaacaagaagaacaagaagattacggactggcatgctcatcatctccatcttattgagcggtgggacaacacagcagctaacgtagtgcctcacggagtggagcacaacaagacatacttcgacgagtacctagcttggctcctaaggaactaccgccttttcctttggccggcatggactctagctgacatagctacagatcccgaggatgttgaggagatgaacgagcacaggctaaaacaacgaagttggatgttagcggcaagacttggttgtaggtccacagacgcagtcgacccacaaccaagactaacacggacacaggccggagaaacaagtcaacaaagagctaaagaggaaggggaggaagaacatgatgaaggggaggaagaacatgaggaaggggaagaaggagatggacagagtgacgaagaggaagaggaacaacccgaagaaatcgggtcatctcagcttgcaggtgccccgcagccatcgcaaccttcccagggtcgcccgcagagaaagagggtaccggtggaccgctactgcttgacctcagcgccaaatagaatggcgctgagattgtacaccgaaggaaacggccgtcacgcactcagcgccgatgcggtcggcgctgagatgttcaacctcagcgccatcggccctggcgctgaggtcggggtccagatctgtaattatgtacgatttgtttttataaatgaatcaacttttacattggaggccaccttttttaaatcaactagcacacgctccaacggtggcgatgagtcttcctcaccgccatcacctattgatacttggaccccacaaaggcctttgtaccataacggtatgtaccatttgttctacaagtacaacccgcatagcgcgctctgggacatcggcaacctctcctggggccactttgtctccggcgacctcctcaactgggccgctctcgacaccgcgctcgaccccacctcgccttttgacgccaatggctgctggtcgggctccgccaccatcctccccggcggcctcccggccatcctctacaccggcattgacgccggcaaggagcaggtgcagaacgtcgccttcgccaagaacccctccgatccgctcctccgtgagtgggagaagcccgcgtacaatccggtcatcgcgctcccgcccgacgtccccggcgacaacttccgcgacccctcgacggcgtggctcgggcgcgatggcctgtggcggatcgccgtctccgccgagaacggcgaggatggcctcgacacgtcgrcgaacggcgccggcggcgtgcgccacgtcctgaagctgagcgtgatggacacgctccaggactactacatggtcggcacgtacgacgacgcggcagacgccttctcgccggcggagcctgagcgcggcgacgactgccggagctggcggcggctggactacgggcacgtgtacgcgtccaagtcgttcttcgacgtgcgcaagaaccggcgcgttctgtgggcktgggcgaacgagtccgacagccaggccgacgacgtygcccgcggctggtccggcgtgcagacattcccgaggaagatgtggctagccaaggacggcaagcagctgctgcagtggccgatcgaggagatcaagacgctgaggaggaagcgcgccggtctctggcaaggcaccaggctaggcgccggcgcggtgcaggagatcgtcggcgtggcgagctcgcaggcggacgtggaggtggtgttcaagattccgagcctggaggaggccgagagggtggacgaccccaaccggctgctggatccccagaagctggtgttcaggcaccatgacaagtacaagcttcttatgtgcaccgacttgacaaagtcgtcgacaagagcaggggtgtacaagccggcttacggcggattcgtggacatggacatcgacgatcacaaaaccatatcgctgagaacgttgattgaccattcggtggtggagagcttcggcggcggcgggcgggcgtgcatcacggcgcgggtttacccggagcacgtggcgacgagcagcagccatttgtacgtgttcaacaacgggagcgacgmcgttaaggtggccaagctggaggcgtgggacctggcgacggcgaccgtcaacgttgttgttggagaccaccacggccttgytgcgccggcgttggagttggagccgacacgyacgacgcagtga

SEQ ID NO: 4679 - DNA, 2049 bp, Oryza sativa
atgaagtcaggccatggacaagcacttttcactgctgaatgttctcacatgtttcacttccactgcatctcctccagtgtgaaacatggaaattatgtatgcccagtttgtcgagcgaagtggaaagagataccctttaaccgctcgttatcttctattgtacctcgtggtagaagtgggttgaatgtgaatcaagctcgattaccccaacaaggcacctacatggctcttctacgccaggttccaagtcaccatcgagaagcttctggttcccatacttctgagccagttgatttcaatgacgatgaacctttgcagctgatagagtctggtgacagtcgtgatgctagatgcagtagagctgtggagatcaagacatatcctgaattctcagccattccacagtcgtcatctgaagatgattttgctgttttgatccatctaaaagccccttgtgctaacccagaacaagtcacaggcagaccattcaatgccacctcaattggataccctacatctcgcgctcctgttgatctggttactgtgcttgatgttagtggcagtatggcaggcaccaaactagcactcctaaaacgagccatgggttttgttattcaacaccttgggccttcggatcgcctttcagttattgctttctcatctactgccagaaggttgtttcatctccgacggatgtctcactctggcaggcagcaagccttgcaggctgtcaacttgcttggtgctggtggtggtacgaacattgctgatgcattgaagaaagctgccaaggttattgaggatcgcaattataagaatccagtctgcagcattattctgttatcagatggtcaagacacatacaatatttcctcaaatgttaggggaacccgtccagattataggtcacttgttccatcttccattctgaatcatactatctgcacagtgcctgtccatggctttggttttggtgcagatcatgattcagatgctctgcactcaattgctgagtcctctggtggtacattttcctttatcgaggatgaaagtgtgattcaggatgcatttgctcagtgcattggtgggcttcttagtgttgttgttcaggatatgcgactaactgtggaatgcgtgcatcctagtgttcagcttcatactatcaaatctggtagttacttgagtaaggtggctggagatggacgaaatggatcaattgaagttggtcatctttatgctgatgaggagagggacttcttactatctttgagcttcccacaatctcgtgatcagaccatgcttttgaaggttgcatgtgcctatagagattcagtaacgaatgaagccatcaagattcatgcagatgaggtaaaaatcctaaggccaaagtcacctacgtctgagccagtttgcatggaggttgatcgtgagaggaaccgtgtccgtgctgctgatgctattgaggctgcaagggcagcagctgagaggggtgctctttctgatgcagtggctattcttgagcattgtcggaggatactctcggaatctttttcaagaaagagtggggatcgcctgtgcatttcccttgatgcagagctaaaggagatgcaggataggatggctagccggcaacgatatgaagcttcggggagggcatatctgctatctggattgagctcacattcttggcagagagctacaacgcgtggtgactctacagacagtaccacacttgtttactcctatcaaacaccatccatggttcagatgctgcagcgctcacagaaccaatgcccttcacctccgggcctgaggccgcagctccgacaaactaggtcactcttggagaaaccccatccaaggatggcggtataccggaaatggggaggtgagcttggaggtaaatatgtttttgggggtatactggagaaagtgaatgggggcttggtgttattaattgctggtgttctgctgtcgccttgccgtgaattgcaagtattatccactacatgcacgtccttacttttccgaattggtcatatatgctga

SEQ ID NO: 4680 - DNA, 1824 bp, Oryza sativa
atgggcgcgtgcttctcatcccacactgcgaccgccgccgccgatggcgggagcgggaagcggcagcagcggaagggggatcacaaggggaagctccccgatggcggcggcggcgagaaggagaaggaggcggcgcgggtggagttcgggtacgagagggacttcgaggggaggtaccaggtcgggaggctgctcggccacggccagttcggctacaccttcgccgccaccgaccgggcctccggtgaccgcgtcgccgtcaagcgcatcgacaaggccaagatacctcctctaggtgttcatagtgtaactagattttctcttgataagaccagtcaggaaagccaactggtgttgcggtatctgcaaagcagtcaggatcacccaccagacctgacaggacttggggcattgcaccagaatgtggtcaatggtctccacttcttgatcgcagaagaggcaattccacctatggttcgccctgttgctgtggaggatgtaaagagagaagtgaagattcttaaagaacttaaaggccatgagaatattgttcacttctacaatgcgtttgaagatgactcatatgtatatattgtgatggaactatgtgagggtggtgaactattggaccggattttggcaaatttccattcccgtacagcttctagggccataaggccattacttactggcaccttccattttgtcagaaagaacagccgttatagtgagaaagatgctgcagtggtggtgcggcagatgctcaaagtggcagctgagtgccatctgcatgggctagttcaccgagatatgaagcccgagaacttccttttcaaatcaaccaaggaggactcacctttaaaggcaacagattttggtctgtcagacttcataaaaccagggaaaaagtttcacgatatagttggcagtgcctattatgtagcaccagaagttttaaaacgacggtctggccctgagtcagatgtttggagcataggagtcataacttatattttgctctgtgggagacgccctttttggaataagacagaggatggcatattcagagaggtactaagaaacaagcctgattttcgtaagaagccttggccaggcatcagttcaggtgctaaagatttcgttaaaaagttacttgtaaagaacccaagggcaagattaaccgctgctcaagctctctcgcatccatgggtaagagaaggaggagaagcatctgagatccctgttgatatatctgtattgtccaacatgcgtcagtttgtcaagtacagccgttttaagcaatttgctctgagggctttagcaagtacactaaaagaggaagaactagcagatctgaaggaccagttcgatgcaattgatgttgataaaagtggatcaattagtattgaggaaatgcggcatgcccttgcaaaggatcttccttggagattgaagggcccccgtgttctcgagattatccaagcaatcgacagcaacactgatggtcttgtggactttgaagagtttgtagcagcaaccctccatatacatcaaatggctgagcttgactctgaaaggtggggcctacgctgccaggctgctttcagcaaatttgatctggatggtgacggatacatcactccagatgaactcagaatggtgcagcacactggcttgaagggttccatcgagccattgctggaggaggccgacatcgacaaagacgggagaataagcttgtcggagttccgcaagctcctgcggacagcgagcatgagcaaccttcccagtccaagaggacctccaaatccacaacccctgtga

SEQ ID NO: 4681 - DNA, 1776 bp, Oryza sativa
atgaagcggcacaacgcggcggaggtgccggtgccggtgagctacggcggcgagcgggatgagaagaccggaagcaaggtggataagatgggtggtggagcggctaggcggtggcggagcggcggctgctgctcccgcctctggctcgtgctcgtcgtgttcgccaccgtcacgatgctgctgcgccaccgctacgactccggcctcggccatggtgccgccgccgtggtgcgcatcgagccggtgcaccggaaggtgaagccagccgatcgcggcggcgccaggccgtcgttctccgattccggcagcgcgaagccggtcaccgtcgaccacaagtcggcgacgaccgattcttctaccggaacggagtctgacggtggaggcgagccatcgtcggcgtcatcttcgctgccggcggcggcgcacccgttctcgcgcgcgctcgcggcggcgggcgacaagggcgaccggtgcggcgggcggtacgtgtacgtgcaggagctgcctccgcggttcaacaccgacatggtcaagaactgcgtggctctgttcccgtggaaagacatgtgcaagttcacggcgaacggcggcttcggcccgccgatgagcggcggcggcggcatgttccaggagaccgggtggtacaactccgacaagtacacggtggacatcatcttccacgagcggatgaggcggtacgagtgcctcaccgacgacccctccctggccgccgccgtgtacgtgccgttcttcgccggcctcgaggtgtggcgccacctctgggggttcaacgccaccgcgcgggacgccatggcgctggaggtggtggacatcatcacgtcgcggcccgagtggcgcgccatgggaggccgcgaccacttcttcaccgccggcctcatcacgtgggacttccggaggctggccgacggcgacgccggctgggggagcaagctgttcagccttccggcgataaagaacatgacggcgctcgtggtggaggcgagcccgtggcacctcaacgacgccgccatcccgttcccgacggcgttccacccggcgagcgacgaggccgtgttcgtctggcaggacaaggtccgccgcctcgagcgcccatggctcttctccttcgccggcgcggcgcgcccgggcagcgccaagtcgatccgttccgagctcatcacgcagtgcagggcgtcgagcgcgtgctcactcatggagtgccgcgacgggccgagcaacaagtgcggctcggcggcgagctacatgagactcttccagagctccaccttctgcctccagccgcagggcgactcgtacacgcgcaagtcggcgttcgacgccatgctcgccggctgcatcccggtgttcttccaccccggcacggcgtacgtccagtacacctggcacctgcccaggaaccacgccgactactccgtctacatctccgaggacgacgtgcgccgcaacgccagcatcgaggagcggctgcggcggatcgcgccggccgccgtggagcggatgagggagacggtcatctcgctcatcccgacggtggtgtacgcgcagccgtcgtcgaggctggacacgatgaaggacgcgttcgacgtggcggtggacgccatcgtcgacaaggtgacgaggctgcggcgcgacatcgtcgacggccgcggcgaggaggagaagctggagatgtacagctggaagtatccattgctgcgagaagggcagaaggtcgaggacccccatgagtgggatccattgttcgcgttcggttag

SEQ ID NO: 4682 - DNA, 1446 bp, Oryza sativa
atgagcaattcgacgtggcagccgtcgccgccgcagactccggcggcggcggcgtcgtcggcgtcggggattgacggcgtggagaacaagataagcccgagcatcgtgttcatcgtggccgtcttggcgatcgtgttcttcgtgtgcgggctgctgcacctgctggtgcggcacctgctgcggctgcaccggcagcggagggcgagggaggacgccgagagcgcgacggcgttcgaggggcagctgcagcagctgttccacctccacgacgccggcgtcgaccaggccttcatcgacgcgctcccggtgttcctgtaccggaacgtcgtcggcgtcggcggcgaggatggcaaggacccgttcgactgcgctgtctgcctgtgcgagttcgccgccgacgaccagctccggctgctgcccaagtgcagccacgcgttccacctcgagtgcatcgacacctggctcctctcccactccacctgcccgctctgccggaggagcctcctcgccgagctctcgccgacgtgcacccccgtcgtcatggtgctcgagtccgagagctcccgcgacatggtccacgccgccgacgatgagccagccgacgtcggtggcgaagacgcgccgggagcggaggaggtggtcgaggtgaagcttgggaagttcatgtgcgtcgaaggcaacgtcttcttcaacgtcaacgccatcgccggcgaaggggatagagccggcacgagcagcaacggcaatggcgacgccaatgccaaggctggtggtctcgggcaaagacggtgccattccatgggatcctacgagtacgtcatggacgcgcacgcctccctccgcgtgtccatcaagccgccgaggaagaagccggcggcggcggcctccaagtcgcgccgccgcggcgccatgtcggagtgcgagttcggcgcctccaagcgcggcgagtcctcgctccgcctgccgccgttccgcgcgacgccgcgcaagaaccccgacgacgacgcggccgcggccgccggcgcgaagctcgccaaggacagcttctccgtgtccaagatctggatggtgccgtccaagaaagagcccggcgccgccgccgagaggcgcgcggtgtcgttccggtggccggcggcgaaggactgggacgtcgaggccgggagctgcggcgggaacagccccgtktcgtcggtggcggcggaggagcggccgttgtttgcgaggaggacgctgctttggccggtgacggtgaagttaggcaccggtgatgaggagcgtagaaatgtccatggcctcgtcgccacgaacggcatggcaccgagcgttttcgtcgccgccgtttttgggatctcggtcgtcggtgcggtcgtcgatctccggtcgtcacgaggcccagttgagcggctttcattgggcttggcctatttgtgtgagagctcgacttga

SEQ ID NO: 4683 - DNA, 2450 bp, Oryza sativa
atgtcggcggcgtcgccggcctcgcccacgtcgccgtccacgccggcccccgcgcggagggtggtcgtgtcgcaccgcctcccgctccgcgccgcggccgacgcggcgtcgccgttcgggttctccttcacggttgactcggacgccgtcgcgtaccagctccgctcggggctgccccccggcgcgcccgtcctccacatcggcacgctcccgccgcccgcaaccgaggcggcctccgacgagctctgcaactacttgctggcgaacttctcttgcctgccggtgtacttgcccgccgatctccaccgccgattctaccatggattctgcaagcactacctgtggcctctcctccattaccttctgccgctcacgccgtcgtcgctgggcgggttgccgttcgaccgcgcgctctaccattctttcctctcggcgaaccgggccttcgccgaccgcctcaccgaggtgctcagccccgacgacgacctcgtctggatccacgattaccacctccttgccctccccaccttcctccgcaagcgattcccgcgcgccaaggtcggtttcttcctccactcgccgttcccctcctcggagatcttccgcaccattcccgtcagggaggacctcctccgcgccctcctcaacgccgacctcgtcggcttccacaccttcgactacgcgcgccacttcctctccgcctgctcgcggctgctcggcctggattaccagtccaagcgcggctacatcggcatcgagtactatggtcgcaccgtcacggtcaagattctgcccgtcgggatcgacatgggccagctgaggtcggtggtgtcggcgccggagacgggggacctggtgcggcggctcaccgagtcgtacaaggggcggcgcctgatggtcggcgtcgacgacgtcgacctgttcaagggaatcgggctcaagttcctggcgatggagcagctgctggtggagcacccggagctgcgcggccgcgcggtgctcgtgcagatcgcgaacccggcgcgcagcgaggggcgcgacatccaggaggttcagggagaagccagggcgatcagcgcccgcgtcaatgcgcggttcggcacgccggggtacacccctatcgtgctgatcgaccgcggtgtgtcggtgcacgagaaggcggcgtactacgcggcggccgagtgctgcgtggtgagcgccgtgcgggacggcctcaaccggataccctacatctacacggtgtgccggcaggagagcactggcctggatgatgcggccaagcgcagcgtcattgtgctgtcggagttcgtcgggtgctccccgtcgctcagcggcgcaatccgggtcaacccatggagtgtggagtctatggcagaggccatgaatgcagccctgaggatgcctgagccagagcagcggctgcgacatgagaagcactacaagtatgtgagcacccatgatgttgcctactgggcgaaatctttcgaccaggacctgcagcgagcttgcaaggatcatttctcgcggcggcattggggtattgggtttgggatgagtttcaaggtggtggcacttggcccgaatttcaggcggctgtctgtcgatcacattgtgccgtcataccggaagtctgataatcgcttaattctcttggactatgatggcacagtgatgccagagggttcaattgataaggcaccgagcaatgaggtcatctctgtattgaatcgtctgtgcgaggaccccaagaacagagtgttcatcgtgagcggtagagggaaggatgaacttggcagatggtttgcaccttgtgagaagctggggattgctgcagagcatggttacttcacaaggtggagcagggactcagcttgggagacctgcgggttggccgtggactttgattggaagaagactgcagaaccagtgatgaggctttacaaggaggcaacagatggttcaaccatcgaagacaaggaaagcgcgttagtttggcaccacgatgaggcagatccagattttggttcatgccaggcaaaggaactgcttgaccacctcgaaaacgttcttgcaaatgaaccagtcgttgttaagaggggccagcatatcgtcgaagtaaatccacagggcatcagcaaaggtgtggttgtggacaacctcttgtcatccatggtgagccgagggaaggcgcccgatttcgtgctgtgcattggggacgaccggtcggacgaggacatgttcgagagcatcgtttgcccgtcgaacagcagcgtcaagctcccggcgagcagcgaggtgttcgcctgcacggtcggcaagaagccgagcatggccaagtactacctcgacgacacggtcgacgtgatcaagatgctgcagggtctcgccaatgcgccatcgcagcggccaaggcaagtgcagctgcgggtctcgttcgaaggctcactgtg

SEQ ID NO: 4684 - DNA, 1197 bp, Oryza sativa
atgcctggagcaactaccgccgctattggtgacaaccgccgtggcacacagcattcggaaggtcctgcaacgatcctcgccattggcactgcaaacccagaaaacatcgtgtgtcaggataactttgctgactactactttggtctaaccaagagcgagcatcttactgagctcaaggataagatgaagaggatatgtcacaaatctggtatagaaaagcgctacatccaccttgacgcggagcttataagtgcccacccagagatcattgacaaacactcgccctcccttgaaactcgtgtagacatcgtggctaccgaggtccccaagctcgccgagtccgctgcgcggaaagccattgctgagtggggccgtccggccactgacatcacccaccttattttcagcacctactcaggctgtcgtgcacctagtgccgacctccagttggcttcattgctcaaactacgcccttccgtttctcgcaccattctcagtctccacggttgctcaggtggtggcagggcactccaactcgcaaaggagatcgccgagaataaccgcggtgcgcgtgtcctcgtagcttgctccgagctgacactgatatgcttctctaccccggacgaaagcaaaatcattggccatggactgttcggggatggtgctggtgcagtcattgtcggtgccgacccctcggccgatggtgagcgcccgctattcgagatggttgccgcctcgcaaaccatgataccaggaaccgagcacgcactcggcatgcaggccactagcagtggcatagattttcacctctctatccaggtgccgacgctgataaaggacaacatccatcagtgcttgcttgatgcgttccgatctatcggaaacacagatcctaactggaacgacctcttctgggcagtgcaccctggcggtcgcgcaatccttgataacatagaggacaagctccaactacagccatggaagcttgcggcgagccgccaagtgctgagtgaatatgggaacatgagtggtgcaacaatcgcattcgttcttgatgaactacgccgccgtcgggagaaggaacaagacatgcagcaacagcctgagtggggagtgttgctggcctttggacctggaatcacaatagagtcaatcgtgctgcgtaatccactctcacgtggtttgaaggaaaattaa

SEQ ID NO: 4685 - DNA, 903 bp, Oryza sativa
atgccacaggttgacctggagagcttggtgtgcggcgtggcgggcgccggagcgggcgacaggaaggtgtcgtgcgagacggtcatcgcggcgggggagagcggggacgcgtcgccgccgcggatgccgccwccgccgccgccgccggaccccgacttcccgccggagtcgataaccatccccatcggcgacgaggtggccttctcggagctgaacccgatatacgaccgggacgactccaccaagggaagcaccaaccccaagtcggcggccggcgcctcctccaaccccatcccggccaagtcgcgctccaactccacgcgcatcgcgggcgcccccgccgccgccaccacgttcttcggcctccccgcgagcatccgcccggcgttcacccggcgccgcccgtcgcagggccggatcttgcccgacaagcgctcgggcagccgcggcggcggcgtcggcggcagcagccgcaggggcgacggcgaggaggagccgcggtcgcccaaggtgtcctgcattggcaaggtgctttccgaccgggagaggtacggccgcagccggggccggagatggtggcgcgggttggtggccgtgctcctctgcggcggcggctgctcttgccaaggaggaggacgacgacacgccaggaagaaggtggcgttggatgaagaccaccacgacggggacgacgacaagcaggccggcatcgcggcaatgcggaggttcaagtccgggagacgaaccgcctcatgggtagaggaggcaatagcggcggcggaggccgccggcgaggaggagcagcagcaggagaacgacgccgccgccgacgacgacgagaagaagcaggaggtcgagcgctacgagcctacgacactgaacagtgggccccacgacaggtaa

SEQ ID NO: 4686 - DNA, 1308 bp, Oryza sativa
atggagctctgcgtccgcgcctcctcgcttctgctcggcctcctgctccagctcctttcctcagtggacgtggtgtcggcggcgcagaaatttggtatcaactatggccagatcgccaacaacctgccggacccgacgcaggtggccggcctcctccagtcgctgaacgtgaacaaggtgaagctctacgacgcggaccccaaggtgctgatggcattcgccaacaccggcgtcgagttcatcatcgccatcgggaacgagaacctgcagtccatggccggcaaccccggcgccgccaggcagtgggtgacgcagcacgtgcagcccttcctaccggccacgcgaatcacctgcatcaccgtcggcaacgaggtgttctccggcaacgacaccggcatgatggccagcctcctgcccgccatgaaggcgatctacgccgcggtcggcgaactcggcctcggcggccaggtgaccgtgtcgtcggcgcactcggtgaacgtgctcgccaccagcttcccgccgtcgtccggcgcgttccgggaggacctcgcgcagtacatccagccgctgctcgacttccacgggcagacgaactcgccgttcctgatcaacgcgtacccgttcttcgcgtacaaggcgagccccgggagcgtgtcgctgccgtacgtgctgttcgagcccaaccccggcgtgcgcgacccaaacaccaacctctcctacgacaacatgctgtacgcgcagatcgacgccgtgtacgcggccatgaaggccatggggcacacggacatcggcgtgaggatctccgagaccgggtggccgtccaagggggacgaggacgaggccggcgccaccgtggagaacgccgcggcgtacaacggcaacctgatgcagcggatcgccatgaaccaggggacaccgctcaagcccaacgtgcccatcgacgtgttcgtgttcgcgctgttcaacgaggacatgaaacccgggccgacctcggagcgtaactacggtctcttctaccccaacggctcgccggtctacgccatcaacaccggcgccggtggcgtgtcagggcggacggggccgttcgacccgtactcggcgcagatgttctcgtcggcgtccagattggcgcagtctctgagttgtcatttcattcagagccggccgattgcatgtgttcgtcctgacagcaaggtcccttcaggctttgagagctccttccaaaccaacggcaaccagccactgtcgagaaccatcgaaagctttcctcgagtcaccaccattgctgctacaatccaaatagagtag

SEQ ID NO: 4687 - DNA, 1362 bp, Oryza sativa
atgatggaggaggggttggcggtggcggatctacgggagctagtgcatctgccggatgttctggtggtatgcacttctgttggatggacaaatgaaaaacacatgctctatcttagtttattggaagaatcatttgtaagccaattacatgacagtaaatacagtttcaaggaactgtttaatcactctccaggtgcttgtatacatgaactatcatcgaagggacatgttaaaaatgtggaggctgagcaggaacatatggatgtagatgaagttgacagagctgaatcttggataaagattgaacatgtcagatcaccttctgaaaatcaagatgacgtaaaagtgtgtttttcagatgataatgcatcaagtaccaggctgattcaagagtgctatgcaagggcaacaagctctggacaatcttccacgtgccatttaggcaagaacagacattccccttctaggagtgcagattatgagtgccaaaagttagtctgtttcatttacatgagtgacatggccagatttttacaagagaactactcatgcatttccgtagagggttcagatcaaaacttcattgatgaggagacaaaaggaagtggagaaccaaatggacgatgcagcaaaaagcgactgaagtctactgctaatacgatggacgatcaagtggttccatttgtgaaggcagagttacaggaagcaagagaaaaggatgcagatatccatgacaactcaatggaagcggatgctaaaggatccgtcgacgtagggttcgtctctggcctctttgggggagatggagaccacgggggagaaggtgaatccctgcgctttcgttccgtgggggcgtctactgtcaagggacagaccaggagggagaggcctagaggagctcgccctcatggattgacgaagcagaagaggcaggaaataaaggaggcgtttgatctgttcgacacagataactctggaaccattgatgccaaagagttgaatgttgccatgagagccttgggatttgagatgacagaagaacaaattaaccagatgattgctgatgtggacaaagatggtagtggatccatagattatgaggagtttgagcatatgatgactgctaagattggagagagagacagtaaagaagaacttacgaaagcattcagtattatcgaccaagataaaaatgggaagatatcagatgttgatattcagcgaattgccaaggaattaggtgaaaacttcacttatcaagagattcaagaaatggtgcaagaggcagatcgaaatggtgatggtgagatagattttgatgagttcattaggatgatgaggaggactggatatggttactag

SEQ ID NO: 4688 - DNA, 783 bp, Oryza sativa
atgttccccatctacgtgatggggagctcgcgggccagctccgccgcggcggcccggggcatagtcgacgccgccggggaccccatatgggaggccgtcaagtcggaggccaagtctgaggcagagaaggaacctattttaagtagcttcttgtacgccagcgtactatctcatgactgtctcgagagggcgttgagtttcgtccttgcaaacaggctcgaagatccaacattgcttgcaactcagttaatagacattttcaatgatgttatgatgaacaacaaagatatacgccgttctattcgccttgatgctcaggcctttaaagacagagatcctgcctgtgcacaatacagttgggcattgttgtacctcaagggttaccattccgtgcaatcctataggatagctcatgtattatggaatcaaggtcgtaaagttctggcattggcactgcagagccgtatcagtgaggtttttgcagtggatatacacccagcggccagaattggagagggaatattgttggatcatggaacgggtctagttattggtgaaactgccattgttggaaactgggtttcattaatgcagggtgttacacttggtggtactggcaaggaaaatggagatagacaccccaagattggtcagggggctcttcttggagctggtgctactatcctcggcaacataaacgtaggcgaaggtgccatgattgctgctggttcccttgttttaaaggatgtacctccccacagaaacaatcatttacagatatga

SEQ ID NO: 4689 - DNA, 1266 bp, Oryza sativa
atggaggaagcaaacagggaggcagtgcagagctgtcacagggtgctcaccctcctctccagcccccatagccagcttgtccctaacaaggatctcgcggcggctacgggagaggctgttgcaaagttctgctccgtggcatccaggctgaacaatggcaatggcctccagggccatgcccgggttagaaagatcaagaagcccttgcctatctttgatagcaacctctttttggagagccctgcactggctgtggcgatggcagccaagacacctaactcgagtccgatcactagcctccagctgtttccgaggtaccatcagatggagggctcttcttcaaaggatcctgttaggatccctgcccaattccccaaaaggttgcttctagataaccctgcggttgattcggatgggccatcacgggggccaccgctccagctcatccagccggtgtctgttgcgcccccagctggaacgcctcacccggcattgccttcggcgcatcttcatttcatccagcagcatcagagctaccagaggtttcagctcatgcagcagatgaagatgcagagtgagatgataaagaggagtggccttggtgaacagggtggtagcaatggtggtggtaagggtgttaatctcaagtttgacagttctaattgcacggcatcatcctcccgttcattcttgtcgtctctgagtatggaggggagcattgcgagtttggacggtagccgctccagtcgtccattccagctagttagtgggtcacagacgtcaagcactccagagttaggcctcatgcagaggaggaggtgcactggtagggaggatggtagtggacgatgcacaactgggagccgatgtcactgtgcgaagaaaaggaagctgaggataaggaggtctatcaaagtccctgcaatcagtaataaggttgctgacattccagctgatgagttctcatggaggaagtatggacagaagccaataaaaggatccccacatcctaggggttactataagtgtagcagtgtaagaggatgcccagccaggaagcatgttgagagaagtggcctccagggtgaatgtggcaaggctactgacaagcgcagtgacaggcaaccattcgtatccgttctactctgtccaaagtccaaaccgtgcaagtctgaaatggcctgtttccttgtagccactagcccactaggcaagcttgaactaatgccagatactcaaggcccaactgccccaagtactccataa

SEQ ID NO: 4690 - DNA, 1040 bp, Oryza sativa
atggcatcgccaccctcgctgctgcccagcgccggcgaggacgacgaatcccagcgagaagtttacgagcagctccgccagctcgtgtcgacctacccgaccgtgccgagcggcctcgacaccccgtactaccgccaccccgacggctggtacacgttcttgccggcgatggtcagcgtcatggtggcgcagcgccacttcaccgcccgcgacaccgacatcatcatcgccaccttccccaagtgtggcaccacctggctcaaggcgctcctcttcgcgaccgtccaccgcgacggcggcggcgccggcggcttggaggacgacgcggcgctcgcgcagctcagggcgcggaacccgcaccagctcgtcccgttcctcgagatccaggtgtacgtgcgcgacagggcgcccgacctgagctccctcccggcgccacggctcctcgcgacgcacatcccgcgcccgtccctgccggcctccgtcgccatctccggctgcaaggtggtgtacatgtgccgcgaccccaaggactgcctcgtgtcgctgtggcacttcctggacgcgcagcggccggagccacgcggcgacgtcggcgaggacttccgcctcttctgcgacggcgtgtcgctggtcgggccgtactgggaccacgtgctggcttactggcggtggcacgtcgagcggccggggcaggtgctgttcatgacgtacgaggagctgagcggcgacacgctggggcagctgcgccgcctcgcggagttcgtcggccggccgttcaccggcgaggagcgggcggcccgggtggacgaggcgatcgtgaaggcgtgcagcttcgagagcctagcgggcgcggaggtgaacaggtcagggacgattgagctgatggaggagccgatgcggaacgccgagttcttccggcgaggcgtcgtcgggggctggccgaactacctgtcgccggagatggccacaaggatcgacgagattaccgagagcaagttcagaggctctggactggtgttgcccacgatgatgaccatgta

SEQ ID NO: 4691 - DNA, 1460 bp, Oryza sativa
atggagggscttggcttcttccggaggstcctccaggcggcgcttgcccctgtccgtgcccagtccagccttttcgccgcggcggccgccgccgcgcccgcgccggagaatgccttcgccgccgccccgaagatgccgccgttcgactacacgccgccgccgtacgacgggccgcgggcggaggagatctcccggaagcgggccgagttcctcagcccctccctcttccacttctacgaccgcccttgggcttaccgccacccgcggtttggcagttatcgcgattatcacaagtacctgttcgacgaggatggccgccgttacctggatgcttttggtggcattgcaaccgtttgttgcgggcactgccatccggatgttgttgaggcgatggtcaaccaagcaaagaggatacaacactccacagttctttacctgaatcatgctattgcagattttgccgaggcattggcagccaaaatgcctggtgatctgaaggttgttttcttcacaaattctggcacggaggcgaacgagcttgcactgatgattgcccggctttacactggttgccatgacattatttcactcaggaatggataccacgggaatgcggctggaacaatgggtgctaccgctcaatgcaactggaaatttaatgttgttcaggcaagtgttggtcctgttttcgcttacagcattagaggtgctttcggttctgatggcgaaaagtatccccgaaatkttcaggaaatcattgattttggaactacaggaagggtcggtggtttcatttcggaagccatacagggagtgggtggaatagtggaactggcaccaggatacttgcctgctgtgtacaatatggtaaggaaagctggcggcctctgcatcgccgacgaagttcaggcgggagtcgcacgaactggaagccacttctggggatttgaatcgcacggcgtcatcccagacatagttacaatggcaaagggtataggcaatggcataccgatcggagcagtcgtcacaacccctgagatcgctcaggtgttaacccgcaggagctacttcaacaccttcggtggcaaccctgtcagcacagccggtggccatgctgttctcaaggttctggagaaggagaagctccaggagaacgcatttgtggttggctcctacctgaaggaacggctcaacaagctgaaagagaagcatgacatcattggtgatgttagagggaaaggcttccttcttggggttgagctggtgaccgatcgccagaagaagacaccggccaaagttgagatcggtcatgtcatgaaccacatgaaagacatgggtgtgctggttgggaaaggtggtttctacgggaacgtgttcagagtaacacctccactatgcttcaccaaagaggactccgatttcttcattgaggcgatggacatttcactatcgaagctgtg

SEQ ID NO: 4692 - DNA, 1878 bp, Oryza sativa
atgtacccggtggtgacggggccgccgccggcgaggctgccggcgtcgacgcgggtggacaaggcgacgagccacctgctgcagggccccgactgggccatcaacctcgagatatgcgacaccctcaacgccgaccgctggcaaacaaaggatgtggtaaaagctgtgaagaagcggttgcaacataaagatccaagagttcagtttttcactttgacgttgttggagacaatgatgaagaactgtggtgaatatgtccattttgaagttgttgaacaacatattttgcaagaaatggttagaattgtccagaagaagcatgatactcaagtgagggataaagtattgatacttctggactcatggcaagaagcatttggtggacctggaggcaaatatccacagtattactggtcatacattgaacttaagaggtcaggaataatgtttcccaggcgccctgtagatgctcctccaatatttactccccctgcaacacatcatactcagtcttatggttcacctacatatcctgctggaagtctaaatgagagaatgacatccgatgttgaaactctgagtttaggggacttaaataatattagagatacaacagaacttctgtgtgatatggtgaatgctttgaatccttctgatcgcatggctgttaaagatgaaattatttcagagcttgtcacccaatgccgatcaaatcaacaaaagctcatgcgatttgtcagttccacaggaaatgaggagctactgaagcaaggcctagaaatcaatgatcacttacagagcgtacttgcaaaacatgatgccattgcttctggagctcctttgccggtcgaaacaccaaggaaagacgagatacccagagaagatccaaaaataaagccatctgcacctccgattgcacctccatccgcacctccagttgaagaggatgaagatgacgagttcgctcagatagcaagaagaaaaaacaaatctgtgataagtagtgatgaggcatcatccagtgctggtgatcaggcccttgtacccgttgacccagtaacttctgaagcctcatcttctgttgcaagcaatgcagtggtgcctgttgactcgtctcctgccagtggtactcggacaagagagcaggacatgatcgaccttctaagcctcaccctgtacagcccccctgaagcatctacagattcttcttcacagacccaaaatggcacgcagcagtctgtcacgtcaaatgggccagaattaccaccaaactatcagcctgctgcatcaaatggatcacattactcttctaaccagcaggcatatccaacgaatcaagcttacaccccatacaacaattatgttgtaccttgggcccaagctggacagggcacacaggctggaggagcatatcaaactcagcccatgcaacaatatggatctagctacccagcaccaccatgggcgatgccagcaagtgtcaactcaaccaatccttttcagcctgcaacataccagatgcagaaccctcctgttgcttctgttgcccccacaaatacctatccagctccttcatcgccgtatgctgctccgccaaggcaacaagtgccatctcctgcaaccaaaccgatgcaacagtacaactcctttgtttctcaaacaagaagtggtccggcaatggctcaagatgttagaatgaatggtaatccacggccatcagaaactacagcggctgcggccaaaccatactacatgccagacaatttgtttggtgatttgattgatgtgaagagttatggtggaggcaagatgagtagaacggcgagcatgcctagtccaaatggcagtggccaacctttgctgggtgggaagaaatag

SEQ ID NO: 4693 - DNA, 1173 bp, Oryza sativa
atgcaatccctcctctcctcctcggtgctcgccaacccatgcaccaccggctccccgctcttcccgccgaccgctgctaagctcgccgccgctgcctcggtcccggtggccgcggcggcgaggagtggcgccattgctgccgtgtcgaggagatcggccagtggcggccggtgcgtggtggcggctgcgtcgtcgtcgtccccggcggtgaccacggcggaggccggcgaggtgcccgcgacgatgaaggcgtgggcgtacgacgattacggggacggcagcgtgctcaagctcaacgacgccgcggcggtgccggacatcgccgacgaccaggtgctggtgcgcgtcgccgccgccgcgctcaaccccgtcgacgccaagcgccgcgccggcaagttcaaggccaccgactcccctctcccgacggtgccggggtacgacgtggccggcgtggtggtgaaggccgggaggaaggtgaaggggctgaaggaaggggacgaggtgtacggcaacatcagcgagaaggcgctggaggggcccaagcagtcggggtcgctggcggagtacaccgccgtggaggagaagctgctggcgctcaagcccaagagcctcggcttcgcgcaggccgccgggctgccgctcgccatcgagaccgcccacgagggcctcgagcgcgccggcttctccgccggcaagtccatcctcatcctcggcggcgccggcggcgtcggctccctcgccatccagctggccaagcacgtgtacggcgcgtccaaggtggcggcgacggcgagcacgcccaagctggagctcctcaagagcctcggcgccgacgtcgccatcgactacaccaaggagaacttcgaggacctgccggacaagtacgacgtcgtcctcgacgccgtcggccagggcgagaaggccgtcaaggtggtgaaggaagggggcagcgtggtggtgctcaccggcgccgtcgtgccgccggggttccggttcgtggtcacctccgacgggtcggtgttggagaagctcaacccatacctggagtccgggaaggtgaagccgctggtggaccccaaggggccattcgccttctcacaggttgtggaggccttctcctacctcgagacagggagagccaccgggaaagttgtcatctcacccattccatga

SEQ ID NO: 4694 - DNA, 1365 bp, Oryza sativa
atggagcgcgttattgggggcaagtttaagctcgggaagaagatcgggagtggatccttcggggagctctatctcgccgtgaacatacagaatagcgaagaggtggccgtcaaactggagtctgtgaaatcaaggcatcctcagctacactatgaatcaaaactatatatgcttttgcaaggaggaactgggattccacatcttaagtggtttggggttgagggggagtacaatgtaatggtgatcgatcttcttggcccaagtcttgaggacctatttaactactgcaacagaaagctctctcttaaatcagtgcttatgcttgctgatcagatgattgctagagtagagtacatgcacacgagaggattccttcatcgtgatattaagccagacaatttccttatgggtttgggtcgtaaagcaaatcaggtttatgtcatcgattatgggcttgcgaaaaagtaccgagatctccaaacacataagcacataccttatagggaaaacaaaaatctaactggaactgcacgatatgctagtgttaatacacatcttggagttgaacaaagcaggagagatgatttggaatctctcggttatgtactgatgtacttcttaagaggaagtcttccttggcaaggtctgaaagctggtacaaagaagcaaaagtatgatagaatcagtgaaaagaagatgctgaccccagttgaggtcctctgtaaatcttatccatcagaatttgtttcatacttccattattgccgatcactacggtttgaagataagccagactattcctatttgaagaagctcttccgagacttatttatccgtgaagggtaccaacttgattatgtatttgactggaccatgttgaagtatcctcaaattagagataacaaactacgacctagtgggaagacaagtgggttggtgggtcgttctgcagaacggactgaaagaactacaggtgaagctcttgctagaagaactggctctggttctggccgaaatggagaacccactaagcacagaactctactggactcactgatgtcatctaaggctaccgctgatacagataaaacaaggccgacatcactgtcgcggaacgggagcacgtcaagacgggctgttgtttcgtcgagcaaaccgaattgtggagatcccagtgacaccaatcgcacaagccgcctattctcaagtagcagcagccggccatccgctgcccaaagggcgcttcagtcggccggagctgagctgaggtcctcgtcgttgtccaagacgcgtaagagctcacgtgatgatcccaccatacggagcttcgagatgctctcactcagcgctgacaggaggaaataa

SEQ ID NO: 4695 - DNA, 2649 bp, Oryza sativa
atggaggccatggacgagctcgtccagctcgccgagtccatgcgccaggccgcctccctcctggccgacgaagacccctccgacgaggccagcccgcgccgcccctccaccttcctcaaacgccgtcgcgctcggcaacgtcggcgccggcaagtcggccgtgctcaacagcctcatcggccaccccgtgctgctttgggtggtggttgctgtgtggtgatgcagccgacgggtgagaacggggcgacgcgggcgccgatagtggtcgacctgcagagggatccggggctgagcagcaaatccatcgtcctgcagatcgacagcaagtcgcagcaggtgtcggcaagtgctctccgccattcgctgcaggacaggctgagcaagggggcgtccggtggatcagggaaaggccgaaacgatgagatttacctcaagctgcggacaagtacaggtttgttgctgggcttcacttttactcttacattgcacaatgttgctcctccaataaaattggtcgatttgcctggcatagaccaacgagttatggatgattcaactatcagtgaatatgctggacataatgatgcaatattgattgttgtgataccagcaatgcaagctgctgatgttgcatcatctcgagctctcagactagcgaaggatattgatccagatgggcaatctgtctcaattgcatcggcccaagctggatcagttggttctgagaactcactggaaactgcctggcaggctgaagcggagacactcaaatccatcctaactggagctcctcgaagtaagctagggagaattgctctcgtggataccattgctaagcagatacgtaaaaggatgaaaattcggctacctaaccttttgtccgggcttcaggggaagtctcagatagtgcaaaatgaacttgcaaggttgggagaacagatggtatcaagcgctgaaggaaccagggctgttgctttggagctttgccgtgaattcgaagacaagtttcttgcccatgttacttctggtgaggggtctggttggaaaattgttgcaagctttgaggggaagtttccagataggatcaaacagcttcctttggacaggcattttgatattaacaatgtcaaaaggattgtcctggaagccgatggttatcaaccatatttgatatctccagagaaaggtttaaaatccttaataaaaggagtacttgaaatggcaaaggagccatcacggctgtgtgttgaagaggtacaccgtgtattattggacatagtaaatgcttctgcaaatgctacaccaggacttggaagatatcctccattcaaacgcgaggtcgttgaaattgcaaccaatgcattggatgtcttcaaaagtgatgcaaaaaagatggtagttgcacttgttgatatggagcgtgcctttgtcccaccacaacacttcatccgtttagtacaaagaagaatggaaaggcaacgtcgtgaggatgaggtgaaaaacaggtcatctaagaaagcccaagatgcagaacagtccaacaagggctcaggcacaggatctgagcaatctggtggtgccttgaaatcgttgaaagaaaaattcagtcagcaagacaaagataaagatgcaaaagagggaccaaatttgcaggttgctgggcctggtggtgaaataactgcaggctaccttttgaagaaaagtgcaaaaaataatgaatggagcaaaagatggtttgtcctaaatgagaagagtggaaagcttgggtacaccaagaaacaagaggagagacattttcgaggtgttattgtcctggaggaatgtaatctggaagagatagaagaggaagagctttccaagagtttgaaggattcaaagaaggccaatggggcagagaaaggcccaagtcttgtatttaagattactaacagagttgcctacaaaactgtgctgaaatctcatagtgctgttatactgaaggccgagactattgctgacaaggttgaatggatgaagaagataagaggtgtcattcaaagcaaagggggttctgtgaagggtttaaatactcctgagggtggttccatgaggcaaagccattctgatgggtcccttgatacgatggcccggaagcctgctgatcctgaagaagaacttcggtggatgtctcaagaagttcgtggcaatcgtactttgccaagtggagaaagcaaaggaagatatgctaaatcagctctacagcaaaatagtgctcaaaccaatgcaaagattgaagaacttctccaagaggaccacaatgctaaacgtagacgggagaagtaccaaaaacaatcatctctattgtcaaagcttactcgtcagcttagtatccatgacaatagagcttctgttgcatcgtataccaatgatagttctggagctgagagtagcccacggacctctggccagtcaggtgaggactggaggtctgcgttcgattctgcatcaaatggctctgttgatcgatccagttcacacaatgaaacaaggtcaagaagtgctgacagccgtggcaaacgctatgaaaatggggacgtgaatggtggtaactctggcagccgacgcacaccaaaccgtttgccaccagcacctccagggcaaaaatattaa

SEQ ID NO: 4696 - DNA, 650 bp, Oryza sativa
atggccacatgtgaacaagtgagaatatacaaggataaccacaacgtgatcaaccacgtgcagaaatattttttcaagataacggagatcatcggcacgtactgcacagaggtaagagagctagggttcaggctatacgaggcgatatcggagagccttggactggagggaggatacatgagggagacgttgggggagcaggagcagcacatggcggtgaactactacccacagtgcccggagccggagctcacctatggcctccccgcgcacaccgaccccaacgccctcaccatcctcctcatggacgaccaggtcgccggcctgcaggtcctcaacgacggcaagtggattgccgtcaacccgcaacccggtgctctcgtcatcaacattggcgaccaacttcaggcgctgagcaacgggaagtacaggagcgtgtggcaccgggcggtggtgaactccgacagggagaggatgtcggtggcgtcgttcctgtgcccgtgcaacagcgtggagctcggcccggccaagaagctcatcaccgacgactcgccggcggtgtaccggaactacacctacgacgagtactacaagaagttctggagcaggaaccttgaccaggagcactgcctcgagctgttcaggactta

SEQ ID NO: 4697 - DNA, 5540 bp, Oryza sativa
atgcgcccctgtgtcccgcggctcgggtcggctcggtacaggcggaagtgcagcggcggcgcctctcctggtgttggtgtcgatgcaaaaaggctacaggtcaagaaacaaagagatgcaaattgtgccactaaaaatctatttggcgggcaaacgggtaaagcaagcgacatattggtggagcatgccaatcgcaaggaaaaactctcatggacatgcagttgtggactgtggaaggccaccacgcaccacctaccaagcgcactatgccatggactaaactacgtgaactgtgccatgtggtatactactagtatatgtgtggctgcttcccctcccgatctacatcttgcttctatttcacaaagccatattcctgttgatagagttcactgtgaatctgccataccatccatgagcgggattggagggatgattgcgagttccgtggcgaatcgggtcgccagcaggctcagcgagcttgtggtggaggaggccactctgctgtggagattcaaggacgacgtggacgacatggaggagaagatgagagatctggaggctgtgatacaagatgttgatggcaaagcacgccagggaggaaaagatggagaggcggaacggcggtggctcaacaaactcaagtccgtcgcctacgacgttgaggacgtgctggatgagctcgatgctgctcagctcatcaagaaccatcaacccaagctcaagttattcctttcccggaacaatccgcttctccggaagatgaccatagcccgcaacatgaagaactcgagggagaaaatagtctcaataaaaaaggatagcattaagcttcatcatgtgcatcgtgaactagtggcagaagggagtagagacaatgaaacttttgcagatgatggtgacgtggacattggaatgctagggagggatgccgaaacaaaaaaaataatcaaccttctgttgaacactgaagctaaggaggatatctcaatcatcccaattgttgggcttggtggactagggaagactaccttagcccaagcagtttttgcagacaaaagggtcaatgtctttgatttgcgaatctgggtctatgtttccaaggagtttgacctgctcaaaattgggaaggctatcatcagaggagcaaacagaagtatcaacctggacaactgcaacttgcagtttgtaaacaataatctgaaaaaagaacttgccaacagaagatacttgattgttctagatgatctctgggaagaatatggagaaaatttggaaaagttgaagcagatgttacaacatggcggaaagggtagcaagattatagcaactacacgtagtggaagcgtagtgcaagtactatacactggttatcttgcaaatgaacggaaagtatgtccggtgcctgagcctgatcatatcaatttgggtgttttatcaccttacgactgctggagcgtcatgaagcggagagtatttgggcctgatgatggccaaaatggcttagaggaaattggaaggcaaattgccgagaagtgtggaggactaccactggtggcaaatgctctcgggcaagtaatgtctgaacataggacggttgaggcatggacagatataagggatagaaagattgttttggatttcaaagcagatcatcagcaagacactatagagcgcctaatgttgagctattactatatgaagcgagaattcaaaatgtgctttacatatttggcagccttttcgaagggtttcgtcatggacactgatcgcttgatccagcaatggatagcccttggatacattgaagcacgagataatggtcaaaggtgtgtcaactatcttttgcggatgtcctttcttcagatttccaagtcttccatggttagtccaatgcacaccaaagctccacgcaagctcaccatgcatgatttagtgcatgatctcgcaacaataattgctcctgatgaattccttgtcatggacgctaccatgccaaatacatggagcaaagctaataataagcgttattgccgacatgcacagttggtcaactaccagaagcaacccaagtttttcaaagatctaccaagcaaggttagaaccattcattttagggagtgcattggatcgcaacttccccgaaaggcattctctgggtcaaagtatatacggatcttggacctgagcggatgttcgtctgaagggcaatctatccctgttagtatggcgttgccatcctccattcgtcaactgatgctgctagcttatcttgatgtctcaggcttgccaattgcagcacttcctaaatatttgcatatgtttcagaatatgcaaactctaattctatccaattgctctcttgaaaccttgcctgctaatattggtaacctacacaagctttgttatctagacttatcagggaatagtgacctcagtaaacttccgacatcatttggaaaccttctcaaactttctctcctcagcctatctgggtgtactaaacttgaagaattgcctgaatcaatccacaaccttaaatgcttagaacaactagacatgtcaggttgttgtgctcttcaaaatctccctgatgaatttggcagcctttctaagctctcatttgtaaacttgacaagttgttcaaagctaaccaaactaccaggcaattttaaccttgagtctcttgagcatctaatcctttcagattgccatgagctagaaaacctaccagaagattttgggattctttatagactagaggttttggacctgtctgattgctacaagattccagtgttaccagaatccttctgccaacttaaacatttgaaagacctcaatctttcagactgccatggcctcaaacaactccctgaatgcttcggggacctttctgagctccagtttttgaacctcacaagctgttctaagctacagtcattaccccaatcattatgcaacatatttaagttgaagcatctcaatttgtcatattgtataaggattgaacatcttccgtctttgtttggtgaccttcaacttcaagtcttgaaccttacttgttgttatagtctgcgagacatgccagatagtatcagcgacatggctagcctcacgctgcttgatgttatttcaggaacaaaaggtgtgcttgataaggcttggtccattaaagagtgtctaaatttacctggccgtgaagaacatgatgtacatgagatagaaaatggagagtgttgcagtatagtggagcttgggaaactaagttgtcgtgcactgggaattcaacatcttgaaaatgttgagcggctggacaatgcaagggaagctaagttgcgtgatatgactgaccttcgggaactaactttgtcatggggacttggtggcacgagaaatgtggacaaggatgaagaggtgcttgagaacctattacctcctcgaactcttgaaagttttatgaatatgcccaccattagaaaaattggcagagaattctacgatggggaagggaattgcaagaaattaagaattatttggttagaacgaatggataacttcgaagaatggtggacaacgcggtcgggtgaagaagatagagagttcttaatccctaatttgcattttttgaaggcagttgactgcccaaagttgagtttcctcccgtatccccctagaagtatgcactggtcattggacaatagcgataaggtgttgccagaacgagggtttgggagccttgcatcttccactcttccttttcgtgtggtcatcaacaactgcaaatatccccctgacatgtgggtaagatttcaacatcttgccaccattgagatttttcaagttgaaggttgcagtgggctgaggacctttccagacatccttcaaagcttcgtctccctcagagagctatatttgtgctcgtgggagaacttggaaatattgcccgaatggctggggcagctcatttgcctagaagtcattgaattcatcaattgccctgtgttgactactctgcctacaagcttacaaaaccttacctctctgagggaactgttgttgcggggatgcaaagggctggagacacttcctgaagggatgggccggcttatttccttggagaagtttatcatcatggattgccccaagctgacttttctgcctgaaagcatgaagaacctaaccgcattgatagagctgcatttggatggatgcaaagggctagagacactaccagaagggctggggctactcatttctctgaaaaagtttgtcatcagcaattgtcccaagctgacttatctacctgaaagcatgaagaaactagccactctgatagagctgcggttggatggctgtaaacggctggagacactaccaaaatggttagggctgctcatttctctgaaaaaaattgtcatcaacaattaccctatgctaacttttctgcctgaaagtatgaagaacctaactgctatgaaagtgttgtatttgtatggatgcaaagagctagagatactgccagaagggctggggatgctcatttctctggaaaagtttgtcctcatcgattgccccaagctgacttttctacctgaaagcatgaagaacctaaccgctcttatagaactgcggttggatggatgcaaagggctagagatactgccagaagggttggggctgcttatttcccttgagaagtttatcatcaacaattgccccaagttgacttttctgcctgaaagtatgaagaacctaaccgctcttatagagctgtggttggatggatgcaaaggactagagatattgccagaagggctgggactgctcatttgcctagagaagtttatcatcatggattgcccaaaattgacttttctgcctgaaagcatgaagaacctaaccgctctgataaggctgctgttggatggatgcaaagggctggagatattgccagaatggttagggatgctcgtttccctagaggagtttatcatcatcgattgccctaagttgacttttctgcctagtagtatgaagaacctaaccgctataacagagttgcgtttggatggatgcaaaggattagagatactgccagaagggttggggctgcacattccactgaaaaggtttgtcattaacgattgccccatgctgactttcctgccagaattgcttggacatctcactgccctaaaatgccttgatatccaaagttctcccaatttgacatatttgcctgaaagcatgaagaatcttactgctcttgaagaactatggttggaagggttcaatagccttccggaatggatagggcagttcatttatctgaaagaaattagcatcttcgattcccccaacttgacatctttgccagagagcatatggaacattaccaccttagaattattatatatttatttttgtccaagactggctgaatggtgccaaagggaggatgctaacaagatatctcgcatcccaaagattatgttagatggtgaaatatttataccgggacaagcaatcgatggatg

SEQ ID NO: 4698 - DNA, 4557 bp, Oryza sativa
  misc_feature (1)...(4557): n = A,T,C or G
atgagcggggttggagagatgattgtgagttccgtggcgagacgggtcgccagcaagcttggcgacctcgcagtggaggaggccactctgctgtggaggttcaaggatgatgtgaatgacatgaaggagaagatgagagatctggttgctgtgatgcaagatgctgacgataaggtgcgccaagtaggaaaagatggagcagtggcacggcggtggctctccaaagttaagtccgtcgcctacgacgttgaggacgtgctggatgaattcgatgctgctcagctcatcaggaaccatcaatccaagctcaagttatacttttcctggaacaatccgctcctccagaaaatgaccatagcacgcaacatgaagaacttgagggataaaatagttgcaatagaaaaggatggcaagatgctcaatcttgtgcgtcatgaaccacatgcaaaagggagtagaagcaacgaaacttttactgtcagtgatgatatggagattggaatgctagggagggatgctgaaacagaaaaaataatcagccttctattgaaaactgaagccaaggaggatatctcaattattccaattgttgggcttggtggactagggaagacaaccttagcccaagcagtttttgcagacaaaagggtccgtgtctttgatatgaaaatctgggtttatgtttcagaggattttgatctgctcaaaattgggaaagctatcatcagaggagcaaacagaagtatcagcctagacaactgcaacttgcagtttgtacaagataatctgataaaagaacttgccaataggagatacttgattggtctagatgatctctgggaagaatatggagaaaatttggaaaagttgaagcagatgttacaacatggcggcaagggtagcaagattatagtaactacacgcaatggaagtgtagtgcaagtactacacactggttgtcttgcaaatcagcggaaaatatgccctgtgcatgaggccgatcatatcaatttggatgttttatcacctgatgactgctggaaggtgatgaagcaaagaatatttggacctgatgatgatcaaagtggcttagaggaaatcggaaggcaaattgctgggaggtgcgggggactaccactggtggctaatgctcttgggcaagtaatgtctgagcaaaggaccgttgaggcatggagagatataagagacagaaagattgttttggatttcatagtagataatcggcgagacactttggaacgcgtcttgttgagctattactacatgaagccaaactacaaaatgtgctttacatgtcttgcatcattctcgaagggcttcgttgtggacagtgaccgcctgatcctgcaatggagcgcccttggatacattcaagcaaggcatactggtcaaagttgtattgattatcttctggggatgtcctttcttcagatttccaagtcttcatcagttagcccagtgcatgccaaagctccacgaaagctcaccatgcatgatttagtgtatgatcttgcaaaaataattgctgctgatgaagtccttgttatggatgccaacaaaccaacaacatgggacaaagctaatgagcattactgtcgacatgcacagttggtcaactaccataagcgaactgagatttttaaacatataccctgcaagatacgaaccctctgttttagagaatgtcctgaaatgcaacttccccgaaaagcattctctcaaaccagttacatacgtatattggacctgagtggattgtccaatgaagagcaatctactccaagcaatccagtcctgccatcttccattcgtcgactgatgttgctggggtatcttgatgtctcaggctttcctattatatccctccctaaatctttccacacacttcaaaatatgcagagtctaattctctccaattgctctcttgaaatattgcctgccaacattggtagcctccaaaaactttgttatttggacctatcaaggaatagtaaccttaataaactgccgtcatcagtcacagaccttgttgagctatattttctaaacctatctgggtgtgctaagcttgaagagttgcctgaatcaattaacaaccttaaatgcttacagcatctagacatatcaggttgttgtgctcttcaaaagctccctggtaaattcggtagccttgctaaactctcatttgtaaacttgtcaagttgttcaaagctaaccaaacttccagatagtcttaaccttgagtctctagagcacctaatcctctcagactgccatgagctagaacaactaccagaagatcttggtaatctttatagacttgaggttttggatatgtctgactgctacagggttcaagtgctaccaaaaaccttttgccaacttaagcatttgaaataccttaatctttcagactgccatgggctgatacaactccctgaatgctttggtgatctctctgagctccagtctttgaacctcacaagttgttctaagctacagtcattgccctggtcattatgcaacatgtttaatttgaagcatcttaatttgtcatattgcgtaagtcttgaaagtcttccatcttcacttggtgaccttcgtcttcaagtcctggatcttactggttgttataatatgcatggcttgccagatagtatcagtaatatgagtagtctcaccctgcttaacactgctacaggatcagaatgtgtgtttcataagactcaaattattaaaaaacatttaaatttgcctggcactgtagaacatgatgtgcatgagatagaaaatgctgatttcagcagtatagtggagcttgggagactgcgttgtcgtgagctggaagttagacatcttgaaaatgttgagcggctagaagatgctaggaaagctaacttgcgggatatggtggagcttcgttggttaaaattttcctgggaacttggtggcacaagaagtgtggacaaggataaattggtgctggagaacctcatacctcctcggactcttgaagagtttttgttggatgggtacatgtgcaaggatttcccatcctggttgactggcatatcctcctatctcccttatctcatgtgcattaggatctgtaatttagcaacatgtgattctcttcctgcatttggccagttgccaaacctaagacatttcaggatgaataacatgcccagcattaggagaattggcaaggaattctatggagaggaaggaaactgtaagaaattaagagttatttggttggaaagaatgactaacttggaagagtggtggacaacacggtccggtaaagaagatgaagagttcttaatccctaatttacatgttttgaagctggctcctgctcttagaatactagaattggggttttgggaggacttggaaatgttgccagaatggttggggcagcacgtttcccttgaatacattaccatcattaattgtcccaagctaacatctctgcctaaaagcttactgaaccttaccgctttaagagaactgcggttgaagggatgcgaagggctggagacgctaccagaatggctgaggcttctcagaactgccaagaacacggcagagtgtgggcattcttctcaggacagagaactaaacaagagaggcaagacgaagaaaagctctacatgcatgtctattccagtgatttctgaatatgctgccatcttaagcgaattcgaacaggcctttgctctgggccgtttcgagaatcaacagattcttgtcctaaatggattggccattttccccttcgactatttgcaagcttctccatctcctgcaatccaagccttggtagctccgatcaccaaggacaccaagactgggctccacacgctctccatctccaacaagaactacctgcttgacctctccggacagctactgtggtcaccgtgctcaccctcccaccccaccgtcccgtgctcctccggcgagtgcgccgccgcgtcgggggcgcacaagtcctgcaacaacggaggacgcgcgtgcaccgcccgcccgacgaatccggtgacgggcgaacgcgccgtcggcgacctcacgctcgctgacatcgtcgccaacgccaccgacggcaagacgctgacctccgaggtcaccgtccggggcgtcgtctcgtcatgcgcgccgggcagcctcctcaggtcgttaccggccatggcggccggcgacgcgggcctcggccgtggcggggtgagcctgccgacccagctctactcgaagctgtcgcttaagcggcagttcgccgtctgcctgccgagcacggcggccgcgcccggcgtcgcgttcttcggcggcgggccgtacaacctgatgccgccgacgctgttcgacgcgagcaccgtcctctcctacaccgacctggcccggagcccgacgaacccctcggcgtacagcatcaagctccggggcatcgccatgaaccaagaggcggtccacctccctcccggcgcgctwagccgcggckgcggcttaacsctngaaaaggccgcsccgtaa

SEQ ID NO: 4699 - DNA, 1203 bp, Oryza sativa
atggcgtcaatgaagggagagaacgtcactgtatctgcagcagcagctcctcggatgaagaagctggcgagcatgctttgcatgaagggagggaacggcgatggcagctatctcaacaactcccaagctcaggctctgcacgcccggcgcatgcttcactttctggaggagacactggacgcgatgatggaacgttcgtccagcgacaagctcttcacggcggccgacctgggttgctcctgcggcagcaacagcctcttcatcgtcgacgtcatcgtccgccgcgtctccgaggcgtacgagtcccgcggccgcgacgcccccgagttccaggtcttcttctccgacctccccagcaacgacttcaacacgctgttccagctgctcccgccgctcctcgcgccggtggccggcagcctcgaggagtgcctcgccgcgggcgaaggcgcggcgacggcgacgcggccgtaccacgcggccggcgtccccgggacgttctacgggcgcctcttccccggcgagtccatcgacgtgttcacctccaccttctctttgcactggctctcgcaggtgccggaggaggtcggtgacagcgcgtcgccggcgtacaatggcgggcgggtgttcgtccaccgcgccacggaggccgtcgccgccgcgtacaagcgccagttccaggccgacctcgcccgcttcctgcgttcgcgggcgcgcgagatgaagcgcggcggcgccatgttcctcgcctgcctcggccggagctccggcgacccggccgaccaaggcggcgccggcctcctcttcggcacgcacttccaggacgcgtgggacgatctcgtccaggagggcgtggtcgagggggagaagagggacagcttcaacatcccggtktacgcgccgagcctgcaggagttccgcgacgtcgtgcgcgcggacggcgctttcgcgatcgacaggctcgagctggtgaggggagggagtccgctggtggtggaccggccggacgacgcggcggaggtcggccgcgccatggcgaacagctgcaaggccgtggccggggtgctcgtggacgcgcacatcggcgagcgccgcggcgcgcagctgttcgagcggctggagcggcgcgcggcgaggcacgcgagggagctcgtggagaagatgcacttcttccacgtggtttgctcgctctctctcgcgccataa

SEQ ID NO: 4700 - DNA, 1785 bp, Oryza sativa
atggcgttggctggattgcccctctccgtctttgccatcgctgtccatttttgccttgttttctcctcctcctcttctcctccggtttgccctgcaaacggccaccgtgaccgaacggcgtaccacttccaacccgccaagaactggcagaacgggcctgtgtactacaatggcatgtaccacctcttctaccagtacaacccgcacggcgcgctctgggacgtcggcaacctctcctgggggcactccgtctccggcgacctcgtgaactgggccgccctcgacaacgcgctcgatcccacagcgccattcgacgccaatggttgcgcgtcggggtcagtcaccatcctccccgacggcgtgcccgtcgtcatgtactccggcatcgamggcccgccgccggcaggtccagaacgtcgcgttccccaagaaccctygsgacccgsttcctccgcgagtggaccaagcccgggtacaacccggtcatccctgtccccgccgacgtctcgccggacaatttccgggaccccaccaccgcctggctcggcagcgacggcctgtggcggttcgccatctccgccgtggccgacggcgtgggcgcgacgctcgtgtaccggaagcgccgacttcctgcggtgggagcgcaacgcggcgccgctgcacgcctcgcgggacgcggtcatggccgagtgccccgacctgttccccgtcgccgagcacggcgaggacgggctcgacctcgacgcgtcggcgatcggcggcgccggcgccggcgtgaggcacgtcctcaaggtcagcatgccggacaccctcgaggactactacatggtcggacggtacgacgacgcggacgacacgttcaccgtgccgccggaggacctggaagcccacggcgatgactaccggcggtggcggcggatcgaccacggccacctgtacgcgtccaagacgttctacgacgcgggcaagaaacggcgcgtgctgtgggcgtgggtgaacgagtccgacagcgaggccgacgacgtcaccaagggctggtccggccttcagtcgtttccgcgggcggtgtggctggacgagggcgggaggcagctggtgcagtggccggtggaggagatcgagacgctgaggcggaaacgcggcgttctgctcggcggaaacgaggtggaggcgggcgggctgcgcgagatcggcggcatcgcgggctcgcaggcggacgtggaggtagcgttcgagatcgcgagcctcgcgggcgccgaccgcctcgagcccgaccatttgcgtgaccccgacgcgctgtgcggggagaatggcgcggcggtgcacggcggaatcggcccgttcgggctgctcgtcatggcatccggcgacctgcgcgagcgcaccgccgttttcttcagggtgttcaggctctcgcacgggtacacggtcctcatgtgcacggacctgacacggtcaacttcaagagcaggggtgtacaagccatcccacggaggattcgtggacatagacatagagaaggacagggctatatcgcttcgaaccctgatcgatcattcgatcgtggagagttttggcggtggggggcggacgtgcatgacggctcgagtgtaccctgaacatgtagcaacggggagcagccacctgtacgtgttcaacaatgcgtcagatgcggtgaaggtgtccaagctggaggcatgggagctcgcgacggctagtgtcaatgctggagacgacgggctgatttcgtatggtggtcctgtatgtgctgctcaagtgcagtaa

SEQ ID NO: 4701 - DNA, 666 bp, Oryza sativa
atggctaggccttctctcccgtgtgccgtcgtggccgtcctcctcctcgccctcctccccacgccgtccaccgccggcgaccctgacctgctccaggacatctgcgtcgctgacctcacctcagccgtgaaggtgaatgggttcgcgtgcaaggcggcggtgacggaggacgacttctacttcaaggggcttgccgccgccggcaacaccaacaacacgtacggctcggtggtgaccggcgccaacgtggagaagttgccggggctcaacaccctgggcgtgtccatgtcccggatcgactacgcccccggcggcctcaacccgccgcacacccacccgcgcgccaccgagatggtgttcgtcctgcagggcaccctcgacgtcggcttcatcaccaccgccaacaagctgtacaccaagaccatctctgccggcgacgtcttcgtcttcccgcgcggcctgctccacttccagaagaacaacggcgacacccccgccgccgtcatctccgccttcaacagccagctgcccggcacgcagtccctcgccatgacgctcttcgcggcgtcgccggaggtgcccgacggcgtgctcaccaaggccttccaggttggcaccaaggaggtggagaagatcaaatccaggcttgcacccaagaagagataa

SEQ ID NO: 4702 - DNA, 2007 bp, Oryza sativa
atggtggtggcggcggcggcgaggccgcagacggcggaggcgctgtcgaagcgggcgagcatgctgcgggactcgctgcagaggagccaggggaacacggacgggatggtcaccatcctcggatccttcgaccaccgcctctccgcgctcgaggccgccatgcgccccacccaggtgaggacgcacgcgatccggatggcgcacgagaacatcgacaagacgatcaaggccgccgatggcatcctctcccagttcgaccttgcgcgccgggctgaggcagcggtattgaagggtcctcatgaggatttagagagctacctggaggcagtggatctgctcaaaggcatcgttcgcttcttttccacaaacaagaacttcaagagcagtgaaggagttctgaatcatgtcaacaacctgttggctaagtctgctctgaaaattgaagaggaatttaggcagctgatgactacgtacagcaaacctattgagcctgatcgtctctttgattgtcttcccaagtctctgcggccaacaaaagatgatcctgacgctgatccagggaatgctggccactctgagcatccatccaaaagcttggagactgcagtataccggacaccaacactaattcctccaagaatcctgcctctcatgaatgacatcgctcagcagctcattcaggctggaaatcagcagtcatgctataaaatttacagagatacccgtggatctgcactagaatcgagccttcggaaattaggagtagagaagcttagtaaagaggatgtacagaagatgcagtgggaagctttggaggctaaaattggaaactggatccattttatgcgaattgcggtggggattcttctgagaataggtccatattgtgtatattcagaccttaagactcatattttgcttacgacacaggtcaaactactactagcaggtgaaagaaaaatctgtgaccagatttttgatggtgtcaactttaacaaggatcaatgttttgctgaactgacagcaaatagtgtcgtgactcttctaagctttggagatgccgttgctaaaagcaaaaggtctcctgaaaagttgtttgtattgctagacatgtacgaagtaatgcatgaacttcaacccgagattgaggtgattttcgaaggaaaatcatgctctgagatgcgggaggcttcattgggcttggctaagcgcttggctcagactgctcaagaaacctttgctgattttgaggaggctgttgaaaaggatgcttcgaagactattgttaatgatggaactgtgcatcctttgactagctatgtgattaattatgttaaattcttatttgattaccaatcgacactgaagctactatttcaggaatttgaaactggtagtgagacagaatctcaacttgctgttgttaccatgaggataatgcaagccctacaaaataacttggatggaaaatctaaacagtacagggatcctgcattgacctacttatttctgatgaataacattcattatatggtcagatctgttcgtagatcagaagcaaaggatatacttggtgatgactggattcagaggcaccgtagaattgtgcagcaaaatgccaatcagtataaacgtgttgcttgggcaaagattctccagactctttccatacaaggtgcgggcagcactggttcatcagatcttagcagcagtggggtttcaagagctatgatcaaagaacggtttaaatctttcaacatgcaattcgaagagctccatgcaaagcaatctcagtggattgtacctgatcaggaattgcgtgaatccttgaggcttgcggtagctgaggttctgttaccagcctatcggtcgtttgtcaaacgtttcggtaaccttgttgagaatggcaagaacccgcacaaatacgtgaggtacagcccagagatggtggagcagctgttgggggaattcttcgaaggacagcaatggggggagcagaagcgctga

SEQ ID NO: 4703 - DNA, 2628 bp, Oryza sativa
atgaggttcttgttaaattctaggttatccagctcttgtttggttggctggtctggaactctgaattccctctgtagctttttactagatgtccggaattctcttctaagggagcctaaacacggcagttcagttcagattaattatgggtctgggtttgaagaaaagaataaagggagtgaaataaagaaacaaacaggtaacctggataagacggtggaggagctatcaaatgtttatagaggagctcaagaaaccaatagaaagctctatcaggaactgttcccaattcagattatgcaaatgtgtggatggttactgaaggttgttcgttgggaaaacttaaattgtgtgcacatggaagctcatggcaatcgtcgcagcagtccaacataccttgttatgctgtggatgatttcggtagctagcctattgataacatgtcgtggcagtatccagaagcaagttctctttccagggttcactgccgcgcaaatggattacattgataacgatgggatatttctgctttctaatggctctgtctttggctttggttttgtcacgagcaatgtctcagacaacacgttctacattcttgcagtggttcacatggccactactaccacagtctggtctgccaatcctaactctcctgtcacccattcagatgacttttttttcgacaaggatggcaatgccttcctgcagtcaggaggaggctccaatgtatgggctgccaatatctccgggaaagggactgccacctctatgcaactactggactctggcaatcttgtagtgcttgggaaagatgcctcttctcctctctggcaaagtttcagccatccgacagacactcttctgtctggtcagaatttcatcgaagggatgacgctgatgagcaagtccaacacagtacagaacatgacctatacacwtcagatcaaatctgggracatgatgttatacgccggcttcgagacacctmaaccatactggtytkcacagcaggatagcaggataattgtcaacaagaacggtgacagcatctactctgcaaacctcagttcagcttcttggtccttctatgatcaatcagggtcccttctatcacaacttgtcatcgcgcaagaaaatgccaatgccacattgtctgctgtccttggtagtgatggattgatagctttctatatgctgcagggtggaaatggcaagagtaaattctcgatcacagttccggcagactcttgtgacatgccagcctactgcagtccttacaccatttgcagtagtgggacaggttgccaatgccctttggccctcggctcgtttgcaaactgcaatcctggtgttacatcagcatgcaaatcgaacgaggagtttccgctggttcaactggatagtggagttggatatgtaggcactaacttcttccctcctgcggctaagacgaaccttacgggttgtaagagtgcctgtacaggcaactgctcttgtgttgctgtgttctttgatcaatcttcaggcaattgtttccttttcaaccagatcggaagcttgcagcacaaaggtgggaatacaactcgtttcgcatcttttatcaaggtatcaagcagaggaaaaggtgggagtgatagtggcagtgggaagcacaataccattattattgtcattatgctcggaactttggctatcataggcgtccttatttatattggtttctggatctacaagaggaagaggcatcctccaccatcacaagacgacgctggttcatcggaagatgatggatttctgcaaacaatatccggagcaccagtgcggttcacttacagggagctccaggatgcgacaagcaacttctgtaacaagcttggtcagggagggtttggatctgtgtatcttggtacactcccagacggcagtcgtattgctgtgaagaagctggagggcataggccaaggaaagaaagagttccgctctgaggtaacgatcattggtagtatccaccacatccatcttgtcaaactccgaggcttttgtactgagggaccacacaggcttcttgcctacgagtacatggcgaatgggtcgctggataagtggattttccattctaaagaagatgatcacctgctcgactgggatacaaggtttaacattgcgcttggaacggcaaagggattggcatacctccatcaggactgcgattcgaagattgtacactgtgacattaagcctgagaatgttctacttgacgacaacttcatcgcaaaggtatctgattttggccttgccaagttgatgaccagggagcagagccatgttttcactacgctcagaggcacgcgcgggtaccttgcacctgagtggctcaccaactatgccatctcagagaagagtgatgtgtacagctacggcatggttttgcttgagataatcggtgggaggaagagctacgatccctcggagatctccgagaaggctcacttcccttcctttgcattcaagaagctggaggaaggcgatcttcaggacatcttcgacgccaagctgaagtacaatgacaaggatgggcsggtcgagaccgcgatcaaggtcgcgctctggtgcatcccrggatga

SEQ ID NO: 4704 - DNA, 2703 bp, Oryza sativa
atggagagagcacctcaaaccatactgttcctgttactccttgtccatttcactgtagcccaaaatgctaacaaaactggggtagtagatgggttcccagttggagtgatccttgaccttcaaacaatggtggggaaaatagcacggaccagtattttgatggcgctggatgatttctacgcggcacacacaaactacagcacaaagatagttctccacatcagggattctggaagtaataatgtccaggctgcatcagcagctcttgatcttctggagaatcacaatgtacaaattatcataggccctcagacatcctcacaagcttcatttgtatcagatcttggaaatagaagtcaggtccctgtaatatccttcacagcaacaagcccatctctttactctgccagtcttccatatttcgttcgtgcaacactgaatgactcagcacaagtgcaaagtattgcctgcctaatcaagacctatggctggagagaggtagtgccaatttatgaagacactgactatggtagaggtatcataccatatcttgtagatgctctccaagacattgatgcacgtgttccctatcggagtgttatccccctgtcagtaactagtgaagaaattagccaagaattatataagcttatgacaatgcaaacaagggtctttattgtgcacatgtcatctactttggctgcatctctcttcacaaaggcaaaagaggttggtatgatgagcaaaggatttgtgtggatcatgacagatggaataaccaatatcgtggactccatgagcacttcagttgtggaggcaatgaatggtgccttgggtatccagttttatgttaataactcagaacttgatagcttcaccataggatggaacagaagatttcaaatcgacaacccaaatgatccaccattaaaactaagtatatttggactgtggggctatgatactatatgggcagttgcccaagcagttgaaaatgttggggttaacaacagaacatcaattcaaaaaccatcagttgcaagaaactcaacaagcttggaaaacatggaaacttctgtatatggcccagaactcctaaaggtcatcttgagaaataaattcaggggtaagagtggctattttgacctttcaaacaggcagctgcaagtctccacatttagaataataaatgtatttgggaaagggtggaaagatattggattttggaatgaaggaaatggtattttacgacagttaaatcttggaaaatcaacaacaaagtatgcggactcagttttggacttaaaccctgtgatttggccagggaaatcgacagaaattcccaaaggatgggaaatccctgcaagtggaaagaagcttcaggttggagtacacaaaagtgcatacaaggaatatatgacgaatcaaagagatcccatcacaggtgcaactaaagcaagtggcttctcaattgacatatttgaagaggcagtaaaaagactcccttttgcgctaccttatgaatatgtagcatttgacacaagccgggatacaagtactggaagttatgatgactttgttcaccaagtttatcttaagaaatatgatgtggcaattggagatataacaatcaggcatagcagaatggcctatgttgacttcactgtaccatacacagaatcaggagtggcaatgatcgttccatccaagggcacagtagataaaacatggattttcctgcagccactatcacgtgatctgtgggttgcaaccatatcaatgtttttctacacaggatgtgttgtatggatagaactcaatgttgttaaactaacaggatggaaaggaaaaatgaattatatgcaagtaggtgtcaggttagaaacgagttttgctaatcaactgaaggaaaatgaaagagtggagcgcatcctatctcggatagttttgattgtatgggtatttttcttccttatactttcatcaggttacactgcaaacttggcaacaatgttgactgtacagcagctaaaaccaactataaatagtattgatgaacttcggaaaagcggggaaaacataggataccacgatggttcctttgtcaaaaaccttttggaagatcttaattttaacacatctaagatcaaggcatatgatacacccgatgatttttacaatgcactatcaaagggaagcaataacggtggtattgctgccttcgtgcatgaagtcccatatatcaaattgtttcttgcaaagcactgcaaagagtacactatggttggaccgttttataagacagcaggttttggatatgcattcccaaaaggatctcctctacttggagacatttcaaaggcaatcctcagcataacagagggggacattatcatgcaacttgagaacaaatggattgggaaaaagtcgatgactagcatgcaacctgaccaaaatggagaaggtttagaagaaaatcacaagccacaagaagtgaatgaaggagacagagaagaagaaaataatcagcctggagcaagtacaggccaaagtggccaacaacaacaacaaactggagcaagagagatgtctaacataaatttacaaacaagcagtgttagaagaaatagctcaattttcatttggcatgaaagaaatcttggtgcaagagtggcacccatttcaagttcaagtcatttttag

SEQ ID NO: 4705 - DNA, 2850 bp, Oryza sativa
atggggagagcagttgggagggctgcattcttattcttgttcctcagtctgacagttgctcaaaatatcaccaaaaatggagcaggcacactggatgttggggtgatcctccacctgaagtcgctggtgggcaaaatagcacgtaccagcgttttgatggctgtcgaagatttctactcggtccacaggaacttcaagacaaagctggttctccacattagagattccaatggagatgatgtccaagctgcatcagaagcaattgacctgctggaaaattacaacgtgagagctatcgttggcccacaaaaatcttcagaggttacgtttgtgtctaatcttgggaacaagagccaagtcccagtaatctccttcacagcaacaaaccctgctctttcatccatcaatgtgccatattttttgcgtggaacgttaagtgatgttgctcaagtgaataccattgctgctctcattaaggcatatgactggagggaagtggtacccatttatgaggatacggactatggtaggggcatcataccatacctggctgatgctctccaagaatttggagcttttatgccatatcgcagtgcaatatctgaatcagcaactactgaccaacttgagagagaactctacaagctaatgacaatgcagactagagtctatgttgttcatatgtcattgaacattgcctccattctcttcgcaaaggctaaggacttaggaatgatgagcgaagattatgcatggattttgacagatggcatttcaaatattgttaattctctaaacacttcaattctagagaaaatgaatggtgcaattggtgtcaggttctatgtgcctgcatcaaaggaacttgatgacttcactacaagatggaataagaggttcaaagaagacaacccaaatgatccaccatcacaactaagcactttcggtctttggggttatgatactatctgggccttagcacaggcagcagaaaaagtaagaatggctgatgctatatttcgaaagcagaaagacggaaagaactcaacaagtttgggaactctgggaatttctacaattggtccagaactcttagactcgatcttacatagtaagtttcaaggcctaagtggtgaatttgaccttggaaacaggcagctggaattttccacattccagataattaatgtggttggaggcaggtcaaaagaaataggcttttggataacaaagcatggaatattcaggcaaataaacgaaaatatatcaaaaacaacaaacgtgaactctatgcctggtcttaatcgagtgatgtggccaggagaagtatatacggtgcctaaaggatggcaaattcccactaatggaaagaagctccgtgtaggtgtacggacaagtggatatcccgagtttatgaaggtggaaaggaatactgccaccaatgaaataactgcttctggatatgcaatcgatgtatttgaagaggcgttaaagagacttccgtatgcaataccttatgaatatgtagcatttgatgacggacaaggagtaaactctgggagctataatgattttgtctaccaagttcatcttggggtatatgatgcagcaattggggatataaccatcaggtacaatagaacttcatatgtcgatttcacactaccttatactgaatcaggggtggcaatgattgtgccagttaaggacgacagggataagaatacatgggttttcttgaagccattaactactggcttgtggtttggaagcattgctttcttcatctacacagcagttgtaatatggctgttggagcgaagaattaacaatgctgaactgactggttcattttttcgccagcttgggattgcaatatatttctcattctttgcagatagggaaagggtggacagtattttgtctagattggttgtcatcgtatgggtctttgtgcttcttgtgattacatcaagctatacagccaatttatcttcaatgctaacggtgcaacagcttcaacctaccgtgactgacattcatgaactccttaaaagtggagaatatgtagggtatcgtaatggctcttatttgtccgatttactagaaggacttggttttgacaggacgaaaatgagggcatatgaaaatccagatgagtttgctgatgcacttgctaaagggagccaaaatggaggtattgcagcagtcgtacatgaagttccatacatcaaaatatttcttgcaaagcattgcaaagggtacacaatggtcggaccaatttacaaatctgaaggctttggctttccgcctatagtgagtaacattcactgttggataatgttgtacgcggcatttcccaaacgatccccactagtttatgacttctcaagggcaatcctcaacataacagagggagattctataattcatatagaaaagaaatggattgaggaccagcatgcctgtcagaatgatggcaccatgatcggctcaagcagtctaaacttcaacagcttttcaggactttttctagtcacaggagttgcttcaacctcagcccttttaatagccctgatgatgactctctacaagaataagcacaggataagggacagcatacgtcgtgggcagactcagaaagaatatgaaagagagacaataaatgaacaaaatcaagaaaggacaatagactccaaccaggtccagaacctgcaactgacagtgccagatgattcaaatgaatatacctgccaacaagagggagaaatatccatagagataagcccagcttcagggatccaaacaagtcaggatattgcatctcacagaacatcgagaaacggctaa

SEQ ID NO: 4706 - DNA, 2745 bp, Oryza sativa
atggagagagcacctgagagggctgcaatcttcttcttgctcctcagtctgactgtcgctcaatatacaactgaaagtggaacagtccacaggagcttcaagacaaagttagttctccacattagggattccaatggagacgatatccaggctgcatcagaagcaattgatctgctggaaaattacaacgtgaaggctatagttggcccacaaaaatcttcagaggctacttttgtgtctgatcttgggaacaagagccaagtcccagttatctccttcactgcaacaaaccccactctatcatctatcgatgtgccatattttttgcgtggaacattaagtgatgttgctcaagtgaatacaattgctgctcttatcaaggcatatggctggagggaagtggtacccatctacgaggatacagactatggtaggggcatcataccatatcttgctgatgccctccaagaattcggagcttatatgccttatcgcagtgcgatatctaaatcagcaaacactgaccaagttgagcaagaactctacaagctaatgacaatgcagactaggatttacgttgttcatatgtcagtgaacattgcctccattctcttcacaaaggccaaggaattaggaatgatgagcaaaggttatgcatggattttgacagatggtatttcgaatattgtwaattccctaagcccttcaattcttgaggaaattaatggtgcaattggtgtcaggttctatctgcccgcatcaaaggaacttcacgacttcactgcaagatggaataagaggttcaaacaagactacccaaatgatccaccatcacaactaagcattttcgggctttggggttatgatactacttgggccttagcacaagcagcagaaaaggtaaacatggctgatgccatatttcagaaacagaaagatacaaagaacacaacaagtttgggaactctgggaatttctacaattggtccgaaactcctagattcgatcttacatagtaagttcagaggtctaagtggtgaatttgaccttagaaacaggcagcgggagttttccacattccagataattaatgtggttggaagcaggtcaaaagaaataggcttttggacagcaaaacagggaatcttccgacaactgaacgaaaataaaacaacaaacataaactttgtgcctgatcttgatccagtgatgtggccaggagaagtatatacagtgcctaaaggatggcaaattcccactaatggaaagaagctccgtgtaggtgtacggacaagtggatatcctgagcttatgaaggtggaaaagaatcctgtcaccaatgaagtaactgcctctgggtatgcaatcgacgtatttgaagaggtattaaggaggcttccttatgcaataccttatgaatatgtagcatttgataatggacaaggagtaaattctgggagctataatgattttgtgtaccaagttcatcttggggtatatgatacggcaattggggatataaccatcaggtataatagaacttcatatgttgacttcacactaccttatacagaatctggagtggcaatgatagtgccagtcaaggacgacagggataaaaatacatgggttttcttgaagccattaactactgacttgtggtttggaagcattgctttcttcatctacacagcaattgtaatatggctgttggagcgacgaatcaataatgctgaactgactggttcattttttcgccagcttgggatcgcaatatatttctcattctttgcagatagggaaagggtggacagtattctgtctagattggttgtcattgtatgggtctttgtgcttcttgtgattacatcaagctatacggccaatctatcatcaatgctaactgtgcaacagcttcaacccacagtaactgatgttcatgaactccttaaaaatggagaatatgtagggtatcataatggttcttatgtgggtgatctattaaaaggacttggttttgacagaacaaaaattagggcatatgacaattcagatgactttgccgatgcactcaccaaagggagccaaaatggtggtattgctgctgtcgtacatgaagttccatacatcaaaatatttcttgcaaagcactgcaaagggtacacgatggttgggccaatttacaaatctgaaggttttggctttgcatttcctaaacgatccccactagtttatgacttctcaagggaaatcctcagcatactagagggagattctataattcatatagaaaagaaatggattggggaccaacatgcctgtcagaatgatggcaccgtcattggctcgagcagtctaaacttcaacagcttctcgggactttttctagtcacaggagttgcttcaacctcagcccttttgatcgccctgctgatgtttctatacaagaataagcacaggataagaaacagcataagccgtgaccagactcggagcagatatgraccagagcacataaacgaacaaaatgaagaaagggtaatagattccagccagkyccagaacctgcaattgacagtaccagatgactctgaatacacatgccaacaggaggaagaaatatccatagaactgagcccagcttcagggttccaaccaagtccagatttctcatcccaggaacatcgagcagtagctagtagcacaatcgtagctaattcatcttctcaagtccctagaatatga

SEQ ID NO: 4707 - DNA, 2823 bp, Oryza sativa
atggagaggggagcaccggcggcggcggggggccgtggagggatgggatccacttcggtgtcaactcgcggcacagaaggaggccatggtggcgtggagagaaaggagcagcagcagcagaggggttaccagctgccccgtgactcccggggatcactcgaggtgttcaacccctcatccgcttcctccttccgcactgctgctgccgcccccaagtccgcctcccccttccttgctattcccgacagggaagaggataatgtggtggcacagcagcgggcagcagagtggggcctcgtcctccagaccgaccaccacacaggcctcccccagggcgtctccgcacgaccctcctctggctctgcacgcaccagctctgaggacaacccacagcaacagcagagcgccgccgccatcccacgggtgtcggaggagctacgggcggcactatcagygttccaacagacgtttgtggtgtctgatgccacccaccccaaccaccccatcatgtacgccagcgctggcttcttcaacatgaccggctatacctccaaggaggttgtcggcaggaactgccgcttccttcaaggctctggcaccgacccccatgagattgacaagatcaggcaatccctcgcaaatggctccaactattgtggccgcatcctcaactacaagaaggacggcacgccattctggaacctcttaaccattgcccctatcaaggatgaggacggcaggctcctcaagttcatcgggatgcaagtggaagttagtaaatacactgaagggaaaaaggatactgttgttcgtccaaatggactttcagaatcactcatcaaatacgatgctcgacagaaggatcacgcccgtagctcagtgtctgagctcttgttggctctcaaaaatccacgctcattgtcagaatcaagcaataacaccttaaaaagaaaatcacaagaatccctaagcatgtcaatgaccgaagttcctagtaagagaagctctgaaagtggatctcgccgaaattctcgtagcggaacaaggagctcgcttcagaagatcaatgaagtacctgatcaagggaatagaactagaaaatctggtctgcgtgcatttatgggttttcttggtatgggccatggaagtgtagagaagaacatgctgaaacctagagatgaagatccactgatcgatagtgatgatgaaagacctgagagctttgaagatgagtttaggaggaaagaaatgaggaggggtatagacttggctactacacttgaacgtattgagaagaattttgtcatcacagatccaaggttgcctgataatcccattatatttgcatccgatagctttctgcaattgacagaatacaaccgtgaagaaatattagggagaaactgcaggtttcttcaaggccctgaaactgatcgtgcaacagttaggaagataagagatgccatagataaccaggcagaggtcacagttcagctcataaattatacaaaaagtggtaaaaagttttggaacctctttcacttgcaaccaatgcgtgatcaaaagggtgatgttcagtactttattggggttcaattggatggaactgagcatgttcaggatgatgctgcaaaagagggagtcgtgctggttaagaaaaccgcagataatatcgatgaggctgcaaaggaactcccggatgctaatttgagaccgraagatctatgggctaaccactcaaaagtagtcctgccaaatccacatatgaaggatactgcatcatggagagccatccaaaaggttctcgagagtggtgaaagtattggtttaaaacattttaggccagtaaaaccattaggatctggtgacactggaagtgtacacttggtagagttgttgaatacaggagaatactttgccatgaaagctatggataaaagcatcatgcttaaccgcaataaggttcacagagctactgctgaacgccaaatccttgatctattagatcacccattccttccaacattatatgcatcatttcagacaaaaacgcatatatgcctcattactgactactgcccgggtggtgagctctttgtgcttctagataatcaacctctgaaggttctacatgaagatgcagtcaggttctatgctgccgaagtggttgttgcactagaatacctacattgccaaggtataatataccgagacttaaaaccagagaatatcttacttcatagagatgggcacatctcccttacagacttcgatttgtcttgtctaacatcttgcagaccgcaggtctttcttcccgaagatgctgatgagaaaaaagggagaaaaaacgggagttaccccatattttttgctgaacctatgcgagcatccaattcatttgttggcacggaggagtacattgcgcctgagattattacaggagctggccatacaagcgctgttgattggtgggctctagggattcttctatatgaaatgttgtatggttatacaccttttagaggaaaaacgaggcaacggacatttgctaatatcttgcacaaggatatcagatttcctgctagtatatcggtcagcctagcggcgaggcagctaatgtataggttgctacatagggatcctgccaacaggctagggtcctacgagggagccaatgagataaaaggacatccctttttccgtggtataaattggcctcttatacgcgccacggcgcctccaaagttggagatcccactattttccaaggatgacatggagaagaagggactagtaacaaataaccgcacggatatgttctga

SEQ ID NO: 4708 - DNA, 975 bp, Oryza sativa
atgggagctgggattcggattctggtggtgatgttggcggtcgccgccgccgggagcggcgtcgtggcgcagctcaggcgggactactacgccagcgtgtgccccgacgtcgagaccatcgtgcgcgacgcggtgaccaagaaagtgcaggagacgtccgtcgccgtcggcgccaccgtccgcctcttcttccacgactgcttcgtcgagggatgcgacgcgtcggtgatcgtggtgtcgtcggggaacaacacggcggagaaggaccacccgaacaacctctccctcgccggcgacggcttcgacacggtcatcaaggccagggcggccgtcgacgccgtgccgcagtgcaccaaccaggtctcctgcgcggacatcctggtcatggccacccgagacgtcattgcgctggccggcgggccgtcgtacgccgtggagctcgggaggctggacgggctgagctcgacggcgagcagcgtcgacgggaagctgccgccgccgtcgttcaacctggaccagctgacatcgctgttcgccgcgaacaacctgtcccagaccgacatgatcgctttatctgcggcgcacacggtggggttcgcgcactgcggcacgttcgcgagccggatccagccgtcggcggtggacccgacgatggacgccgggtacgcgtcgcagctgcaggcggcgtgcccggccggcgtggacccgaacatcgcgctggagctggacccggtgacgccgcgcgccttcgacaaccagtacttcgtcaacctccagaaggggatgggcctcttcacctccgaccaggtgctctactccgacgaccgctcgcgccccaccgtcgacgcctgggcggccaacagctccgacttcgagctcgccttcgtcgccgccatgaccaacctcggccgcgtcggcgtcaagaccgacccgtcgcagggcaacatccgccgcgactgcgcgatgctcatctga

SEQ ID NO: 4709 - DNA, 4077 bp, Oryza sativa
atggagatggagatggaggtagggaggcggcggcggcggatcggagtcggagggagaagccagaaggcggcggcggcgggggagatcgatgttgggatcccatcggaaatcggatgggatcagacagactgggccgttcgttcgttcgttgttgccacgtgccacggcccggcccggcccatgaagataccacgacgtggcaggaaacccatggttgggcgggttatcctcttgctcttgcctgccattgcgcgcccagagcacaaggagatgctcgaggaaatgcgaacctattacatgctcacccacaaccatcaccaacacaccgctgccgctgatgacgatgacgatgaccaatccgtgctcaacggcaacgccaacaccactgctggtttttttggcattacagacaacggaaccttgcttcttaccagaagcttgggtctcagaacactcctgggattgtcaccagaccctgattcacacaacagaattgcttttgcaactcatttccagcgctccttcatgaaccttctgcgcaatgctcaatttgaagagctctctgcgcaagacctgctcttgacatacgccctaaacaccgattacctcttgactttgcccatttatgtcgattggaaaaaggcagctgagtccaatgctatcatattcaggcgtgggtatgcaacggagaggcagaagggcctactgttggttgaaaagcttgattacctacagtctaaactcttgcaaaatatcttctttggcttctccaagcccttgaggaagctggggaaatggctcaatgaggcattgaaaagatcaacagggaatgagggatttcagatctggattgaaaaacttaaagtctggcttaaagagcaaacctatgcggagaattcgctttcgttgattgagaactcttcatgggataaacttagatctgatcaattaccggatgctgatcttcctatttggattgctgctcaaagggcagtctctcgttacgaaggaatcctgtcaccagttggtcctcgtggcagacttctaagaagattgcttgcttggactggtttaatcccttctctgccagaagcaacaataaagtcagatatcgatacaaaagatcttgaaggctatgtgaggccaaattttctgccaagaataacacttgcaaatatatgggcgccagcaagcagagaatcttgtaacaacaatctctgggagataacaaaagcttcttttggtgttttatttgggaagtctactcttcaggaaccagcattccaagaactgatcctactttatactgatgaggctgatcaaagcaaagagagagaaaaatcagacatgatgccattgcaactgaaaatttttgaaaggatccccatccctgatctgccagtggtttttcctcacaagaagttgtccttccgcatcctagatacagtaaggttggatattgctaccgtaataggtttgttggcttatgtcgtgaactacaaatttgagagtttagcctcatctccatcggcttttcttcttgatatagttgcctttactgcactagcaatacttgtgttccgtgtggcgctgggttacaaacaaactagggatagataccagcttctggtcaataaaacgctctatgagaagacattagcaagtggatttggttcagtttattttctccttgacgcttctgagcaacaacagctttttcagaaagggttctcccttaatgagtgttttgttcagtataaagaagcgcttttggcatatggtatgttactgtgcaggaaaaagtatcaggtgtcatctcgtgtaagcatcagagatacatgtgagcagtttatgtacgagaaatttaaggcgaagatcgaaatgcctattgacaaagctatggagacactattgcgtctggggctggtgattgagctgccaactgacggcggctcccgtgtaatcgcacttccatgttcagacgcatacgagatcctgaaaagccgctgggacagcttgttggaacacaagacggaacaagatattgttatatctcgatattgttacgagggagctgatgaagaagactgtattattgagatggacggacgttgtctgtattcatctatagagctcttgatcgaaagtgctggctgcagcagcgtagctgcagtcggtgtaatggcaaaagagcagagtggatcccctaagcccaggcagccagtgttccaaaggatgcgagtaacgttaaccataggtgttattggcctctgtgttgcatcatacattcttggtgcttggcaaggcacttcaactactagtatacacccatccataatctacactaaaagccaatgtggtgaatccattttgcgcacctccagcaattcgtctggacggtcatcatcagacgctcgtcttgatttccaagcccaccatcaggtgagcttcaatgaatcttcacttgtcgccgaaaaattcccaccttgtcagctgaaatacagcgagtataccccttgccaagatccaaggagagccaggaaattcccaaagacaatgatgcagtacagggagagacactgccctcggaaagaagagcttttccggtgcttgattcctgcaccaccaaagtataagaatcccttcaagtggccacaatgtcgggattttgcttggtacgataacattcctcatcgggagcttagtatcgagaaagctgtccagaactggattcaagttgaggggaaacggtttagattccctggaggcggcacaatgttcccacatggtgctgatgcctatatcgatgacatcaacgctctcatatcattaacggacggcaacatcagaactgcgcttgatactggatgtggggtggcaagttggggcgcttatcttattaagaggaacatcatcactatgtcatttgcacctagagattcacatgaggcacaagtgcagtttgcattggagcggggagtgccggccatgattggagtgatatccacggaaagaatcccataccctgctagatcatttgacatggcacactgctctagatgtttgatcccatggaataagtttgatggtatctatctaattgaagtagacagagtaattagaccaggaggctactggatcctctctgggcctccaatccattggaagaagtacttcaagggctgggaaagaacagaagaagacctgaagcaagagcaagatgagattgaggatttggcaaagcgtctctgctggaagaaggtggtagagaaagatgatcttgctatatggcagaaacctatcaaccacatagagtgtgttaatagtcggaagatctatgaaacccctcagatttgcaagagcaatgatgttgactctgcttggtacaagaagatggagacatgcatatcacctcttccggatgtgaatagtgaagacgaggttgctggtggagctcttgagaaatggccaaaaagagcatttgctgtgcctccaagaataagtcgtggatcagtttcaggcctcaccacggagaaattccaagaagataataaggtgtgggcagagagagcggattactacaagaaattgattcctccactaaccaaggggcgatataggaacgtgatggatatgaatgcagggatggggggattcgcagctgcattgatgaagtatccactttgggtgatgaacgtggtaccttcaggctctgctcatgacacccttggtattatctatgagaggggattcattggaacctaccaagactggtgtgaggctttctcaacgtatccgaggacatatgacttcatccatgctgataaaatattcagcttttatcaggacaggtgtgacgtaacatacattctcctggagatggaccggattctaaggcctgaagggacagtgattttcagggacacggtggaggtgttagtgaagatacaatcaattacagaaggcatgcggtggaagagccaaataatggatcacgaatctggtccattcaaccctgagaagatacttgtggctgtcaagacttactggactggacaacccactcaaaagcagtag

SEQ ID NO: 4710 - DNA, 1815 bp, Oryza sativa
atggcggccgtcgatacgccggagaagccgtacgagggtaagccggcggcggaggcgaggagctactggcggtggcagaaggaagatttcttcccggagccgtccttcgcgagctggggcgcgtaccgcgcggcgctggccgcgaagcccgcgcggttccgcgaccgcttcgccggccgctccaccgacgccgacgagctcggcgcgctgcgccgccgcagcgagaacgagatgcgccgctgcctcacgtggtgggacctcacgtggttcgggttcggctccgtcatcggtgccgggatcttcgtgctcaccggccaggaggcgcacgaccacgcsggcccggccatcgtgctctcctacgtggcctccggcttytccgccatgctgtccgtgttctgctacacggagttcgccgtcgagatccccctcggcgacktggcggccttcatsgccgccgcgaacctcatcctcgagagcatcatcggcacggccgcggtggcgcgctcctggacgtcgtacctcgcgtcgctcatcaacaagccggcgagcgcgctgcgcatacagacgtcgctcgccgaggggtacaacgagctggaccccatcgcggtggtggtgatcgcggtcacggcgaccctggccattctgagcgccaagggcacctcccgcgtcaactgggtcgcctccgccgtgcacgtcctcgtgatagccttcgtcatcgtggccggcttcctccacgcgaagaccagcaacctgaccccgttcatgccgcacggcgtgccgggcgtgttccgcgcggcggcgatcgtctacttcgcctacggcgggttcgacaacatcgcgaccatggcggaggagaccaagaacccatcgagagacatccctctcgggcttctcggctccatgtcggtgatcacggccatctactgcgtgatggcgctggtgctgagcatgatgcagccgtacacggcgatcgaccggagcgcggcgtactcggtggcgttcagcaacgtcgggatgcggtgggcgcagtacgtggtggcgctcggcgcgctcaaggggatgacgacggtgctgctggtcggggcgctcggtcaggctcggtacaccacgcacatcgcgcgcagccacatcatcccgccggtgttcgcgctggtgcaccccaggaccggcacgccggtgcacgccaccgtgctcatcgccgccgccggcgcctgcatcggcctcttctccagcctcgacgtgctctccagcctcctctccgtcagcacgctcttcatcttcatgatgatggccaccgccctcctcgtccgccggtactacgtgcggggcgtgacgagcaggacgcacgcgaggcggctggtggcgttgctatcggtggtcatcggctcgtcggcgggcatcgcggcgtactggggcgcggcgccggagcggtgggttgggtacaccgtgctggtgccggcgtgggcggcgggcacgctcggcatccagcttctggtgccggcggcgcgcgcgcccaaggtttggggcgtgccgctcgtgccgtggctgccgtcgctgtccatcgccaccaacctcttcctcatgggctcgctcggcgcgcaggcgttcatccgcttcggcgtctgcaccgccatcatgctgctctactacgtgctcgtcgggctgcacgccacctacgacgtcgcgcacggcgcgtgctccggcgacgacgtcgacgaggaggtctacgctgatgccgcccacgtggacgatgcgaaggcggcggccgcggtcgctgccaacgcagacgtggagagggcgggcgcgaagatctga

SEQ ID NO: 4711 - DNA, 1017 bp, Oryza sativa
atgtcgtccaattttgaggccaacaacaacaacaatggcgagaagcagctggtctgtgtgaccggagcaggtggcttcattgggtcgtgggtggtgaaggagctcctcatccgtggctaccacgtcaggggaacagccagggatcctgctgacagcaagaatgctcacctgcttgagctggagggagccgacgagaggctctccctctgccgcgccgacgtcctcgacgccgccagcctccgcgccgccttcagcgggtgccacggcgtcttccatgtcgcctccccggtgtctaacgaccctgaccttgttccggttgcagtggaggggacgaggaacgtgatcaacgcagcggcggacatgggcgtgcgccgcgtggtgttcacgtcgtcgtacggcgccgtgcacatgaaccccaaccggagccccgacgccgtcctcgacgagacctgctggagcgactacgaattctgcaagcaaacagacaacctgtactgctgcgccaagatgatggcggagatgacggcgacggaggaggcggcgaagagggggctggagctggcggtggtggtgccgtcgatgacgatgggtcccatgcttcagcagacgctcaacttcagcaccaaccacgtcgcccgctacctcatgggcaccaagaagtcctaccccaacgccgtcgcggcctacgtcgacgtccgcgacgtcgcccgcgcacacgtcctcgtctacgagcgccccgaggcacgcggccgctacctctgcatcggcaccgtgctccaccgcgccgagctcctccggatgctcagggagctcttcccacggtaccctgccactgcaaagtgtgaggatgatgggaagccgatggcgaagccgtataagttctcgaaccagaggctcaaggatttgggtttggagttcactccactgaggaagagtttgaatgaggcggtcctatgcatgcagcagaagggtcacctgcctctgatttatcccgttccaaaacgtgcttacctataa

SEQ ID NO: 4712 - DNA, 738 bp, Oryza sativa
atggcagccgccaccagcagcagtgcgctgtcaaagcttgctccactggaggcgatcttgtttgacatcgatggcaccctctgcgactctgatcctatccatttctgcgccttccgcgaactgctgcagcaggttggtttcaacaatggcgtgcccatctccgaggagttctacagcgccaatatcagcggggggcacaacgatgacctcgcaagggccttgttcccggatttggatcatgacaaggcaatgaagttcatggacgacaaggaagcattgtacagaaggttggctccagaacagttggtggcagtagaaggcctgcatgatctgtgcagatggataaaagatcacaagctgaaacgcgccgccgtaacaaatgctccaaggtcaaatgcagagctcatgctgtcactccttgggctcactgaattcttcccggtgctcgtaatcgggagcgagtgtgaccgagccaagccattccctgatccttacctcaaggctcttgagcttattggtgcatcacctgatcacacattcatttttgaggactccgcgtcagggattcgagccggtgtagctgcaaatgttcctgtagttggtctgacaactaggaatccagagaaagttctgcaagatgcaggagcaagcttgctgataaaagatttccaggacccaaagctactgtccatacttgaagagatagaacctacggttgccgccgtcgagcaagtctga

SEQ ID NO: 4713 - DNA, 684 bp, Oryza sativa
atgcagggggcgcgtgttaatctgaaggggtggcaacaggctgctgttgcattcggttctgcatttggggccttgcttgaccctagaagagctgatctgatagctgctcttggggagactactgggaagccagcatttcagcgtgtgcttcagcggatgaggaacagtgctgaaggcagggatgttctcctggagcgtcctcgagttatatccacacaagtttctcatgcctgggacatgcctcagaacacatttggtgcagcatatgctcagttcatgggatcaaggaacttctcaccggatgaccgcccacctgtccgtttcatggatacagatgagcttgcgtatgttgcgacccgcgcccgtgaagtccatgacttttggcatgtgctgttcggccttcctacgaacctgattggagagactgcccttaaggtcattgagtttgaacagatgttccttccaatgtgcatgctttcagtcgttgggggctctgcgaggttcaatgagaaacaaaggacactgttttttcagcattatttcccatgggcttcaaaagcaggtcttaagtgcacagatcttatgtctgtgtactatgagaagcattttcatgaagatttggatgaagtgaggaggaactggggaattataccatgccctgatcccaaaaggagcagtgtttag

SEQ ID NO: 4714 - DNA, 1107 bp, Oryza sativa
atggtgacatcaacagtgaagttggaggaggttaggaggatgcaaagagcggaggggatggcggcggtgctagcgatcgggacggcaacgccggctaactgcgtgtaccagaccgactacccggactactacttcagggtcaccaacagcgagcacctaaccaacctgaaggagaggttccagaggatgtgcaggaaatggtgttgccggaagtgcccaagctgggaaagcggcagccgaggaggcgatcaaagattggggcagccgatgtcgcggatcacccacctcgtgttctgcacgaccaacggagtggacatgcccggagccgactaccaggtggccaagatgctgggcctacccacgtcggtgaagcggctgatgatgtaccagcaggggtgcttcgccggtggcacggtgctgcgcgtggccaaggacctggccgagaacaaccgcggcgcgcgggtgctggtggtgtgctcggagatcatggcgatggccttccgggggccgtccgagtcgcacctcgactccctcgtcgggcacgcgctcttcggcgacggcgcagcggcggtgatcgtcggctctgaccccgacgaggcagccgatgagcggccgctgttccagattgtgtcggcgagccagaccatcctgccgggcacggaggacgccatcgtggggcacctccgcgaggtgggtctcaccttccacctgcccaaggacgtcccggagttcatatccgacagtgtcgagggcgcgctcaccgacgccttcatgccgctcggcgtccacgactggaactccatcttctgggtggtgcacccgggcggtccggccatcctcgaccaggttgaggagaaggtcgccctccacaaggcccgcatgcgcgcctcccgcaacgtcctctccgagtacggcaacatggccagcgccaccgtcctcttcgtcctcgacgagatgcgcaagctctctgccgacgacggccacgccaccaccggcgagggcatggactggggcgtcctcttcggcttcggtcctggcctcaccgtcgagactatcgttctccacagcgtccccatcaccgccgccgcccctcttattatgcagtaa

SEQ ID NO: 4715 - DNA, 708 bp, Oryza sativa
atggcggcaaagctccccactgtcgtcctcctcgcctccttcgccgccgtcatcctctccctcgccgcgccgttgctcgccggcgaccccgacatgctccaggacatctgcgtcgccgactacaagtcgcttcaaggcccgctgagggtgaacgggttcccgtgcaagccggaggcgaacgtgacggcggaggacttcttcttcccggggctgggaaagccggccgacgtgtactccggcaacccgatggggtcggcggtgacggcggcgacggtggagaggatcccggggctgaacacgctgggcgtgtccatggcgcgcgtcgactacgcgccgtggggcggcgccaacccgccgcactcccacccgcgcgccaccgagatcctcttcgtcgccgacggcctcctcgaggtcggcttcgtcgtcgccacggcggcgccggcgagcagcaggctcatcacccgcgtcgtccccaagggcggcgtcttcgtcttcccccgcggcctcctccactacgagcggagcgtcggcgagaagcccgccgtggcgatctcagcgttcgacagccagctccccggaacgcaggccgccgccgacgcgctgttcggctcgtcgtcgccggcggtgcccaccgacgtgctggcccgcgcgttccaggtcgacggcggcgtggtcgagaacatcaagtccaagttccagcacaagtag

SEQ ID NO: 4716 - DNA, 672 bp, Oryza sativa
atggccaagctgatcctcgccaccttcgccgtcgtgttcatggcgctcgccgccacctccctcgccggcgacccggacatgctccaggacgtctgcgtcgccgactacaagtccctcaaaggcccgctgcggctgaacgggttcccgtgcaagaggatagagaacgtgacggcgaacgacttcttcttcgatgggctgatgaaggccgggaacacggggaacgcggtggggtcggtggtgacggcggcgagcgtggagagcctgccggggctgaacacgatgggggtgtccatggcgcgtatcgactacgcgccatgggggctgaacccaccgcacacgcatccccgtgccaccgagatcatcttcgtcgtcgagggctccctcgacgtcggcttcgtcaccaccgccaacaagctcttcacccgcaccgtctgcaagggggaggtgttcgtcttcccgcgggggctcgtccacttccagaagaacaacggcaacacgccggcgttcgccatcgccgccttgaacagccagctccccgggacgcagtccatcgccgccgcgctcttcggcgccgcgccgccgctgccgtcggacacgctggccagggcgttccaggtcgacggcggcatggtcgagttcatcaagtccaagttcgtcccgcccaaatactag

SEQ ID NO: 4717 - DNA, 1293 bp, Oryza sativa
atggcgcccgtgcagacaccggagcagagcaacgggtcactgacgttgaacccggtggtgcagcgcgtgctgagccgcggcaagtcgctgctgtcgccgtccacgccgcggtctycgccgccgtcgtacgggagcatcgtcaccgtgctgagcatcgacggcggcggcgtgcgcggcatcatcccgggcaccatcctcgcgttcctggaggagaaactgcaggagctggacggccccgaggctcggctcgccaactacttcgacgtgatcgccgggacgagcaccggcgggctggtgaccgccatgctcaccgcgcctaacgacaacggcgacccgctgttcgccgccagggacatcaacgacttctacctcgagcactgccccaggatcttccctcccgtcagcaaggggcctctcggtctgttcaagagcatgacggggcccaagtacgacggccggcacctccactccgtcgtgcagcagctgctcggcgacaagcgcgtcgacagcaccatcaccaacatcgtcgtcccgaccttcgacatcaagctcctccagccaacaatcttctcgacctacaacgctcgcaaggacgtgtccaagaacgcgcttctgtcggacgtgtgcatcagcacgtcggcggcgccgacgtacctccccggccaccgcttcgagacgacggacaaggacggcaagccccgggaatttaacctcgtcgacggcggcttcgccgcgaacaatccgacgctgctggcgatgacacacgtaaccaagcagatcctgctgggctgccaggacttcttcccgatcaagccggcggactacggcaagttcatgatcctgtcgctgggcaccggctcggccaagatcgagaagaagttcgacgccgtcgagagcggccggtggggcgtcctcggctggctgttcaacaagggcgcgacgccgctgatcgacagcttcagccaggccagcgccgacctcgtcgacatccacgcatccgtgctcttccaggcgctgcactgcgagaagcgctacctccgcatccaggacgacgagctcaccggcgacgcggcgtccgtcgacgtctccacgccggagaacctccagaggctcgtcggcgtcggcaaggcgctgctcaagaagcaggcgtgcaaggtcgacctcgagaccggcaagaacgagccggacatgaaccggaaaagtaacgaggaggagctggtgcttttcgccgagatgctgtcgcgagaacggaaggccaggcttcagaaaaagcaggggagcatgaagatctag

SEQ ID NO: 4718 - DNA, 8928 bp, Oryza sativa
atggtctattttctcatgttcctcctgctgctctcgattcctctatgcaaaaccgatgaccagctgacactgggaaagccaatctttcccagcgagatgctcatctccaagggcggcatctttgccctcggcttcttccccccggccaacttcagcaatagcctctatgttggagtctggttccacaacatcccccagcgcaccgttgtgtgggttgccaaccgcgacaacccaatcaccaccccttcgtcagcgacccttgccatcaccaacagctcaggcatggtgctgtcggactcccaaggccacattctttggacaaccaagatcagcgtcaccggagcctccgccgtgctgctcgacacggggaacttcgttctccggttgccaaacggcaccgacatatggcaaagcttcgatcacccgactgataccatcctcgcaggcatgatgttcttgatgagctacaagtccgagatcatcggacgcctcactgcgtggaggagccatgatgacccatccactggagatttctccttcagcctcgaccccagctcggacctccagggcatgacctggaacgggaccaagccatactgccgtaacggcgtcagaaccagcgtgacggtgtccggcgcccagtatccgagtaacagcagcttattcatgtatcaaacactcatcgactcagggaacaagctctactactcatacactgtctccgacagctccatctacacacgcctcacacttgacagcacgggcacgatgatgttcctgagctgggacaacagctcgtcgtcatggatgttgatcttccagcgccccgccgccggcagctgcgaggtctatggctcgtgcggcccgtttggctactgcgacttcacgggggccgtcccggcgtgccggtgcctcgatgggttcgagcctgtagatcccagcatctcgcaatcaggatgccggagaaaggaagagctgagatgcggagagggcggtcaccgcttcgtgtcattgcctgacatgaaggtccccgacaagttcttgcagatccggaacaggagcttcgaccagtgcgcggccgagtgcagcagcaactgctcttgcaaggcatatgcttacgccaacttgagcagtggcggcaccatggctgacccgtcaagatgcttggtttggacaggggagcttgtcgactcagagaagaaggccagccttggtgagaacctgtacctccgccttgctgagcctcctgggaaacaaaacaaggaaatccaaaagagactgatgctagaatatccgggcacctccaatgaacttggaggtgaaaatgtgaaatttccatttattagctttggagatattgtggctgcaacagataatttctgtgagtccaatctacttggaaggggaggctttggcaaagtttacaagcgtttccctatttatattgatgacaacatgaagggaatattggagggaggcacggaagttgctgtcaaaaggcttaatgagggttctggacaaggcattgaagagtttaggaatgaagtggttctaattgcaaaactgcagcacaggaacctagttagacttcttggttgctgcattcatgaagatgagaagttactgatctatgaatacttgcctaacaaaagcttggacgccttcctttttgatgctacaagaaaatatgtgcttgattggccaacaaggttcaaaataatcaaagggatagcaaaagggcttctttatcttcaccaagattcaagactgacaataattcatagagatctcaaagcaagcaacatcttgttggacacagaaatgaaccccaaaatatcagactttggtattgcaaggatttttcatggtaatcagcagcaagcaaacaccactcgagttgttggaacatatggttacatgtctcctgaatatgtgttgggtggtgccttttcggtcaagtcagatacatacagctttggtgttcttcttttggagattgtcagtggcctgaaaatcagttcatctaaactcacaccaaactttttcagccttacagcctatgcatggagattatggaaagatggaaatgcaacagaattgttggacaagttttttgttgacagttatccacttcatgaagctttcagtgatgtgatatatgactttaaatctttaatggaaaacagtggagtttgctgcgtgaggatcctggccggctacctcgaccatgagggcgacgcggcggcggcgccgcaacggctggactgcaccaccgacgacgacttcagctcagcggtttcgccgccgcacaacgacgtcgcccagttcaccgccctcgccgagctcatcccggagcacgccaggttcaacgaggacggcatgtaccacgccatcgacatctacttgaagacggtggtgcaggtgctgtaccacgagcagcggcgcctccgcgcgccatcgcagccgccgagcaccgcgccgtctttctgccaatccgatgaccgcctaacaccggcaaagccactcatcttccccggcggcgacaagctcatctcggatggcggcgtctttgctgtcggcttcttctccctgaccaccaccaactcaaccccaagcctgctctaccttggcatatggtacaacaacatcccggagcgcacctatgtctgggtcgccaaccgcgacaacccaatcaccacccatacggcgaggctggctgttaccaacacctccgggcttgtgctatccgactccaaggggaccacggcgaacacggtcaccatcggaggtggtggagccaccgcggtgctgcagaacacgggcaacttcgtgctccgctatggacgaacatacaagaaccatgaggcggtgcgcgtagttgcttggaggggtcgtcgcgacccgtccacctgcgagttctccctcagcggtgaccctgaccagtgggggctccatatcgtcatctggcatkgggcgagcccgtcgtggcgcagcggtgtctggaacggcgcgacggccaccggcctcaccaggtacatatggtcccagatcgttgacaatggcgaggagatctacgcgatatacaacgcagctgatggcattttgacacactggaagctggactacaccgggaacgtgagcttccgggcatggaacaacgtatcatcgacttggacgagcccattcgagcgaccaggccatggctgtctccactacggcgcctgcgggccgttcggctactgcgacatcaccggcagcttccaggagtgcaagtgccttgatggcttcgagccggccgatggatttagcctcaactcttccagaggatgccgaagaaaggaggagctgagatgcggtggccaagaccatttcttcaccttaccagggatgaaggtgccggacaagttcttgtacatcaggaacagaacctttgaggagtgtgccgatgagtgcgaccgcaactgctcgtgcacggcatacgcttatgccaacttgagaactatcctcacgacgggtgacccctcaaggtgcttggtatggatgggggagcttctcgactcggagaaagccagtgccgttggtgagaacctgtaccttcgactcgccggctctcctgcagtaaacaacaagaacattgtaaagattgtactcccagctatagcatgcctgctgatactgacagcatgctcatgcgttgtactctgtaaatgcgagtcaagagatcacgcaatgaagtctgtgattgattggcaaacaaggtttaacataatcaaaggggtagctagaggacttctttatctccatcaagattcaagaatgatgataattcatagagatctcaagacaagcaacatcttgttggatgcagagatgaacccaaaaatatcagattttggtatggcaaggatttttggaaacagtgaacagcaagcaagtactagacgagtcgttgggacctacggctacatggcacctgaatatgcaatggaaggcattttttcagtcaaatctgacacctatagctttggcgtattgctactggagattgcatggaacttgtggaaagatggaatggcagaggctttcgtagacaaaatggttctggagagctgtttgcttaatgaagtctctgaaagtccatcttcgtttggcggaaggtggcctccttatagtcttttgggaagatgtcaaggcaattgcttgcaaaatagccggcctctttttacgcgaggggcagacaagtcccggtcaggcgttacttcgttggcccaccgtactaaattcactgttcagaaaagagtcgtgtatggattagtagcaaaaatcaaaggtgccaattgttcacgcttcatagccacaggcgagccaagaacaaggccatatgagatttaccagattatggcctgcctcccagttttcatctccttgctgttcctcatctcttcctgcaaaggcgatgaccagctcacacaggcaaatcgactgatctcccccggcgacgtactcatctccaaaggcagggtcttcgcgctcggcttcttctccccaacagcctccaaccagagcttcttcctcggcatatggtaccacaacatctccgagtccgagcgcacgtacgtttgggtcgccaaccgcgacaacccaatcaccaccccttcattcgcaacgctcgccatcagcaacagctctaaccttgtcctgtcggattccggcaatcacaccctttggacgacgaacgtcacggccaccggaggcgacggagcttacgcggcgctgctcgactcggggaacttggttctccggttgccgaatggtacaaccatatggcagagctttgatcacccaactgacacccttctgatgggcatgaggtttttggtgagctacaaggcacaagtcgccatgcggtgcatcgcttggaagggcccagatgacccctccaccggagacttctccatcagcggtgatcccagctcaaaccttcagatcttcctttggaacggtaccagaccatatatccgctttattggatttgggcctagcagcatgtggtcttcggtcttctcattcagtacctctctcatctacgaaacatcggtgagcacggatgatgagttctacatcatatacacaacctctgatggctcaccttacaagcgtcttcaactggactacacgggtaccttgaagttcctggcttggaacgacagcgcgtcgtcatggacagtcgtcgtccagcgcccatcacccaccatcgtgtgcgatccctacgcctcgtgtggtccattcggctactgcgacgcaacggcagccatcccgaggtgccaatgcctcgatgggtttgagcctgatggctccaactcttcttcgagaggatgccggaggaagcagcaattgagatgccgaggcagagatgatcgcttcgtgaccatggccggaatgaaggtccctgacaagttcttgcatgtccggaatagaagcttcgatgagtgcgcggccgagtgcagccgcaactgctcgtgcacggcctacgcttacgccaacttgaccggagccgaccaggcaaggtgcttgctttggtcaggggaacttgctgacactgggagggccaacattggtgagaatctgtacctccggttggccgactctactgttaacaagaagaagagtgacatcccgaagatcgtacttccggttataacaagcctgttgatactcatgtgcatatgtcttgcgtggatatgcaaatcaagaggcatacaccgaagcaaggaaattcagaagaaacatagactacaacatttgaaggattccagtgaacttgagaatgacaatctagaacttccatttatttgcttagaagacattgtcactgcaacgaacaatttttctgatcacaacatgcttgggaaaggtggttttggaaaagtttacaagggagtgttggaaggtggcaaggagattgcagtcaaaaggcttagtaagggttctcagcaaggtgtggaggagttcagaaatgaagtagttctgattgccaaattgcagcatagaaatttagttaggcttatcagttattgcattcacgaagatgagaagttactcatctacgaatacttgcctaataaaagcttggatacttycctttttgatgctaaaagaaaatcagttctcgattggacgacccggttcatgataatcaaaggtatagcgagagggcttctttatttgcaccaagattcaaggttaacgataattcacagggatctcaaagcaagcaacatcttgttggacacaaatatgagtcccaaaatatcagattttgggatggcaaggatctttgaaggaaataagcaacaagaaaatactaccagagtagttgggacatacggttacatgtctcctgaatatgctttggaaggctccttttctgtcaagtctgacacctacagttttggggtgctactgttggagcttgcgtggagtttatggaaagatggaaatgcaatggatttggtggactcatcaattcgggagagttgtctacttcacgaagttttacgatgtattcaaatagcactttcatgtgttcaagatgacccaactgccaggccactcatgtcatccattgtgttcatgttagagaacgagacagctgctcttcctaccccaaaggagtctgcttatttgacagctagggtctatggaactaaagacactagagaaaacaaggaaagatctgtaaataaccattgcataggaaagaagcagtctgcttacagcaaagcacgccggcgccgccttattcatggaaagccccaggccaaggcgaaacctgcacaccaccaccaaccaggaagcaatactctcaatcacaatccacattccacagtggagatctggataaaccctattaatcaatggcgcactggaactctcatggatctaaggcctgaagaaatacgcaccatctgcgttaacggaaccaatccccatccttccatgggagcgccgcccgacgggaagcagccgaggcggctgcgccgctgcggcattcaggattcgccaactgatcggtcttgcaagctatcgagcacgcgcaggcagatccggttccatccagcggcggcggcggcgacggcggcgacggcgacggcggcgatctctgacgaaagcgaactaacacctgcaaagccactctaccctggtgacatgctaatctcggatggtggtgtttttgctcttggtttcttctccccaacaaactcaaatgctaccttatatgttggcatatggtaccacaagattcccaatcgcaccgtggtgtgggttgccaaccgtgacaacccaatcactgccccttcttctgccatgctcttcatctccaacagttctgaccttgtgttgtctgaatcgggaggccacactctttgggaagcaaggaacaacatcaccactggaggttctggagccacggtagttcttcttaattctggtaatttggtccttcgatctcctaaccacacaatcttgtggcagagctttgatcatttgactgataccatcctccctggcatgaagctcttgctgaaatacaatggccaggttgctcagcgcattgtttcttggaagggccctgatgatccatcaaccggcaacttttccctcagtggtgaccccaactcggatttccaggttttggtttggaatggaacaagtccatactggcgtagtggggcatggaatggtgcgttggtctctgctatgttccagagtaataccagctctgtgacataccagacaatcatcaacaaagggaatgagatatacatgatgtactctgtttctgatgactctcctagcatgcgcttgatgctcgactacacaggaacaataaagatgctgatctggaacagcaacttgtttgcatggtctgtgttattcagcaatccctcttatacttgcgaaagatatgcctcctgtggaccatttggttattgtgatgctgcggaggcattcccaacatgcaagtgccttgatggattcaagcctgatggtcttaacatttcaagaggatgtgtgagaaaggagcagatgaaatgtagctatggagatagtttcttgaccttgcctggcatgaaaacacctgacaagttcttgtacatcaggaacagaagccttgatgagtgcatggaagagtgcaggcacaactgctcttgcacagcatatgcttacgcgaacctgagcactgccagcatgatgggtgacacatcgaggtgcttggtttggatgggggagcttctagacctggcaaaggtcactggtggtggtgagaatctgtacctccggcttccgagcccaactgcagtcaagaaggagactgatgtagtgaagattgtccttccagttgtggctagcctactgatcctcacatgcatatgccttgtgtggatatgcaaatcaaggggcaaacagcgaagcaaggaaatccagaacaaaattatggtacaatacttgagtgcctcaaatgaacttggggctgaagatgtggattttccattcattgggtttgaagaggtcgtaattgcaacaaacaatttctccagttataatatgcttggaaaaggaggttttggcaaagtttacaagggaattctggaaggtggcaaggaagtagctgttaaaaggctcagtaagggttctgggcaaggaatagaggagtttaggaatgaagtcgtccttattgcaagattgcagcacagaaatctagttaaacttgttggttgctgcattcatgaagatgaaaagttactgatctatgaatacttgccgaacaaaagcttggatgcctctgtcttggagcttatggaaagatggaaatgcaagggatttggtggactcgagcgttgtggagagttgtccactccatga

SEQ ID NO: 4719 - DNA, 729 bp, Oryza sativa
atggctgctgcttcttcttcttcttcttcgtctgcttattatggcggcgcgaataaatctgtcgcgttccttgtcgccaccgtcgtcaccgtgcctctgtgtgccctgctgctaggtggcggcggcgtcgccgtcgtccgtgacaacaacaacaacgccggcggcggcgaggcggaggtgtaccgctccgagctgacgccgctgcagaagcacgtcgccttcttcgaccgcaacaaggacggcatcatctacccctccgagacctaccaagggttccgcgcaatcggggcaggagtcgtgctgtccgccgtcggcgccgtgttcatcaatggcggacttgggcccaagacgataccggagaacaccaagactggtctcaagttacccatatacgtcaagaacatccacaaaggcaagcatggaagcgattcaggcgtgtatgatgcgaatggaaggtttgtcccagaaaagttcgaggaaatattcaagaagcatgctcacaccaggcctgatgccctaacagacaaagagctgaaggagttgctccaatcaaacagggagcctaaagatttcaaaggatggttgggtggcttcacagagtggaaagtattgtactacctctgcaaagacaaggatggatttcttcacaaggatactgtcagggcagtctatgatggaagcctatttgcaaagatggagcaagagaagcagtctgctaagaagaaatga

SEQ ID NO: 4720 - DNA, 1449 bp, Oryza sativa
atggcgttcgcggcgaccaagccgagcaagtctccccttctcatcctcctcgtctccggcgtcgcgttcctgctcctcgcctccgccgccgagtgctacggcggcggccgccacgatgtgacgcggtcggccgtggcgcggcgctccggcgtcgggagccggcggcagtacgtgcgccaccgcctgaccggcggcgccgtggacgttccgcacagcgacgacgacggaggcgccggcggcgggaagcaccaccgcagccacaagcaccgggtgcggaactggatcatcgggttcgtggtcgggtccctcgccggcgtcgtctccgggctggcgatgtcggtgctgttccggatggcgctcaactgcgttcggggggggtaccggagcaagtccgacacggtgatcttcatcccgaagctgatcaagagcaaggagcacctggcgttcctggagaaggaccaggacgggctggcgtcgctcgccgtgatcgggcgcggcggctgcggcgaggtgtacaaggcgcagctcccgccggagcgggaaggcgacgcgccgcggttcatcgccatcaagaagatcaagaagcgctccggcgacggctccggcggccagaacaacaacctgagcgacgaggagagccggcagcttgacaagtggacgcggcagatccagtcggagatccgcaccgtgggccacatccgccaccgcaacctcctcccgctcgccgcccacgtcccgcgccccgactgccactacctcgtctacgagttcatgaagaacggcagcctccacaacgcgctcaaggccaccaccaccgacaccacgacgaacgactacaacgacaacaacagcggcgagcatccgccgccgtcgccggcgctgccgtggccggcgcggctgcggatcgcggtggggatcgcggcggggctggagtacctgcacgtgtcgcagcggccgcagatcatccaccgcgacctgaagccggcgaacatcctcctggacgacgacatggaggcgcggatcgccgacttcggcctcgccaaggcgatgcccgacgcgcacacccacatgacgacctcgaacgtggccgggacgctggggtacatcgcgccggagtaccaccagactctcaagttcacggccaagtgcgacgtgtacagcttcggcgtcatcctggcggtgctgggcaccgggaaggagccgacggacaagttcttcgcgcagcaggtggtggacgacgtcgggatcgtgcggtggctgcggcgggtgatgcaggaaggggaccccgccgcgcaggccggggtcatcgacgccgccatcgccggcgcgggccacgacgagcagatcctcctcgtcctccgcatcgccgtgttctgcaccgccgacgaccccaaggaccgccccaccgccaaggacgtccgctgcatgctctcccagatcaagaactag

SEQ ID NO: 4721 - DNA, 774 bp, Oryza sativa
atgaagcccaggcctaccggattcggggccgcggcggcggcggcggcggaagttttggtgggggccggatgcggtgaatgggcgtgraggccgaggccgaggccggcracggtggcctccacsgcggcgatgtcggtragggggcctggtactacccaggcggccgcggcggcaagcgccgtgcactcggagcgccaccgcggcggggtgcacgggctgcagctccctccgctgcggctgcagttcaccgccgacctggaggcgcggatcgagaaggtgatctacgcctgccgcttcatgaccttcctcgccatcgccggctcgctcatcggctccgtcccctgcttcctcaagggctgcgtctatgtgatggatgccttcatcgagtactacctgcacggtggcggcaaggtcaccctgatgctagttgaagccattgatatgtttctggttggaacggtcatgtttgtcttcgggacagggctatacgagctgttcatcagtaacatggacattgcaaagtcatcatcctatggctctaacctctttggcttgttcaggctcccggaacggcctgagtggctcgaaatccagtcagtgaatgatctcaagactaagctggggcatgtcatcgtcatggttctactggttggcatctttgagaagagcaagagggtgaccatcacatcatgtactgacctcttctgctttgcagcatcgattttcctctcttcagcttgcctctacctgctctccaggctcagtagcaagtag

SEQ ID NO: 4722 - DNA, 1527 bp, Oryza sativa
atggccgcgaccccgccgtcgtcgcagcaccggcggccgctgtcctcctccgcctccgccgcctccctcgctggcaagccgcgggggggcgggctcctgctcgggcggtacgagctcggccgcctcctcggccacggcaccttcgccaaggtgtaccaggcgcggagcgcggattccggggagccggtcgcgatcaaggtgctcgacaaggagaaggcgatgcggcacggcctcgtcccgcacatcaagcgggagatcgccatcctccgccgcgtccgccaccccaacatcgtgaggctgttcgaggtgatggccaccaagtccaagatctacttcgtgatggagctcgtccgcggcggggagctgttcggccgcgtcgccaaggggcggctcaaggaggacaccgcgcggcgctacttccagcagctcgtctccgccgtcgggttctgccacgcgcgcggcgtgttccaccgsgacctcaagcccgagaacctcctcgtcgacgagcacggcgacctcaaggtctccgacttcggcctttccgccgtcgccgaccagttccaccccgacggcctcctccacaccttctgcggcacgccctcctacgtcgcgcccgaggtgctcgcgcgccgcggctacgacggcgccaaggcggacatatggtcctgcggcatcatcctcttcgtgctcatggctggctaccttccgttccatgaccagaatctcatggccatgtaccgaaagatttacaggggggaattccggtgcccgagatggttctccaaggatctttccagtctactgaatcgcatccttgacacgaacccagagacaaggatcactgtcaaagaggtcatggagagcaggtggttccagaagggattccggccggtcagattctatgttgaggatgatcaggttcacagcttggcagatggtgataatgatatgccggagttggaacctagtgagcctcctcctcctcctccgtttccgccgccgccgccgcagcaagatgatgacggtgaggagtcgggatgggagtcggactcatccgtggcatcatgtcctgccacattgtcatctgaggagcgtcggcaaagacctctcgggtctctcacacggccagcaagtcttaatgcgttcgatatcatatcgttctcaaagggatttgatttgtcggggttgtttgaggagcgagggagtgaagtgaggttcatatcggcagagcctatgcaaacaatcatcacaaaattggaggagatcgcaaaggtgaagagcttcttcgttcggcgaaaagactggcgagtgagcatagaaggcacgagggaaggtttgaagggtccattgacaatcggcgctgagatatttgagctcacaccaagcctggtggtagtggaggtgaagaagaaggcaggggataaggaagaatatgatgacttctgtaacagggagttgaaacctgggatgcagcatctcgtacaccatatgggatcagttccaaatataccttctgatacggagtag

SEQ ID NO: 4723 - DNA, 3513 bp, Oryza sativa
atggatcatgtagtcgggggcaagttcaagcttggaaagaagatcgggagtggatccttcggggagctcttccttgctgttaatgtgcagactggagaggaagtcgccgtcaaattggaaaatgttaagacgaagcacccacagcttcattatgagtcgaagctgtacatgcttctgcagggaggaactggtattccgcacttgaagtggtttggcgtggagggagagtacaatgtgatggtgatcgatcttcttgggccaagccttgaggacctattcaactattgcagtaggaaattctcgttaaagactgtcctcatgcttgctgatcagatgatcaatcgagttgagtacatgcatcagaagggatttcttcaccgtgatatcaagcctgataatttccttatggggcttggtaggaaagccaatcaggtatatataatagattatgggcttgcgaagaaatatagggaccttcagactcacaagcacatcccatacagagagaacaagaacctcactggaacagctcggtatgcaagtgtcaatacccatcttggtgttgagcaaagcagaagagatgatctagaatctcttggttatgtccttatgtacttccttagaggcagcctaccatggcaggggctgaaagcaggcactaagaagcagaagtacgacaaaataagtgagaaaaagatgcttactcctgtggaggttctttgcaaatcttacccatcagaattcatttcttacttccactactgccgttcattgaggtttgaagacaagccagattattcttacttaaagaggctattccgtgatctctttatccgggagggatatcaatttgattatgtatttgactggaccattttgaaatatccccagataggctccaaaccactgatgaggccaagtgaaagaaccagtggagctgcgggaccttctatggagaagatggaaaaggccccaggtgaagcatctggcagaaggaatcctactggttctttgaatcagagtgacaattatgcacaacggccgtcaatgtcactaaaggaaatcatgcatagcaccgaccggtccggcgaaaggaccgtggaaagaccccgtacatcctcccgtacaggcagtgcatcaaggagagcggttgcgtcaagcagcaggccaggttcatcggtggaaccaatggagcagcaatacagccggacaagcaggttgttctcaagcagtggaagccgtccttccagcacgcagagggttaatccatcggttggagagacaagggccacttctctctcacgagcagccgttgcaagagggtcccgcgacgagcctctccaccgcagcctggagctgctgtcccttggtggcgttaatgaggaaatatttttggcctgggctccaagaacgcacttacgtgggccgattgttgcgctggccaacctcatccccgaagatgacgccgtcgacgagctcgacagctacatgtatcaaactatgaaatttgatgcaatttcattgattggacttgcttgtagggagcagggtcttaaatataatgttaccacaggcgatgaagtggaggatatgtttgcgctcttgagcgaggttaaaaggcaaatcccatccatcactgcagtgtcttcaggcgccattgcgtctgattatcagaggcttcgtgttgagagtgtctgctcaaggttgggcctggtatcgctggcgtatttgtggaagcaggatcagactttgcttcttgatgaaatgataagaaggggcatagtagctataatcgtcaaggttgccgcaatggggctcaaaccttctgctcacttagggaaagaactggctgaacttaagtgtcatctgctccaactgaatgagagttatggaatcaatgtctgtggtgaaggtggcgaatatgaaacactaactcttgactgccctctattccgtaatgcaagaattgttcttgatgattttgaagttatactccactcgcctgattccatcgctccagtaggaattcttcacccgttaaaatttcatcttgaacacaagccaaattcttttggcaccgttggtgatagtgctattgcccaagagaattctagttatttgtatgaagtagatggagctattgcacacagtgatgtcgaaaagaaacaagagaccttgagtccagttacaactgttgatgcttgcacaaatatagacctatgcatctcaaagactggcaaaaagttgttctccattggttgttggattcaggatccctgtggtacttcagaaggcctgaagacagatctagtagcagttttgagcagaatcgagaatcagctcaaggaagaagggttaggttggatgaatgttctgtatgttcacctcttcatttcaagcatgaaggaatttggattggccaatgaagtttatgtgagctttattactgaacaaaaatgccctctgggtgttccttcacgtagtacagttgaattgccactagttcaggttggtttaggccatgcatatgtggaagttctagttacaaaggagcaagtcaagagagttctacatgtacaaagcatttcatgctgggctcctagttgcatcggaccttatagccaggcaacacttcatggagagattctctatatggctggtcagctggggcttgatccccctacgatgaagctctgtcctgggggcccaacggctgaactagaattcgcattacgaaacagtgaagctgttgctaatgcctttggttgctccattttttcttcggcaatacactttctggtgtactgttctgcacacttgacgtccagtgaaaaagaacaagttgaacatacacttcgtagttcgtacatcaccagtttggattgctcaaataccggatcatatcccaccattctctatgtatttgcatcagatcttccaaaaggagcatacgtggagataaaaccaatattgtatgtccccagtcccactaatgatgatggagtcccaaccagagaacaggaggctggagggtcattgccagcatcaagcgaagcttttagtgcctggagcgcacaatactctgacctggatgattcatgctgccaggtgcacacaatcggtgggaaaatttgctctgctgttgtttcagtcacaaatgatattgcattgaaaatctgttctacaactgaacaactataccactcggaggagcatttgaaagctttggctagattttgtgcattccagcttgctaagattctgatagataatggcttttcctgggacaacctaacgatgttaagattctactattcagtagagcacccagtgactgcggatgtgatgtcccgtgtattttctgaggcattcgccgagcttgaagaaggtggtgttggttcctgcacacctgatggggttcctattttcaacatcgtgccagtgtcggcatctggttgcttcacatcgttaagcgacattatatcatgcgagctattagcttcgaaagtttaa

SEQ ID NO: 4724 - DNA, 500 bp, Oryza sativa
atggagagcgccatgttcgggctggagacgccgctgatgacggcgctgcagcacctgctcgacatccccgacggcgagggcggcgccgccgggaagcagggcgcgaccggtggcccgacgcgtgcgtacgtgcgcgacgcccgcgccatggcggcgacccccgccgacgtgaaggatctgcccggggcgtacgcgttcgtggtggacatgcctgggctcaagtcctccgacatcaaggtgcaggtggaggaggagaggctgctggtgatcagcggggagcggcggcgcggcggcggggaggaggagaaggaggagtcgtgcaagtacctgcggatggagcggcggatgggcaagttcatgcgcaagttcgtgctccccgacaacgccgacgtcgacaagatctccgccgtgtgccaggacggcgtgctcaccgtcaccgtcgagaagctcccgccgccggagcccaagaagcccaagaccatcgaggtcaaggtcgcgtg

SEQ ID NO: 4725 - DNA, 4344 bp, Oryza sativa
atggctctcctcctcccggggtggatggccaccacggcgtgctcgccgccgtcaggtggttccttccccgacctgctcgccttcctcttcctctcgccctgcccgcagcgcgcgctcctcggcgccgtcgacctcgtcttcgtcgtcgcgtccctcgtcgtcctcgcccttccccgcggcggcggtggcggcgctggggatggtcccgaacgggaggcgcttctgccgaagcctcgggcgtcgggaaggcctttccgggtcgcggtcgcgctcggggcgtcgggggtgttcgcggcggcgtcggccatcctcctcgcgctcgcgttgttcctcctgccgaacacggtatggagggtttgggaatccgccttcctcgccgtccacttcgtcgcgcacgccgtggcggcgtggaccatcgcgtcgcggaggggagcggccggtggcgccctccctctgcagctccgcgtgttttgggtcgtgacggccctcgtcggcgcgctcttctccgcttcggccgcggtccgctgggccgaggattcgctgcttttccccgacgaccccctcgccttcgccggcctcgccctctcgctgcctctggtgtatgtagccatcaccgcctcatccggcgaggtcgcaggtacgtgcgaacgcgaacccgctgacgtcaccaccgcggcggagccctctacgccgtacgacgcggcgtcgtggctgtcgcgcgcgacgttcagttggatcaatccactggtctccaaggggtacgccagcgactcgctcgccgccgaagacgtcccgccggtgtcgccggcccaccgcgccgaggcgtcgtacgctcggttcgtgtccaactggccggcgcaggggtcgcgctacccggtgggcgtcgcgctgtggctgtccttctggccgcgcgtcctattgacggcggcgctcggccttgtgcgcctcgccgccatgtacgttggcccgtcgctcatcaaccatttcgtcgacttcatcagccatggcggcacgacgtgggagggcctccggcttgtcgccatcctcgtcgccggcaaggcggtgcagacgctggcctcgcaccactacaacttccaggggcagctgctggggatgcgcatccgcggcgcgctgctcacggcgctgtaccgcaagtcgctgcgtctgtccaccggcgcgcgccgcgcgcacggctcgggcgccatcgtcaactacatgcaggtggacgccgggacggtgtcctacgccatgcacggtctccacggcctttggctgatgccgctgcagatcgtggtggcgcttgtcctgctgtacgcctacctcggcccctccgtgctcatgacgcttgccgtgatcaccgcggtcaccgtgatcaccgcgttcgccaacaagctcaacttggcctaccagctcaagttcctcggcgtccgcgacagccgcatcaaggccatcaccgagatgctgaaccacatgcgtgtcatcaagctgcaggcctgggaggagaaattcggtggcaaggtgcgagaactcaggcagactgagatggggtggttgaccaagattgtactcttcatgtgcgccaacaatgtcgtgttctccagcggcccactcgccatgactgtgctggtctttgggacctacctcgccaccggaggagagctagatgccgggaaggtgttcacggccaccgcgttcttctcaatgctcgaggggcctatgcacaacttcccgcagacgatcgtgatgtgtatgcaagcgtttgtgtcacttggcaggctgaacaagttcctgtctgatgccgagattgacagcacggctgtggagcgcattgctagtagcgccggtgatgcagcagcggtgaaagtacagaatggagtgtttgcttgggatgtgccagttgaaggtgcagaggatgcccggcagggccatggtacggagaatggccgagaggaggggccagagatggagatggtgctgaaggggattgaggtggaggtgaggaagggtgagctagctgcggtggttgggacagtgggctctggcaagtcgtcactgctgtcctgcattatgggagaaatgcacaaggtttccggcacggttagcatatgtgggagcacagcttgtgttgctcagacagcttggatccaaaatggaaccattcaagagaacattttatttggacaaccaatgcattcagagaggtacagggaagtcatacatgcttgttgcttagagaaagatttagaaatgatggagtttggagacaagactgaaataggagagagggggatcaacctcagtggtggccagaaacaacgcatccagcttgctagggcagtttatcaagattgtgatatatatctgcttgatgatatctttagtgcagttgatgctcatactggttcagctatcttcaaggaatgtctgaaaggtatactcaagaagaagacagttttgcttgtgactcaccaagtggatttcttaaagaatgtggatacagtattcgtaatgaaagatggggtagtcattcagtctgggagctacaaccagctactaacatcatgctcagatttttcagttcttgttactgctcaccatagttcaatggaggttccaggggcagcagagcaaatgtcccatgatcagaccactgagtattctcaggacaccaccgtaccagcaaaatctcctgtcaagtccaattctagtaatgaaaatggaggtaccagtgttgcaccaagcaaagaagcaggttcatctaaactgatcgaggaagaggaaaaggagagtggccgagtaagttggcaagtgtacaagctatacataacagaagcttggggttggtggggagttctggtcattttagctgtatcagttctgtcggaaggctccagtatggctagtaactactggctctcatatgaaacatctgggggcacaatatttgacacttctgtttttcttggtgtttacgtttcgatagttgctgcttcaattgtatgtgatgcgatcagtactcttttcgtgacattcttggggtttaagtcagcccaggtcttctttaacaagatgtttgacagcattctacgggcaccaatgtcattttttgacaccactccttctgggagaatactaagccgggcatcagcagaccaaatgaaaattgacactgcccttgtattctatgttggttttgctacatcaatgtgcatttccgtgaatcgttacatcgcaacatctcgagagttaactcgtcttcaaggagtaacaagggcacctgttattgatcacttctcagaaacctttttgggtgctccaactgtaaggtgctttgggaaggaggatgagttttaccaaataaacttggacagaatcaattcgaatttgcgcatgtcttttcataattatggagctaatgagtggctgggttttcgcctggagttgattggcacacttctactgtctataactgcttttcttatgatcagcttgcctagcaatttcatcaagaaagagtttgtcggcatgtccctttcgtatggtctatctctcaattcactggtgtactatacaatttcaatgacctgtatgatagaaaatgacatggtcgctgtggaaagggtgaatcagtacagtactcttccttctgaggcagcatgggaagtggcagattgtcttccctcaccaaattggcctagaagaggagatattgacgttaaagatctaaaggttaggtatcgatcaaacacacctctaatcttgaagggcattactattagcattaacagcggagaaaagataggagttgtgggaaggactggcagcggaaagtcaactttagttcaggctttgttcaggcttgtggagcctgtagaagggcatatcatcgttgatggagtagatattggcactttgggccttcatgatctcaggtcgcgctttggtgtgattcctcaagagcctgtgctctttgaaggaaccataagaagcaacatcgacccaattgggcgatattctgaggacgagatatggcaggcccttgagcgttgtcaactaaaagatatagtagctacaaaaccagagaaacttgatgcactagttgccgacatgggggagaactggagcgtaggacagaagcagctcctctgctttggtcgtgttattctgaagcgcagccggatcctgttcatggatgaggcaacagcttccgttgattctcagacagatgcgactatccagaggatcatccgagaagagttcactgattgcactatcatcagcattgcgcaccgcataccgactgtcatggacagtgatagagtccctagtgttggatgcaggtga

SEQ ID NO: 4726 - DNA, 1443 bp, Oryza sativa
atggtttcctctgaaataagctctgttacaacaacccatgcacaaggtcccaagctctttagagggaagatacttctgccaatgggccctccagatgttgtgccttctgagaacgttgagttcgatttttctgatgtttttggtcctacggcagtccagactcccacagatctgagcatcctcactccagacagtcctgcacctttgactgagtccagtgaggggatttacaatgaccctttggttattgtcaagagatctcattctcttgttggtccaagttcacttgttagccaatctttgccacttagtaagcttacactgcatgaatctgatagcgcattggaccttctggagtgtactaaagaaaagaaaagcaaccaagaagctctgagtgatgaagagcttgatgatacaaaaaatgagaatggtgttgttggacttgacgactttgaagtcttgaagcttgttggccaaggggcatttggcaaggtctttcaagtgagaaagaaaggtacttcagaaatatacgcaatgaaagttatgaggaaggacaagattttggagaagaaccatgctgagtacatgaaagcagagagagatatactgactaaagttgatcatccttttgttgtacagctgaggtactcctttcagacaaaataccgactttaccttgtgttggacttcataaatgggggccatcttttcttccagctctaccaacagggtttgtttagggaggagcttgcacgcatctacactgctgaaatcgtgtctgctgtagcccatctccatgccaatggaattatgcacagagatctgaagcctgagaacatcttgttggatgctgatggacatgccatgctgactgattttggcctggcaaaggaatttgatgaaaacactagatcaaactcaatgtgtggtactgttgagtacatggctccagaaattgttcagggccgtggtcatgataaggctgctgactggtggagtgtgggaatccttttgtttgaaatgcttacaggaaagcctccgtttgttggcggaaacagggacaaagttcagcagaagattgttaaggagaaaattaagcttccggcatatttatctagcgaagttcattctctgctaaaaggcttactgcacaaagaagctggcaggaggctgggctgtggaccaggcgggagcaatgaaataaagaatcacaagtggttcaagtcagtaaactggaagaagctagactcccgacagattcagccaagcttccgcccaaatgttgctggcaaaacctgcatcgccaactttgacgagtgctggaccagcatgcccgtgctcgactctccagtggccagccctgtcgctgcagatagcaacttcgtgggattcagctatgtgaggccagcgcccttccttcagaggccgagtcctctaggctga

SEQ ID NO: 4727 - DNA, 1653 bp, Oryza sativa
atgagcggcccaatgcaacgctcgtcgcagccacagtttatctctagcgtcgagcggaacaatcaatcgaatggtcctggcactcctcttattgacagcatagatgttgatcagattgttattccagagaaaaatagttggaagaacctattttcatacatagggcccggatttcttgtctctattgcgtatattgatcctggaaattttgagacagacctacaggctggagcacagtacaaatatgagcttctttggatcatacttattgcgtcatgtgctgctcttataattcaatcacttgcagctaggctaggagtcgtgactgggaagcacctggccgagcattgcagagctgaatatccaaaggctacaaatttcatattatggattcttgcggaactagctgtagttgcatgcgacattcctgaagtaattggaactgcttttgctttgaacatgctctttaaaatccctgtgtggtgtggtgttctgataactggactcagcactctgatgctactgttactacaacaatatggggtccgtaaactggaatttctgatagctattctggtgtcattaatagcaacttgtttcttagttgagcttgggtattctaaaccaaattcttcagaagttgtgaggggcctttttgttcctgaacttaaagggaatggagccacaggtcttgctatctcactacttggtgctatggtgatgccgcataatctttttctccactcagcattggtactatcaagaaaagtgccacggtcagttcatgggatcaaagaggcatgtagattctatatgattgaaagtgcatttgccctcacgatagcgttcctcattaacatatctatcatatctgttagtggtgctgtctgcgggtcagataatttgagtcctgaagaccagatgaattgcagtgatcttgatcttaacaaagcttcgtttttgttaaagaatgtcctcggaaactggagctcaaagttatttgcagtagccttgttggcgtctggccagagttctacaattacaggaacttatgcgggacaatatgtcatgcaggggtttctagatcttcggatgacaccctggatacggaaccttctaactaggtccttggcaattctgccaagtctgattgtttcgataattggaggttcctcagcagctggacagttgattatcattgcatcgatgatactgtcatttgagcttccttttgctctagttccactcctaaaattcacaagcagcaggacaaaaatggggcagcacacaaattcaaaagccatttctgtgataacatggggaattggttcgtttatcgttgtcatcaacacctacttcctgataacaagctttgtcaagctgcttctccacaacggtctatcgactgtatcccaagtattctccgggatattcggtttcctggggatgctcatatacatggctgcaattctctacctcgttttccggaagaacaggaaagctaccctgccattgctggagggcgattcgacggtccgcatagtaggtcgcgacacggccactgaaggagaaggttctcttggccatctgccccgggaggacatctccagcatgcagcttcctcagcagcgaactgcttctgatctcgattag

SEQ ID NO: 4728 - DNA, 1850 bp, Oryza sativa
atggctgtgaaggcgagttctgcagataacaggaccagaagcaccgtgtcactatgcatagtgattggcatgtgctgcttcttctacatccttggggcatggcagaagagcggatttggaaagggggacagcattgcgctggagatcacgaagcgaacggactgcacaatcttgcctaaccttagcttcgacacgcacctcgctaagcaggcaaggcctcgcgatctcgtttcgccggcgaagaagtttaagccgtgcccggatcgctacacggattataccccttgccaagatcagaacagagcgatgaagttccctcgggagaatatgaattacagggagcggcattgcccaccgcagaaagagaagctgcactgcctgataccgccacctaagggatatgttgctccattcccatggccgaaaagtcgggactatgttcctttcgcgaattgtccctataagagcttgacagtcgagaaagcgatccagaattgggttcagttcgaaggcaacgtcttcagattccctggtggaggaacacaattccctcaaggagctgataagtacatcgatcaacttgcatcagttgttccaatcgccaatggaactgtcaggactgcattggacactggctgtggggtggctagttggggagcttacttattaaagagaaatgtcttggcgatgtcatttgcgccaagagattcacacgaggcacaagtgcagtttgctctggagaggggtgtcccagctgttatcggtgttcttgggacgataaaactcccttacccatcaagagcctttgacatggcccattgttccaggtgtttgattccatggggagcaaatggtggaatatacatgatggaagttgatagggttctaagacctggtggatactgggtgctttcagggcctccgattaattggaaagtgaactacaagggttggcagcgtacaaagaaagatcttgaggcggagcagaataaaatagaggaaattgctgaccttctttgttgggaaaaagtcaaagagattggtgagatggcaatatggaggaaaagattaaacactgagtcttgtccctctaggcaagatgaatcaagtgtgcagatgtgtgactcaacaaatgcagatgatgtctggtacaagaagatgaagccttgtgtgacacctattcctgatgtaaatgatccaagtgaagttgctggaggtgcaatcaagcccttcccaagcaggctcaatgcagttcctccaaggattgctaatggcctgattccaggtgtttcatctcaggcctaccagaaagacatcaaaatgtggaagaagcatgtcaaggcttatagcagtgtgaacaagtacctcctcactggaagatacagaaacattatggacatgaatgcaggttttggaggatttgctgctgccattgagtccccaaaatcttgggtgatgaatgccgtgcctacgatttcaaagatgtcaactctaggggctatttacgagcgaggattgattggcatataccacgactggtgcgaagctttctctacttacccaagaacgtatgatcttatccacgctagtggccttttcaccctgtacaaaaacaagtgcaacatggaagacatcctactggagatggaccgcgtcctgaggccagaaggcgccgtcataatgagggacgatgtcgatatcctgacgaaggtgaacaggctcgccctcggcatgaaatggaacacgaggctggtcgatcacgaggacggccccatggtgcgtgagaaggtgctgtatgctgtgaagcagtactgggtaggcggaaaccagactgcagcagctgcagcatg

SEQ ID NO: 4729 - DNA, 624 bp, Oryza sativa
atggccaccgtggatggcacaacggcgccgagctccggcggcaagacggcgacggtggcgttggagtcgggcggcggccgctacggtgggccggctccggcgaaatgctccggcgccaacctggccctgagggcgctgctcttcgccgtgtcgctgtccgcgctcgtggtgcttgtcaccgccaagcagacggtgatggtcccgttcgtcatccggccgccgcagttcatcctcgcgccggtccccgccaagtacacgcactcaccggcgctcatatatctgctggctgcgctgtgcgcgacgtgcttttacagcctgatcacggccatcagctcggtgaggttgctctccagctcggcttgctctgccaagacgctcttctacctcatcctgcttgatgtgttctacgcagccgtgatggcgtcggcgaccgggacagcgggggccgtggcgtgggtgggactgaaggggaactcccacacccggtggaacaagatatgcaacgtctacggcaagttctgccgccacatcggcagctccaccttcctcgccctcatcgccgccatcgttctcgtcctcctcgccttcctcaacgcctactccctctaccgccgaagccgttga

SEQ ID NO: 4730 - DNA, 1599 bp, Oryza sativa
atggcaggagttggcactcagccgacgagcctcaggaagtatcttggagccctcaaggacaccacaactgaattggatattgcaattgtgaaggctacaaaccatgttgagcgtccatcaaaggagaagtacataagagaaattttttattccatttctgcttcaaggccacgagcagatgtagcttactgcatccatgcccttgcaagacgtctttccaagacacgcaattgggcggttgcattgaagacattaattgtcatacatcgcgcccttcgagaggtcgatcccacttttcgtgaagagcttatcaattatggcagatctaggtcccatatgctaaacttggcctactttaaggatgattctagtgcaggagcttgggatttttctgcttggatacgcacttatgctttatatttagaagagagacttgaatgtttccgagtgctgaagtatgatgtggagacagatcctccgaaaactcgggatcttgaaactggtgatttgcttgatcatctgccagcattacagcaacttctttttcggctccttgcttgccagccacaaggggcatcatcttacaatgtcataatccagcacgcactttcaatggttgctctggaaagtgttaagatctacactgctattagtgatggtacaattaatctggttgacaagttctttgagatgcaaagaagtgatgctgttagggcacttgatatatacaaaagagcaactaaccaggctgaaagactatcagagttttatgaagtgtgtaaaacgatacacattgggcgtggtgagaagttcttaaaaatcgaacagccttcattcttagtaaccatggaggaatatgtgacagaagctcccactgtagctcaaaaagataaggtactggcaatcgaatacaagaaagaggcagaggaggaagaaaagccggcatcgcctcctcccgctccagagccagaaccagaacaagaaccagagccagagcctgaaccagtaaaagaggaagcacctaaagaggagccaacagatttgctgatgatgtacctaaaagttgcacctgctcaaaatggagtcactggctgggagctggcccttgtcaccacacccagctcaaacgaaactgctattacttcaagcaagaagctggctggtggactggacttgctcacgctcgacagcctgtacgacgacgcgaaccggagagcgagccagccgacgagctacaacccatgggatgtcaaccccggcgtcgccggcgccggcgccgccccgatgatgcagcagccgatgatgcacgacccgttctacgcctccagcggctacgcggcgccgcacaacgtgcagatgaccgccatggcgcagcagcagcaggccttcatgctccagcagcagatgatgatggccgccgccgccgccgccgccgcggcgcccccgcctcaggtgttccaccaccaccagcagcagcagcagcatctccaggccaacccggcgaacccgttcggcaacccgttcgccgccgccgcagccgcccaccacccttacggcgccgccgccgccgccggcaacggctacacggggctcatatga

SEQ ID NO: 4731 - DNA, 708 bp, Oryza sativa
atgcatcgcgcacgcctcctcgtcgtcgtcgtcaccgccgtcgtcaccctcctgctcctggcgccggccgccggagccgaggaagacgatcagttcggctacatccccggcacaccgagggggccggagaactggggcagcctgaagccggaatgggccacctgcagcagcggcgagatgcagtcgccgatcaacctcggcctcctcgacctcaccctggcccccggcctcggcgacctcaactacacctaccgaaacgccaaagccaccgtcgtcaaccgtggccacgacatcatggtcaggttcgacggcggcgatgacgccgccgccgccggcgggctggtgattaacggcacggcgtaccggctccggcaggtgcactggcacgcgccgtcggagcacgccgtcgatggccggaggtacgacatggagctgcacatggtgcatctcaacacccagaaccagaccgccgtcgtcggcatcctctacgccatcggcgcccaggatgagttcctgcacaagttggagccatatattattgaagttgcagaccaaaaagataaggagaagattgtcaatggtggggtggatccaaacgtggccaaagagcatgatatcgtgtattaccgctacatgggctccttaaccacaccaccttgcaccgagggagttatctggaccattgtcaggaagatgaagaggttctaa

SEQ ID NO: 4732 - DNA, 657 bp, Oryza sativa
atggccgtggacctcatgggcttcagcccgcgcggcggctgccgcccgtccgtggagacggagcagctcgctttccaggaggccgccgccgcggggctccgcagcctcgagctgctcgtctcgtcgctctccgccgggggggagcaccaccaccgccgccgcccgcaggagaagcagtcttcgccgccgctgggggagatcgcggaccaggcggtktccaggttcaggaagctktycaagggccggarcctggtctcctccgggaagcccccgtttgccggcggcgtcaagcgcaagcacccgsamccgccctgcgccgccgccggcgacggccacggccacggcgcaggccacgcgcacgcgcacggcgggtgccactgctccaagaagcggaagcagcgggttcggcgcacggtgcgcgtggcggcggcgagcgcgcgggtggcggacatccccgccgacgagtactcgtggcgcaagtacgggcagaagccgatcaaggggtccccctacccgcgcggctactaccggtgcagcaccgtcaagggttgccccgcccggaagcacgtcgagcgcgccgccgacgaccccgccaccctcgtcgtcacctacgagggcgaccaccgccactcgccgccgccgccgccgcttgtttaa

SEQ ID NO: 4733 - DNA, 2870 bp, Oryza sativa
atggaactctycggcgagaccgcctygccggcgccsgagcccgagccgccggggcagccsgaggtgtcgccgccgggggccgggatgtttgaggatgcagtggaggggtcgtcgactgccacggagtcgccggtggcartggcgcggccagacggcgaggccaccaccgagtcctcttcgccatcagcgtcgaggacgctggccggcgacgagccggcggccgcgggcgcaggggaagtggaggcctacggcggggatgagtcgccgtcggtttctgaaccgcgagaggagtcgggaagtgtggatacgggaagcgccgcgtcgccgtcggttttgcgatcggagcagcgtgcgaggggggcggaggagcaggagaattccatggccgcgcagttgggggaaggatcgccagcgagggaggagacgaagtcgaggatctcttcggcgccgtcgtcgccggttctatcgggcacgtcgacctcgtcgtcgtcgccgctgtcacagatcaagcatcaggcgcggcacgtgcgcaccggcagcttccagcgtttccggcagcagatgcagcgggcgtggaaatgggggccaattggaagtggaggcggcggcgagaggagccccagggagcagctgctgcgtacgacagtgaactttgaagctatggcgcatcagaagcggcagtggtatcaaatccaatccaagtcacgggacaataagcagtataaggaaccaacaacactctttgaacattttttcgtagtcggacttcattcttatgcaaatgttggagtcattgaggatgcatttgcaaagaagaaagcttgggaatctaatgtagaacactcggagattgtagatcttagaaaaattcaatatcatggacctataccaaccatggaaccacagattcttttcaagtatccacctggaaagaaagcggaaattagggaaattgatttgccgtcattctgttttcccgagggtgtaaagctttgtttcattaaaaggaggtctgagaggaagattcagttaagggcccgcttaatagagaggactccatcaatgagtgatctgaatgaagtggtatttgggcaggaacatctgtgtcgagatgacctgtcttttattttctccatgaaggtatcagataatgcaccactatatggtgtttgtctgcatgtccaggaaatagttcagagagcaccgggtatactaggcatggtttcaccactaaaccctacttcctacaagccaagtcgtttcttggtttctgcaccacgatgttactgtttactcacaaaagtgcccttttttgagctgcattatgagatgctaaacagcataattgctcaggagaggcttgacaggataacacagtttgctagtgaaattgctctggcagaaccaatcccccgctctatgaaagagcaaagtcaagtaaatggggaggattttgaatccgcaaatgagctttcttacaatgattggacagaatatgctgtacctgtcaacagtatatcaggtctcatctcttcatcaggacttccatcagagggagagattccttcatatttgttcaggagttgggagcctaattctcctgaaagtatgtcggctagtgagacttcagattctagttacataagagaactcgagaaggaaggcaggcatagtttccaacaatatgaggattgtatatcagagaacttgggatcccgttgtgatagctttggaagaacaagttatacttatgagaatggacatacttccccagatcttctctccacacattcgcctatctccagaagaatcatgcgtgcacagagcatggagtctttacacagttctgtgaaaggtgttgggtcagatgaagaagaagaactaaatatgaagcaagaaatagttgttgatgatgaaaaagttatgggatgggctaaggtacacaacaatgaacctctgcagattgtttgtggctaccatgctcttgctctgccacctcgtggaggtgaacttgttttccacccccttgaacatctgcaacctgttaaatactcccggcctggattgtctttattggggttaggagacacaatttcagacaatggtttgacttcagtagaaaaaactgaggtcaatgcccgtttggcggctgcagaagaagctatcgcattatcgatatggactacagctacaatttgtcgtgctttgtctctcgaaagtgtgctagagttatttgctgctgctctgttggagaagcagattgtggtaatatgctcaaatctgggtgtactgtcagctattgttttgtcagttatgccgatgataagaccattccagtggcagagtttattgcttcctgttctaccaagaaaattggtggattttcttgatgctcccgtccctttcattgctggtgtccaacataaaccccctgatattaagatgaaagcatcaagtattgtcagaatcaatgtagataaagatcaggtgaaggcatgctcattacctcaacttccacgattcaaagaacttgtttctgatctcagtccaattcatgctagactttcatgtgagaatgccctggctaagagacatccaatttacaaatgcaatgaagttcaggctgaggcagcttggcagttcttgaacgtcatgagatcctatctggagtcgctttgttctgacctgccatctcataccatcaccaatgtacagtcaaataatgacagggtttcgttgcttctaaaagacagttttatcgattcattcccctcaaaggaccgaccatttgtaaagctttttgtggagacgcagatgttctctgttctatcagattctcgactttccacatttgagaatgaactaacata

SEQ ID NO: 4734 - DNA, 597 bp, Oryza sativa
atggcctcctcagcaccgacgccgccgccgctcctcccggtgaccaacccggcagccgcggggtcgtccccggccgccaccgccgtgggatctgacgcgccgatcgcaaccccggcgttccggctcttcctgagcaagctctccgactcggcgcggcgctcgctgtccgaccggcggccgtggacggagctggtcgaccgctcggcgttctcgcggccggactccctctccgacgccacctcccgcctccgccgcaacctcgcctacttccgcgtcaactacgccgccgtggtggccttcgcgctcggggcgtccctcctcgcgcaccccttctcgctcctcgtcctcctcggcctcctcgccgcctggtgcttcctctacctcttccgcggctccgaccagcccgtcgtcctcttcggtcgcaccttctccgaccgcgagacgctgctcggcctcgtcgtcgcgtcgttcgtkcgtgsccttcttcttcacctccgtcgcgtcgctcatcatctccgggctgctcgtcggcggggccatcgtcgccgtccacggcgcgtgccgcatgcccgaggacctcttcctcgacgacgctga

SEQ ID NO: 4735 - DNA, 870 bp, Oryza sativa
atggaaatcaaggacgaggagacaacggcagaggtggccatggtggtgcagtcgcggttcagaagggtatgcgtgttctgtgggagcagccatggcaagaagaagatctaccaggatgctgccattgaacttgggaaggagctggtggcaagaaacattgacctagtatatggaggagggagtgtagggttgatgggtttggtttctcaagcagtacacaatggaggaaggcatgtcattggggtcattcccaagactctcatgcctagagagatatcaggtgagacagtgggggaggtgaaagcagtgtccgatatgcaccagaggaaggctgagatggccaggcagtctgatgcctttatagcattgcctggggggtatggaacacttgaagagctactagaagtaattgcatgggctcaacttggaattcatgacaaaccggttgggctgctcaatgtggatggctactacaatccgttgctgtctttcatcgacaaagctgtggaggaagggttcatcagacctagtgcccgccatatcatcgtcttggccccaacgcctaaagaactcattgaaaagctagaggagtactctccccagcacgagaaagtcgtgtcaaagatgaaatgggagatggaacagatgagctaccctcagaactacgatatccccaggccaaaggagggaaagatgatcatagaagcacaacggggaagcaggctatggataagtgatccaaagagaatggaatctgaaccagttccagacttccagtctgaagaaacagtgaacagtgagatttcagcaagggagaatgccagtttgggcctccacaaccacaaggatcaagggacctcctcgctgtag

SEQ ID NO: 4736 - DNA, 1242 bp, Oryza sativa
atggccatgcctcccccgcttttcgccgcgsctyccaagctccctcctcctcccttccccamcatccamagytccaccggatytgcggcccttccgcttccccttcggtyctyccgccgcccgcccgtygcagcagcagctgcctctggcgtccccgacgagtggggcgaccgctcgccctccgcgcccgagccgccytcccagcccgacccccccatcgacgacgacgagtggggccgcgacgacccctccgcctccgggaactctcgccccgtcctcgtcaccgacgagtggggcgagccgggtgtgcccgagccccaatccacctccgccgccgacccccctaccaacgacgacgagtggggtggggatccggcgccaccgccaccgccacctcctgtgccggaggaagacaacgaggaggaaaggcgggaggagctcaagcgctgcttggtggacactgtgtacggctccgacctgggcttccgggcgtcctccgagataactgatcgtctcaattgtgcatggtcatttacttgcagatatacagcgtattctgagcttctacctatcctagcagttggtgcagcaccattgttcaaagtcgatgagatatcgcaagaaattgacacaaatagcatgaccatagtcaatgcctcaactatctcaagtccattcgcttcgttttctttcagtgccactgcttcttttgatgtacagagtccatcaaggatagagatatctctacctactaattctagtggaattcagttagcaacacaaatgttaaagatttctacacaaacctcggtgcaccagaagcttgagatgtgcatagaaattattgagatttctgatcatcaactttcttgtgcaaatatgtacattgaccaaactgacatgttgatggtcattccaatgaaggtccaattcaaagagggaagctttcagccaccgaagatatcatcatcggtagacctacctgcagaggttgatatatttgggcagaagatcagcttgggcccagtccagcaggtgctgaaccctctgcagcaagcctttgcaagtattgcaggatccatttctgggcagccacccctcaagttacccatccctggcaacaacagggcccggtcttggctgctgacgacctacctagacaaggacctcaggatctccagaggtgatggaggtctcttcattcttgtcaaagagggtagccctctactagatcaattatag

SEQ ID NO: 4737 - DNA, 2112 bp, Oryza sativa
atggtgaaccgcgcacatttcgtcatcctcgtcctcgtttaccgcctcctggtacctctctcagccgagccagaccagaccagagagtcgtatgtcgtctacatgggcggcggcggcggcggcgccggcgccggcgccggcgtggaggaggaggcggcgcgggcgatgcacatggagatgctgacgtccgtcgcgccggccggcgacgatcaggggaaggcggcggcggcgctgacgcagagctaccaccacgcgttccagggcttcgccgccgagctcaccgaggcggaagccgccgcgctttccgggcacgagagggttgtgtccgtgttcagggatcgcgcgctggagctgcacacgacgcggtcgtgggacttcctcgacgtgcagtccggcctccgctccgaccgcctcggccgccgcgcctccggcgacgtcatcatcggcatcgtcgacaccggtgtgtggccggagtcggcgagcttcagcgacgccgggatggggccggtgccggcgcggtggcgcggcgtgtgcatggaaggccctgacttcaagaagagcagctgcaacaagaagctcatcggcgcgcggtactacggcagccagcccggctcggcgtcgtcgtcgtcggcggcgggggcggtgacggcgacaggcggctcgccgcgggacgccgtggggcacggcacgcacacggcgtcgacggcggcgggcgcggtggtgcccggcgcggggtactacggcctggcccgcgggcgcggcgaagggcggcgcgccggcgagccgcgtggccgtgtacaaggcgtgctcgctgggcgggccatcgacgacgctgtgggcgacggcgtggacgtggtgtccatctccatcggcatgagctccgccttccagtccgacttcctcgccgaccccatcgcgctcggcgccttccacgcccaccagaggggcgtcctcgtcgtctgctccggcggcaacgacggccccaacccctacaccgtcgtcaactccgccccctggatcctcaccgtcgccgcctccagcatcgaccgctccttccactccaccatcgtcctcggcaacggcaccctcgtcaagggaattgccatcaacttctccaaccagagcatcaccggaggccagtacccgctggtgttcgggccacaggtggccggccggtacacgccggtgtcggaggcaagcaactgctaccccgggtcgctggacgcgcagaaggcggcggggaagatcgtggtgtgcgtgggcacggacccgatggtgtcgcggcgggtgaagaagctggtcgccgagggcgccggcgctagcgggttggtgctcatcgacgacgccgagaaggccgtccccttcgtcgccggcggcttccccttctcccaggtcgccaccgacgccggcgcgcagatcctcgagtacatcaactccaccaagaatccgacggctgtgatcctcccaaccgaggacgccaaggacgacaagccggcgccggtggtggccagcttctcggcgcgcggccccggcggcctcaccgaagccatcctcaagcctgatctgatggcgccgggggtgagcatcctcgccgcgacgatacccaccgccgacaaggaggacgtgcccgccggcaagaacccgtcgccgttcgccatcaagtccggcacgtcgatggcctgcccgcacgtcgccggcgccgccgccttcgtcaagtcggcgcacccaggctggtcgccgtccatgatcagatcagctctcatgaccactgcgacgacgaggaacaacctcgggcaggcggtggcgagcagcacgggcgcggcggcgacggggcacgacatgggcsccggggagatcagcccgctgcgggcgctcagccccgggctggtgttcgacaccaccacgcgcgactacctcaacttcctctgctactacggctacaaggagcagctcgtccgcaagctcgccggcgctkgcgccgcgtgcgcggctttcgcgtgcccgcgcggcgcgckttcgcgggacctaatcgcgtcgggcgtaaactaccggtcatctcsgtgccgggktyctcgccggaagkacggccaccgttttcgcgcktcsccataa

SEQ ID NO: 4738 - DNA, 2000 bp, Oryza sativa
tgtaacggaaataggctgaggacattagatctagaccattggtactcaatctagttgttcggtgctattagattgaactcttattatcttttgtaaagtgaattcagggagtaatataagagcattttcctcttatattttacagcatatatcataatctattcccaccaaaataagtagcatatccttctccatttcccttaattaatgaaaatttataagttttcatcattactatatggattttgctataaatcttggcaaacactgccagtcccgcaaccgccaggtggtttactggttttatcagacggatattcaaatttattttcttagagaataccgacaggcaacgcccagaagtttaaattttataaaaatacatcaaatggtaaaacaaaactatttgaatttaatttctttaaaaaatggttatgggtggtaagtagttacaacccagcaccagtatgacttggatgttgatcgagcaagcttggcctgccatggtgactgttcaataatgatggttaccaagcatcagtgtcaccagttgcatcatgagaagagaatttccttcaattttccataaattgtccatgcctgtcctattcaggtgaatttttattgatgcctcatctccaggactgcaagtttctacaaccattagatgagaataagagtttgattttgactttgagcattaaaaatttacagagtagttgaatggtaattctacaggtttttttaaagtggaagcggcaaaagaattgccgaatatattagaaggatagcaattctacagattttgattttgactgttagaattctacaacaccagtaaatattgcgcatatccctgaccacaagctatctataacaattaaaaaaaaatttaccaacccaaaaaaaaaagcaaacaaaaaaaagatcccatccatacaatatattccacatccactgttccatgtggacaggaattattgtccttcaattgacaaatgtaccatagtgaaaactaaattgaacgccaggtgtacacaaaattgacgaaatatataacaaactgaatttggccggcagtgacgaaggaatcttctgtaccatagtgaaaactaaattgaacgccaggtgtgtacacaaaattgaccaaatataacaaactgaatttggccggcagtgacagaaggaatcttctgaatggagctgagcttaactaaaccacataattctactgaagtttttcctaccttgactatagctaggaatagctccattcaacaaagggaatgccaaaacataggagcaaaactgacttgatcagttcaaaatgaaagtggagcgattgaaaaaaaaatattgttgacatgtagaatgttgtccgattcttaagtgaatagtgttgtatgcatcttatttctttctagaatgctctgctacatagtatattcaaatagctagttatgatcttttccttcacttctactagtaaatgttcttttggtatttgatatatcatttagaaataagatatgccaaagccagtcatgttatacaaaaaggaggcataattattttcatctggaattttgtagcaataaactgatatatttgaatgctaaagagttaacactttaagttgttcagacatacaacatgggaaattcagaaacttgatagtactctgtaaaaatatttcctaaattaatttcacatagatgattgaacaaataatttctcagtgtagacaaatgacttggctttcatgaaaggctcgcagcctagatcgtttgaagacaatgacaaacttgaaaaaactacatagacaattgacttgtgcgtcggaggcatgaccggtcaagaattgctcataatacaaataaatcatgtacttgaaagtagagtaacaacacaaagcacctctcaagcctcaaggtctaggagaacaccccatttccaattctgctcttgttgaggttttacaagtagcaaacatacctcat

SEQ ID NO: 4739 - DNA, 2000 bp, Oryza sativa
tccttctagcgaagattaggaaattttatcgttttgttttcacaatcatgtacgtttgtatacatatgggaagaacagcagtagtatttgtatcgtacaaaatcatacatacggacagcgctagtatgttataaacaatgcaaaagttattattttttaataatagatctgatctaatggtctacaataacgggtccaccaatttaagtgaaaatcgacggtgagattagattgtgcgatgtggcgacttaagagcgtttataggagtgacacgtggcggcttaagagcgtttgtaggaagtttaatggacttttagtatataatagacagcgctagtatgttataaacaatgcaaaagttattattttttaataatagatctgatctaatggtctacaataacgggtccaccaatttaagtgaaaatcgacggtgagattagattgtgcgatgtggcgacttaagagcgtttgtagaagtgacacgtggcggcttaaaagcgtttgtaggaagtttaatggacttttagtatataatagatagataggaacttagcctatcgaacagggccactgcaaccactagactgcatgccctttgacatctgaaatgcttgtttaagcattggtttgtgtaatcaaatatgtattattacatacttaaatccagctaaaaaatgtgttgctagtctgtacatgttgttgggtatagccagtgctgttctgaaacaaccgtgtggccggatcagtcagacaattatatagtcaatcagtgatgttaggcatagtacagtatgcacacactccgcgcttgcaaccaccaatattggtacggattttgagatcctctgcagtcgctacatgtaaatgataatggtatggtacaatcgactgcataggatctctttaaattttctgtaatctgccgctatcctaactggttcgtgtctcttgtctgctatggcttccaggtgatcaccatgtgtactaataatgtttgctttcttctaattaacatgcaatccttttgctcttttacagaaaaaagaatgtgtgaattaatctatgcttttatatctaaaaatattttttaataaggaaatatttatgaagttttttttattatagacattgcttttggtgcacttaatttcaatgcttaccggtaacattaattatatgtatgtatacatattgattaaattagatatagtattaagggtccttatttcaagtttcatcctgagccacggaaacggatcctctgacttaactgagcatgcagttaaatcactaacatgtggtcctactttactatcgtccacatgtcagtgactctcaactacacagtaattaagtcagaggatcgctttctctgggccatcaaaataatcaggcccggttattttcactggtaatttgaaggaaggtgcagtatggaaaaactgcacaaattttgacaagttgactctttgcaagaactatttttacaaatgaaccgctgccaaaacttatttcaaatctgacccttttgctcaacgtcaaatcgtgtggcgctgaacttagacacctcagcgccacgtcagcttgcgctaaatcccgtgccacgacggatgagagactaagtcagcatgccaacgtacattcagcgccatgctatttggcgctgaggtttctaagttcagcgccacaagatttggcgttgagcaaaagggtcagatttcaaataagttttggcaacggttcatttgtaaaaatagtttctgcaaaggatcgaattatcaaaatttgtggaaaaactgatttggcccgtcaacacagcagacttagattgaatgacagcacacaattttagacttgtcatgaagctacgttgactgaagagcaaggcagccatatctgtatcactataccagcacactgcaacatcgtaatatgcagcttcctgcatgccctattgttgaaccttccctcctctcttccaggttttgtttggagcc

SEQ ID NO: 4740 - DNA, 2000 bp, Oryza sativa
aatcagactttatttttccgttttaaaggaatcggatctggcctttatttttcaccaccttttttttgacctttataggaattggatctatgtttttttcgccacttaggggaaacaaaattttattattgttgtttttcttttttttccttttttttctttttttgcagttttgctttttctttttatgcacctttatgcccttgttctctctcttttattattttttcttaaaacaagacctcaagtatcttattgcaagattatagggactcaaatgtaaatataaaaattacatagactcaaatagaaaagtacaaacccaaaaattaaaatcatataaaaatggaatgctctcgacatgtagttccgtttttgcaaacaaatcttcaatccggcacatcaatttttttcaccaagatgtatgggatatcatggtatagatcgaaaccgagaggagtgtgcatgggatctcggactcaaaccgagaccgagaggagtggtgtgtattttccctttttaagggggaatcggatctagtgtcggacttttttttcgtttctgagagggagtcggacttttttttattttttttgctatttattttgttttgacaagagtcggactttttttttattttttcgctatttattttgttttgacggacgaaggaaacatctcttattttttttattttttttaagtagtagagattgtggtaaaaaagcggttattgtcgttttattgtcaaaacggtaaatattgtcagctggagggagtacttaatagacttaaaatatttaaaggaacgcttgtgtgcatgcccttttcatgagcccgcctttcggtgctgaccggtgataggccagtctaggaaggattgggaaccttctccttgggcacgaaaaatgaaacagtttattaacgcatgattaattaagtattatttaaaattaacttaaaaatagataaatatattttttaaaagcaattttcttataatttttttttaaaatcatatactatttatttagcagtttgaaaagcgtgtgtgtgcgggagttataagttgggaaagctcgctgccgaaagcagcctaagccctaagcaagtcgtctcgatcatcgcttgagtctcctgctgtcaatggcaccgcagtgcccatcggctggagagtgattcgatcagccaaaagaccaggactattttcgcccgtgtactttcgtagcgaagaggtgcacgtacggttcactgtcgagctgactaatcgatcaaattaagaaagacaaatttgttgagcgtacttgctgcagctgcaaccaaacttggcctccgataactttggcatcttcatggaaggaagcagcacgtttgtgaccctttcattcacgtgcatattgtgcctgtgccaatactatgttgacgtttgtcttgggaaggaagcattggttttgtgatctcgtcaatcatcaccagtttccaaattaccatcaccagaaagtgcctggctcgatccggcagcaggcgagacgttaaaaagtcaagccctgaagccctaggtttctgtgtccaacgtttaacaatccatcttatttaaaaaaaattaaaaagacaagtcacgtataaagcattaatcatgttttatcatctaacaataataaaaatactaattataaaaaaaatttaaataagacggacggttaatcgttagacacggaaattcagggtttatttttttaaaaaacagagagagtacgtaccgaggaacttgcgaagaaccagcagctagcacaccaccaccgtcgttgctgtcgatggtttcttttgctacgtgcctataaatacgcgggcgctttcctctgttaattcgctgcaattcattcaacacaaccggttgatcaaaagacgaccaattggcaagtcagatcgagagtgagaaacccaaacacacggggagtcagcgatcgagagccacacaagagacaagagaggccggagag

SEQ ID NO: 4741 - DNA, 2000 bp, Oryza sativa
ttttcctaatttaatttcctgatgcaagggacgaatgagagggctgcacttggatccatgcaggattttcgcatcaatgtctgtagaagttctgttgatgggcccaatgcaacaccatatgcacgaatgggcaggcctgaaattttcgtttagttaaaagtgtgatggcaagtggctatggtggtaacttgatgactatgactgttatgaatatacttgtatcttggtatttccatacaagaacttagtgtgtaaaatattgatctggtttcaactaactgtagcagcctagcacgctagcaaaatcagacgtgtaacagtataaccaaaacacataaaggatgccaagttaccgttccttgaagctagaactgactgagcaggttaaatggttaatagccaagaaagggatgcgcctaagaacacaccaggtgggctgacaaaataaggaccctcagaatagcgacgaacagatgggcacaaaacattgtccctacatgacaaaggtagttaatagtgtgaattacaatcctaggttggcagcactttgcacggtaaggagagagaaataataatctagagatgagcagattcttaaattctcaacacccctttacacatacaaacctcttggctgtaacacctcatcgtcgactaatagatcactattcagatagtaaaataatgacttaggttggaattataataggtttgaccattcgcaagcttacaacagcaagagacattaacatctttccaaatgaaagataaataacttttctttgagaaagaaagataaataacttatccagacatgaccataaaggacatcttcagaaaatgacctaaattaataccatataacagaaatcagagatgttgataaaaaaaagtctctatttctttctggaggaattttaaaataatgtacctcagagtgtaaatatgaccaacataagcaaacatgtaaattgttctctgcgatgtttttagacacacagttgctagtgtttaacaattcccagtaaacttcaattatataggtaagagagaaaaggaaaggaatggagaaagggatttttggatcattagaggatgataggtattttttgataccaatgtaaaatatagatgttgtcagagagaattaggctctwagtgttccaatataatactgtactgtacttacttggaatttggaagtctctgatgtcttgggaattgttccacatagttcactatggacaacccaaggaaacaactacaaaaaaataattatccaaatatctaaggagtcagattattctctcaaaggtctaattataagaaatgaggcatatgtgagaactctattagattagatgctaagctatataagcaatgatgcataagtacagttcagttaacttagtgtaataagagagattgctaatcccaaaattactgctgaagttgtacagctcatcgagatcctcgtcatggagtaaagaccaaagagaccctgcatgagttcaacaacaggtgagggttttaaaattctgctataagaactgtacctgagtgcaggcaaaggtgcgaacgacaagccaaataaaaaccctacaaagggagcaaccaagcgaggagggttagctgaagtctgaaacttaaggtcgagcttcttctttctaacagcacgtgatagctgtctcatagttttcttgcaagtttcagttcagattaagaatatagctcgctcttttgttgataagaaagcacgtactgctaagagctagctttgttcaggtctggaggaagctacagttatatgtaatcttatgtataattgttccttttctatcttcagtaaccagcagaaaccaaaatcttttaggtatagccattagggtttgttagctcgtaaggtcttgataaccagaagtaggtgagagtgagcaccgtttgagctagctagttaccatccaccagtagtttcatgtacttgtgttgatatggacgag

SEQ ID NO: 4742 - DNA, 2000 bp, Oryza sativa
atcgtcaatagtagttgtgtatatgatgtaaatttataatgcaaacttgatagaaacttccttgttattgtgatacggtgtttccgatgccctattctaatacttccccatcctagtttgatcattagttttctcaaaatgatcatcatctaataaaatctctttatttatttgtgaaaaaagtaaatgtgcatcgcgtaatgccctgcatgcatgtatgcttgaatgataattaatttataaatgatgaatgttttgatattcttggtactaaggtgtccttttgtttagtggatgatcatattgggacaaagggagtagcttcgttcatgatattttccgatattacggtaraatcggtatcattttcgtttctggctctaccgtttggtttgtattgttcaagaaaatagtaaccctttcctgatattttcatccttactctaaagtcttaattgggtgtggcctacgctagaatgtgactcttcaattatattgcttaggccaggtacaatgatctttataagtaaactctctctctattatcatgtaagtaaaatttgattacatggaagaaaaagaggggatgaaaatwaaaatatggttgctatctaagccctcttagcaattagtaaaaaaaaaagaattgttgcatggatacgagagaaaggaaagaaatattattttggtacattaatgtttagacaccatgcttacagagataacatttaatgataaaacaagtcacaataaaataaataataattacataatttttttaataagatgaatggtcaaacgtatataaaaagtcaatgacattatacattaaaatacggtaaaatacggactgagaatctgtttagacttttgaaaagtcctacaattccgcgagctaaaaaaactgtgatgcggtgtctgcacccgcgttgcacccgcgttgtttgacctcactaagagcaagtttaatagtatagccaaccgctggctttaaattatctatagtcaacttaatagttaatttatacaatatatatacagtctgcatcaatctcttcaaaagtactacttaataaagagggttgtaaacgaaatcgttagagttgcagcatatttcaacatgacagaattttgcaggatgcgaagaagtaaaactcaaactctcggctgataaaggtcgagctgcataccaaactctcagcagcaacgagctcaataaaactactgaagtagcctggcaaaggctcggtttaaaacagattgttgagtagatggttgccccgcattattacttgattatagtgatagattaaatattttaataaataaacttaaaaaatacagtggaataaagttcttttttttgaaaaaaaagtatttttaaattgtgtagcaaatatcccttttcaacaatctagcactaatttaaacgaactaagcctaaaagatggagttgcctatcgtgagcaggtcaattcaatcagatggtcagtaccagctttgagtactcgtgattaagcactaaacggcatgaccaagtcaaggcatttttcattatttgtctccattatttccaaggccgatcaagcattctttttttttcctttttcaacacacctgtgccaccccagttacgattccattctctttcacatttgagggagctacttcatggctcamacggctgacagggcaagaaaacgatctctgaaaaaaaaaataaagtgcagtggttagttataaattgatcactacgattgtatgaaaatgatgtttttctatctgtcctgcagcatgcattcacagttacgtagtcatacaggtgacaaacgaacagattcattgaccaaacttacccatttgtagcaggtaatggagtctaaaattggcatcccaagcaaactgagcacaaacaaaatataaaggggaggagctgtggctctgcagttctcattcctaaccaacactctgcatccatccatcccaatttctcgttcaga

SEQ ID NO: 4743 - DNA, 2000 bp, Oryza sativa
ggcattggaagagagcttgtctatgcatggaaccagggttgaggccgtgatgtagcatgtaggctgacaaccttgacatgttaaatgaaggttgtgccaaagtggcggatgctacgacgaagcaaactatattaaaattaataaagttgtagcagtagaaagataatctgaggtaatactgtatttgttttttttttacacatgataactcaactataatcaaaggatgtggctggctatttattcttcagatggcttcgattgaacttttggctctgggaaggatgtatgccgttggaaagcagaaacatacatcaggaatggcttgcagcttgctgacaaatacttagcttgaatgcttgaatcagtgataaccaaaagagtattatagtcacggcagtatttgataatgcaaatcaaataatgaaaagacaatatatgtttcagtaaaggatattgatttaagacatgcaaaagaagtaatgagaagaagagttgtatattttgttgtaaatacatcctcttataaatatttgatgtttactctccggcaaggtttacgaaaaaatcaaacttgttagactggcttgataacaaaaatgtttggttttgattttttggcaagtttaaaaattcaaactgactttaaatttttgacaaaattcaaccatattttacccgaagtcaatggtttttgcagtaatcggttgggtcgttcatggtgcatacttaccagaaaaagattcatacttatctatcttgatttcttgaggaataactcaaccattctttttggtatggatatgcattgtcctcgtatagtgtatattgaattgattagatataattttaagttatattatcttgaataaataattttaagttatattataataattttttatatatgaccttggactaaaagcttaaatggacagattctaggaacattattttcattgcagtcgaattttaataacttattaagaaaaatgttatgacacctccgttagtacggtatattactagtaatttaggtgatgcttctggagaccgaagcgtgccgtgtgtccggtgctacatccatgatacgcttcaatgattccatcagaaagttcagaatcataaaccaaatatatttccgatttccgaaggcactttcagttagctgttcatttgtggtccttattagtgggtgcaatcgtacttgatacaaacaatttacaattgctaacttctagtacagtcatcctcttttttattatataaaacaaaaggaaagaacaatggtcaaggcaagtcaagggctcagaacggaagcaagtgcggtttccgttgcactgacgccactcactccacaacacaacaccggaaagtgcgtcccgtgctgccgtttccgttgcagttagagcagctacaataataggctattagagcaagtttaatagtagcccactactagctccaattcatctatagtcaatctaatagtcaattcatacaatagttgcttactatactattaatatatgttccacctgtcatatacacattgtatcttagagttcgcgctgcaactggctacagatttgtagcccgctgctcttctctctcatcctttatctcattaaaatatgtttacagctggctaatagctgctattgtacctgctctaagccagctataaacatattttaaaaagataaaacaaaagagataagagcaacatgctacagatctatagtcaggtgaaaccagatattaatactagtataataaacaactattgtataaattagctattacattagttatagatgatttggagataataattgactatactagtattaaacttgttattaacgccagcttcgtattctctcctgcctcgccacgcctcgctgccgccttaattacctcacctacgcggctcgctcggcgtcatcgccgccgccgtccgccgcggcgccgctacggtagccgtaggccgcgcagga

SEQ ID NO: 4744 - DNA, 2000 bp, Oryza sativa
acaccaacaagttcacatgaattttctaacaaatattgaatcgtagttagaaccaagaaaatttctcaagatttattaaggacataattaagaaaattggtgtatatataatagggcaatgtcttgaccagacgatttcaatataagtccaagtaaacagtgcgttgtatgactcatagtcttatagtacacgataaatttgcgtataatatttatgtttggtcaaaagaaaagtgcaactgaaaatatgtaatgcttgtaaaaaagaaacacattggcaccaaaatttcatctgattttttaagaacgtgttgtgacaaactgtttgtgttcgatttcctcgtgggcactggttttacagctatttggaaggtggcagatacctctcccacctgttgattttttgtcttccacaagacaaaacccattccagcctatgcagacggcactaatcaactaccatctcaaccagcctagtgtgctccccaattaacaattccacatccctattaattaatttaatcacaaaatctaaatacacaatcatcacccacaaccccctttcaaacccaaatttcacaatttaccccctcacagtatctgagaaggctacagacctggttcattttcttattacccattcctaagaaaaatagacatattacttttatcaccaagatcaaagtaaaattaattcatcttatatataacaaatattaaagagtgtatgcatgtacgtaaccaataaattcttgggttcgctaaaacatttaattatctttttatttaagtctttaatatatgaaaactaagagtatgaccaacttattaaaaaaaccaaaatattaaataagtattaaacacttttggatggaggaagtaaaatacatattttaccttggtttatattaacacgtttttcaaattactaaacagtgcatttgtgtgaaatctctctatatataagttgctttagaatatcagataaaaccatttttttaaatttataataatcaaaacttaattaatcgtgagataatgattttcttatttttcgagttctaacctcattttcattttcagtaaaacaaacaccactatagttgcaaatgctaaattatgcagggggtatcttgcaaaagtgacagccacaccacactgccactgtcggcagtcgttgggagagagagagagagagagctcactacgcgcttatataaaccacgcccccttttaattagcggaattaaatcgccgggggaaaaaawmtwaaaaagagaggaggcggtggaggctgcggcagagtwacagactcggcgcctccctcctctcgctgtggatctgcggcggcgarccggcggcgaagcaagcagcgcggcgcggatcctcgggcggcgaggttgttcgcacaatctcgctcatccgtcgcggcgattccatgagaggttggttgggtgggcacttgggcttctccctccttccgcggcaatttcgtgctgttttytttttggcggtttkggttaaggcggctgggttaatgggggaatggcggcggttagtgcggtgcggcttgtttacggggttgggattgggccggtttcccggagtttggatgcggaggctgagcgtgtratctggctgggcgcgtcgtgagtgggggaaattcgcggggaatgcagatgcagcggtggtgtttttttttctctttttgagtggtttggtagtctggtgattcgagaggtgggtgcgatccacttggcggcggctgttgggagtagcggttgcgctcgtgcgtgctagatctggggttacgcgtcggtgatggkttaatccgaggcggaatctgctctggttgatgtataattcacttgatcggatgattttgtgttggatctgatgcgcctttgttttgctcttgtgtcggtttcaggttgagagctttgcactgaagaagtgggggatattctgatctgctcagctaaagggggttgcagctaaac

SEQ ID NO: 4745 - DNA, 2000 bp, Oryza sativa
gggtaagggaatcgcggagcaaacgcaacgaaatggtaggggagattgctcagattgcaagtttgtactttatatgtatttatattttggatgaactttgtgcactttatataaagtgggagattatttgttcataagtgaaacacttgctaatcctgcattttgcataatcataatggctgaggcttttgcatcctgtgcttctgcatatacaatgactcaaaactgcgtcttttgctgtctggtcatgacaaaagaaaacaattgcagacaccaataaaaactgcaagctggatatcctggattaacactctggcatgagcaatatacaaggatcaagaagtaaacgccaggatccatgaacaaatgagcatctagctaacatgtacacagcgcgagatcatctcgcgaatagcatggggaattttctttaattctgatccacgttggttctgatgtatggatcatacatttatcttaggatggttgaccaatccttaaaataggatgattgactatgattagagtcagttagctgcaatttcatatttgcccaattgacactcgtcagttgccaccatgtctgaccttgcctgcttaccagatgacagtgaaaacgttgctatccatgtccacagagattctgcagtgatgtacttaggaaatcaatatgcagtggggcgattacacgtttctttaatcctttccatccaaatttgctgacacctctctgaagttcttcttacttaaccctgaattcttttcgaagcactatctgaactataacagtccatacaatcccgtccaaattcatcaaacatatatcgaccagctggagtgctggaccattacacttgtttggattaaaacaatttcttatctctttggatgattttagttagcccatacaatcccgtccaaattcatgaaacgtatatcaaaccagctggagggctggaccaatacacttgtttggattagaaaatttcttatctctttggatgattttaattcaatttttcctgctaatccagatggataaggcattatttctatccatccgtacgagattcctgtgtttaacttatcaagaactcttgctacttgctctgagtttttttttcagagagaggaagagaagacctgagttaattaatagcccgaggcagggtttggctgtgttgtttggggctgggaaccctttcccgacgcttaaaaaacagagcaacggattaacatatgattaattaagtattaataaaaaataaattaatataatttttaaaataatttttctgtaaaattatttaaaaaacacacaatttaaaagtgcgcatcgaaaatgagagtaaagttagaaaactgtagtgtgaagcttatggactgtttgggaagcttaagattctgagaagcagctggttgttagccaacttataagaatctagaaaagctgagtttcctaacttctggcttctagttcttttttagaccaaaagctgtttgaggagtttctgatcctgattctaggagaagctgtagctagggatgcaagcaggttttttatccagtttatctcacttctagtttatttttcttctaaaatttgtactaccatgtgaaaaataaattaacaagcgggtttttatacgggtagtgggactacccacttgcatctctactgcagctagaagctcccccaaacaggccctagctttggaggccaaggcccatatatagtaaggcctcatttgagattttcgcccaaataagtcccatccatgatgggccgggaaaacggtgccaatttacgggctttcctcagatatgggccataatttgggccctaccagacgaggccgaagtgggtcgggccatgtatgcgctgtagtcaacggcccgtacgatgcgactccgagaggaaactgctccggccatggccatcgcctccacgagtcaaacccagccaccatcggaattcgagggcgcggagcagcggcgaa

SEQ ID NO: 4746 - DNA, 2000 bp, Oryza sativa
cccatactgatccagtttaggggcagtaaatatatgccaactgggaactattgttgtcactaaaattagcttcaggccaataaacaagtgtaactaacatatgaatgtaatagtacctctaattccagaacctctatatttatagagcatctacatgaaactggtattgccctgctatctatgccacctaataaatgtctcctaatagcacaatacatttattttaaattaataaacaataattactacgataacattgaaagaggtagtcatttttttcaattaattagaaaaccattacataatcccaaacccgtatcatactactactagaaaccgcattatggctgccaaactaatacacaaatcataaatcctgatatcgtctactattagaagtatgaaacccgttttcacaacattaattgtcagtttctwataawtagatcatcactgaaaataatgtgttaatatcatcacaactttttaagaacactataccctcgtttcctgcgtatatgtttctcaaactattaaacgatgttattttttttgaaacatttttgttgaaattttactgtagaaaaatcataatgatctatttccaagtctttttaatacttaattaatcatgctttgatgaactatcttatttaggttgtgttctttcaaatatacctatctaaattataattctkggatatatcacatcgcactattttgagaccgatagagtatactaccaccgtcctaaatgctttccttaaaattgttggcatattctaaggtttagataaaaaactacaataccttataaaaaaaattatgttttaagaatagaaggttggttgacagaagtttgaatgatatgtgattgatgagacaagtaatacttggaagtgacaagtactgtgagacaaaaattaaatggtagaaagataactaaggttgtgtttggtactggaggatgaggatgggaacatatcttctccggtacgaaaaacaaagcggtctattagcacgtaattaattaagtattagctattttttaaaaaatggatcaatataatttttctaagtaattttcgtatagaaatattttgcaaaaaaacacactgttttgtttagtagtttaaaaagcgtgcgcgtggaaaacgagatggggagtgggaacttttggtatccaacacagcctaatttgggatggaggaagtagtacaattttagcaggatgtaaacaagagttcatcccttgtgagtccacacaaggaccctatgcagaggagccggccaaacaggaagtacattttgcagtagaaaaaaaaaactgctgctttttcggtttcccccagtattgttggcccctctcttttgctgtcccactcccaaatattccaatcctccctggccctcttcttctctctctctcttctgctgcttctcatcttcttcttcttcattgttccgcttctccctccctgcctcacagtcgcagcagcagcagcaccacgccaatgctgcctccctccaaagtgccccctgttttgcttccgctttgaccctcttaaaaacctcaataactccaaattttcccaccgcctaataatccccattaccgtctcctctgaatcgttggatttgatacccccagggattcagagagagagagagagagagagagccaagaaaccctgtagctgctgtaggacgagtaggagtaggagtggttttgcttcctctgttcttgtgttgggattgaggaatgaagagcccgtctcccgtggatcctgagtcgccgagttctcccgattgcaaggtatgggttgggtggtggaggtcgtgtcatgtttgatggttaatggtctaatcttgtcgggtttgcgagggttgtggtggtcgtgattgattgattgatcatggtgttgttgaatcttggtgcgatcttggattctttgctaatgtgtgtgtgcgcgtgtgatttgatttgggtgggtggatgg

SEQ ID NO: 4747 - DNA, 2000 bp, Oryza sativa
gagtacacatttttcttggctttaattctgcgtggtcatttttacgaggatataccttgtcacttttaacaacaaaacttattggatatgtgtttgttggagatgctagatagggctggacaggaagctcatggctcgttagctcgctcggctcggctcgtttgattttcctaacgagccgagctggcatttcagctcgttagagataacgagccagctcgagctgactcacgagccgctcgcgagccttaacgagccagggcacatgagctgtggcctgtgggccttaaagaatggaggcccaatagcccaactcggtagccaaaaaaaccctagtgaccttgacctcgatcccgatctggcgactggcgtgcgtggccgattctaatccatccccttctttcgttctcatcctctccgccgccagccaccagtccaccaccactatccgccagccgccgccggccgccaccgccaagcgtcgtcgccaagcgctgccgccagccaccaccagccaagcgccaccaagcgccgccgacgccaagcgccaccagccagctgccagccgccgtcaccacgccaccgaaggagcggcgccgccgctgcatccaaccactcctcagccaccatccaccgaaggaactcgacgccaccctccgccactctctgcgccatcgccagcaccagcatccacgccgctgcgcgaggccaatctcgtcggcagctacaggtgcaggtttggctcgcgagcctaacaagccagctcgagctttcaaacgagccgagccgagctgggtttctagctcgttaggataacgagccgagccgagccgagccggctcgttatcctaatgagctagaccgagccgagccgagttggctcgccatccacccctaatgctagagatgtaaatcattttcatttaaaaaaataaaacaatatgttcaagaaattaaacatgctagatcacccaaaagctgacagtgctagttatttgggcggcaaattccaacatgcccagtcaaacagaccggaactataagaatcatgtacggtcaggaaggttactaactctagaatttatgatttccactaaacccaattaattatcccaagcagattcgtcaaaacaaaaacgcctgcacatattgatttcaattaatctcaccctgtttaaatgtgactaaaacttttaaatccctatcacatcggatgtttggacactaattataaatattaaccgtagactattaataaaacccatctataatcttggactaattcgcgagatgaatctattgagtctaattaatccatgattagtttatgtaatgctacattaaacattctctaattatggattaattaggttaaaaaatttgtctcgcaaattagatttcatttatgtaattagttttgtaagtagtctatatttaatactctaaattagtgtctaactaaagttaagtcactagatccaaacaccaccctgaccaatatccccatgagatagtaagggtctgtttgggggagctttaaattctgagaaacagttgtttggtagccagtttctaagaatctggaaaagctctaaaacccagcttctccagcttctggcttcttagttcatttttcagaatctgtaactacagattctcagaagctgtaactacagattctcagaagctgtagactgtttagagcagcttctagcagaagcagcttttgagaaaagctgcagctaggaaaagctctcccaaacagggcataagacggacaggtgacaccccacgaggataggaagagcagtgaccaacgccctactagtgacataagatcggccccacctgtcagttgcatggcaggcatgcaatgcaagagtcatggacagatgatcctcaccaagaacatgtatgctagctcgtcccttcctctcctccatcatcagtaaatcactgggttaatctctcctctcttaagttctagctactgctacaat

SEQ ID NO: 4748 - DNA, 2000 bp, Oryza sativa
ggaggggatgaaaggagaataactccgcttttaagatagtggagataagaagataggtaaaaagtctacccaatgttattctgaccaataatagagaaaaataacgaatctcccactagggaggaagttaaaagcacctataaagtttggccagtaactcgtttggcactaataatccaagaatcattattttgatcacaaatttaacgtttattgttagatgctgccaaatatataaagttccaatagagttttgaatctaatgcaacccttcccctcctaaaaaacagtggaagtttctctttatatgttttcttatcatgtttttctaagtatgggaaattacgtgagtaaaatagaaaatgtatatacagttgactatgggtcatattatagtgctagtgtgctactatcatattggtgtaacaagtacggttttgttttcagccatatgcattagagtaacaaatgtaactatgcatgctttaaaatataaacatatattataaggtttggttctctaccctgccaaattttggtagggtagaaatggagaaggtgttatttagtttgatgcagaattttaagtcctgtgggataataagatatgagtaaatgctcatattatagagaatatagattttgtataagagctatttggtatgaactaaattaaattttagcattaccaaattttaacatgttagaaaattacagaccactaaatcgttcttacattagaaaccacttattatatgatgatagtaactttgtaacctaccctgaaaggtggctggaaagagaggaactgtccaatcggtcactctcctgctatagtgctatcttcatatttccatactttttcttaggtgcccaaagcctccaaccttctcttacccaaataataatgatgatgatgataataataaactgtacgagaaatcaggtgtaactgaaaagcagagtccatggaacctcaccaatctcttcatcctcttttggtcaaaacaaggtcctgattaaatctctcaaattaagctgacccagtcacccagcccatgctgctcaccggcaaacctgtggctatcaccgatcgccacagcagtacaagtgatcgagtaggtgacggacaggcaggcaggcaggcatgctgacagcttcgttcgagcctctgtaacggcggcatggtgagcggctgccgtctgccgggcgccgaccgggtcggtcgacactgamgccggcgtccgttgcgcctttagaccacgcaggcgtaacagccgccatcaatacaatacgcatcamcccctggcamccaaatccgtccgcacgcaacggatggctgcgcggcgcgcgctcgctggtgcaccccggatgaggatcctctaccataatgttactacgtacgttttcccgggccgacggcgcggcctcgggtcacgtactcgcgttcccgcctagctagtgtgctagcagtagaattagcccctcgcaccgtgcaacctggcagattttgacgggcgccggccggaggacgcgcgcgcggttatttaagcgcgacccgcgcacgcctcgttgcctcgcacagggcgcgctcgcttacgcttaagcttacgctgcgacgcgtcccccctgtgccgctgccgccgccgccgccgtgctttctgttttccgcccgttgcttgcatcctcacgcgcgtgcgagagggggggcgtacggatttcgttggttgtaaccgactggcaccggtagacacgttaccgccggtggcctctggcacacctctcgccgacgtcgtcgtctgctgatcgtcctctgccgtgttgcccctgtcgcagctgctgacgtcgtgataagcggagcgagcgcctcgctgcctctgagagaggccggtataagtacgggcgcgtctggctctctgcttggctgtgagcaccgcgagcacgtacagctccgcctcagacaagagcagaacacgtacgtttccccgcccggcaccggc

SEQ ID NO: 4749 - DNA, 1426 bp, Oryza sativa
gatatctttaayctttacgtcccggttggtagtacaaccggtgactaaagtggttatctttagtcccggttattgacaccaaccgggactaaagatcctcgaccccctgacatacatctgacaagggataaaccaggactwaagatcgtctttagtcctggttggtagatcaaaatttttataaccgggactaaaaacaatctttagtcccgattctttttggatccgggactattgtgaattttgccggaccgacgaaagatggtttttccacccgtgtttctgacggtggcagtggctaagttagctgtcatctgtcatggccgcacaagatttttggaaaccgatcaattaatgccaatgtcatgttgataagtctatctttaatttggtactctccgttttctctactactactcccttcatccactaatataagagattttgactttctcttacactgtttgaccatttatcttattcaaaaaattttggattattatttatttcatttatttgtgacttactttattattcaaagtattttaagcataacttttcgttttttatatttgcataaacttttcgaataagacgaatggtcaaacagtgtaaacaaaaaagttaaaatcccttatattatgggactgtatttattggtccattcccgtgtcagttgatgtaggcagtatggcagccccagcaagccacatggtgcagttgatgttgggaactcactagaaagaacacagccaaaatgtcctaactactccctctgtccataataaatcatagctagtcttgtatccgatgaaaactctagtggtaaaaaaaaatattaccctgcccattgttaataagaagtagtattggtgggtgagtagctttgaagagataaaacagttaattgctgaattgaggatagttgagaggataaaaaatgtaaaagggatttattttgagactaactttaaactatagtagtaattgattaattttgtgacagaggtggtcactatatggctgagtttggtaatctaggtttctcaactactactccctcgtttcctaaatagctaaatggtgtgttcttttgcaaaaaaaaaaagaattttatatgaaagttgtttgaaaaaatcgtaccaattttttttttcaagtttttcaagctaatacttaattaatcatatgctaacgattgctctattttacgtgcacaggggattagttcctaaccacattttccaaacacagcctaattaagctagctgtgtcatccgacatttgacatgggtgcataagattttcagaaaccgatcaatgccaatgtcaagttgataagtctatcttcagtatcttgtttggtactctccatcgtctcctctatatttattggtccattcccttgccagttgatgcaggcaga

SEQ ID NO: 4750 - DNA, 2000 bp, Oryza sativa
agagctcatccccgtacgcggccgatcggccaacgacgagctcctcctccgcgcgcggacggccggcgagctcctccccacgcccggccagccgacgagctcctcccccgcgcgccgacggccagcgagctcttccccacgcgcggccggccgacgagctcctccccgtgggcggccggcggataagctcttcattgcacgcggcggacgagctcttccttgtgtgcggctggccgacgagctcctcccgccgcgcggcttgccggtgagttcctgccccgcacgcggacggctggcgagctcytcccctcccgcctcctctgcgtgctccagccgggcmactcccccgtgcgctgtcgccgccgccttttctctgtgcttatagaaggtgagagaaagaggaagaagatgagatgatgtagaggccgatgattcccgcttgatgactcagcaagtcaactgccacgtgagacgaaaccacctccaaaaccgttcggggagtcgatttgcaacggttttacgtgttaggggacgggttatactcggttttgcggttgagtgatgcgattcaactaggggcattagttgagggaggaaaaatagacttattcttgttatattattgcactacttgtgtccctatttcattggacataaattacctagccaagttcctctcttttagtatttagtacagacacattcgtgttaccttatttatgcctgcatgatgcatggtataaatgcagtgctttaaaaaaaaagaaaaaagagggagactcttcttctgtgaaaaagaaaagaaaagttcatattgtgtcttattcaatagtccacgcaatgattcggcccatcgaaccatctaggccaaccaaaatgttgtttaagatataaaattttctcaaacacatcggggtggtggcgcagttggctagcgcgtaggtctcatagctaaagcgagtgatcctgaggtcgagagttcgagcctctctcaccccaatttttttgtacttctctttatttttttcccctgtttggtgttttcatatttcaattttcctgtcattggtactttcacaatcacattcccattttgcgttttcagatctcattttttttcccaagttaccactccggcactcacacaatcacattcacatttggcatcctcaaattccacccttttcaccctgtttgcacttggcacttttacaattcacacgcgcgaatattttttttccttttctttacctctttctggtgttttcatatttttttctcactgttggcacttacacaatcacattcacatttggtgttttcaaatttcacatttttcactctgttggcacttttcacaatttacatacgcgaatgaattttccccttctctttatttttttctcactgttggcactttcacaatcacatccgcgcgcatttggcctgcgccttcaaatttcacgattttcatcttgttggcactttcacaatcaacatatacgatcgagaatgaatctcctctgctgtttgaatttcgaacctttttttttgaagtcctttcgaagttcccaataatccttaaaccgcccttatatgtagaatatatgaatccgattctgtcttaccctcacctggaaatagcagcaaattaaagcatttcctttcaaaataataagaagaagagaatatgataaagcagcaaaatgccatcctcttccatccatccacataaaagcatcgatccatggccgaaccgaaaggtcacccaatcttcttcctcaccttcgctttctccacacgcaaccgaccaccccttcttcgtcatcgccaagaacattcttagctgctgatcactgtcaagctagataagctaagctaagctaagctaggctaggtggctaggttaattagctaggtgtgtagtacacccggcgacacatttgatccacacgtgtacgtagccaagaaggcagcagctaagctagcgagcgagcgcc

SEQ ID NO: 4751 - DNA, 2000 bp, Oryza sativa
cttatacatcgcgacatcggatgtatacatattatatacacacggaaagtatggaaccgtgtacttctgaaattctttcagtaagaagcctgcacttcagatctttctctactcccgtgtctttaatcattgttaataacattatcctgaactgcgtatatggttggcagctcgtgcataaactaatctatctatccaaaaagcgtgacatagttgagaaatctcgttagaatagttaaggagtctcaagtcacttcacggattcgtgcttgtcaatctcgacaaaaagaagttttcatggctttggctggattcggtgtaatcgtttcccctgttccatccaccaacaaaccggtcgcgatcgccggctactgatcacaagctgaagcgatcgacgcagctatagctgagctagctgtcaagctggccgcgatagcagcgggtgcagccgtttttcagagttcgggatgcgtcatgacgtcgtgagctggttgatgatcatatctgttcgatcggtggctagctttaatttgcttcatcctaggcattcagatttttggcttcaacgaccgttttcggtgcagccatgtgcgaccttgctaatttcaccgatgatcaatcaatcgttcgcgtgtgggagttttggactggacgaagcaacgactgtcaatattaatttggcttaatgaccaggtccaaatgggtacagatttctgtatcacagattagtaggagtacatataggaaaacctgatcatttagctagctagaatgccctgtcatttggtcaatgacggcaagacagttaagaggagtacaaattgatgaaaggaacctgcaacatggacagaggatgggtttgataacagagagagcgaccaagcacctaccattattcctctgacgagtactaatgcactatatgtattcattttttttacacttattccattccatgcaaggatgtcattcgagaaagaatatgaatatatgatgcatatcatcatgtagtcatttgaggaagaaccatgcatgcgtaagactctkattaattaattgccgcctgttttagctagcctttgtcatataccaaaaccacaccattagattagtcaacacgtatctctgctatcttaacatgcagtagttacggttacagaaactgaccacactaaattagtatgtagtatacacaggcatacagcgacagcacataacatatattgcaggaagaaaccagcatcgaccaaaaatgttacgtttcacaccttgaaaccggcgatcgcgctgtgagtgaaaatggcgcaaaccgatcgatccatccatcgtctacctgtacgtacgtatataccaagctagttaggaattagacgaccttttctacatgcatatagtacttgacatagtccctaatttacaacttgattacaaacatctagttctagtactggacactgtcctaactcctgaagttctacaacggacgaggatgtaattcatcttgtttgttagaattcacgctaaaaataaaaaagctttcttgttactacatccatcctaaaatatagtaatttggtacsgtcctataaatttaagcatatacttctatattcaattcgacatattaggatgtcctatatctcatgacgagacggaaaaaaaatgattacacgtacaaaatgtacacgtgtcactctatggggcgatgagttccaggtagataggtgcaggtgccgaacgattggacaggaaccagaaacggacgccgtctcggtcttgccagcgagatagaactagaatttatccaatcaatctgtagtatcaccaccattcaccaatcaccaccagtgaccgcgccgaccagtgagacgactcagccgccgagcctctctttaaatatccacacgatcgatcgagacgccgccgtgccaggtagtatacgcgattcctttccatttttcccccacacgccaagtccgtccatctcgccaacgcgagac

SEQ ID NO: 4752 - DNA, 2000 bp, Oryza sativa
tttgtgtaattgatttcaaccaaatagtcaaatattcggtcattagctctcgtgttcataggttaatttataccattttaattacaatacatgcacttcaaattaaaggacaggagatcaaaatcactgggataattataaacaaagcaatccagaaacctttgaacctatggtaatacttcgtccgtttcaggttataagactttctagcattgtccatatttatatagatgttaatgacggaagtcttataacctgaaacggatatgtctagattcattaacatctatatgaatatgggtaatgctagaaagtcttataaccagaaacggaggaagtactactttagggaaattgatgctcgatttatggtaaataaaacataattaaaaagccaaagttcaccctaggaggaaaacaaagcctcacttgaaatctcagttcattttggggtcaagatttcctcattttggccccaaaactgcaatcaggcctctcttttcaggcctataggcatgcatatggtctctactccacttttttttaggccccaaaatacattttttttctcatctggcccaaaaggcccaaaatacttgcttacgcctaatatgtacttcctccatcccataatgtaattatttttttacaagcacgggtattaaaaaataggtagagataattgaaaaaagattatgattagtggagatgagaaacaaggtgaagagaatggttatgcttggctaagagaagatgaaggtgaaaaaatagcttcattttagtataagtcactgtgcgaggaagtaggttgaaaactttgaagcaagggatatccataagtttgcagtgccgtccaaaattatctatcgccattaaaaccggtcatacatccatcttaattgtgtaatttcgtaaccttttaggaactacggataaggctttaaagcacctttgaaacacatgaacttgtacagcattttcaaacgaaattagttcaactcctcggaaattccaccaaaagtcccccattctacagtaggtataattagtcatatgtccatttatatacattaattgtaaatgttcaacttgagtttgagttcatccgtagcttgatcatcatgtgccatccatagctctaatcttgattttttttccattgacgcacacgttgattaatttaacctcaccaagagctcctctaaagtatgatccgtcgttttaaggtggatattttgtcagttttttagaaacacaatacaaacgtagacattaacaacacgtacacacccgcttctatgagcacacacgcacacactatccctataaacacctctagaaaactgggccaatatattttgagattaacataatcaccaatggtcctttgaataaaaaagtaatttttgcagtaattggctaactagtacattttccttgaattttttccaaatttcattcaactctacgttccgaggatgtcttctatgttgcgtttaaatatggtgttggcttgagttttttcattgcaagccaaacaagacgtgtcaatagcgtacaatataattaagtattaatcattataaatttgagaaattgacttatttgatttaactaagtattatttttatatataatattttaaaaatacaccgtttaaacagtatgaaaaaaacatgtctgcttagtaagtagttacacggttaagctgaataaaataggacaccatagatagcgaggatgcatgtcatctgcagcattactcactgacgtgtggaccctacagcccctcggacccatatgtcagtgagcagcgacgtgccagccacagtttcggtacaaaattagaagttgtctagaagtggctaggttttatttaaatccattattctaaaaaagggaagttgtctagaatgcgccaaatgtcaatctcctccattcgattgacggaatagcagcttcgatggcgacgcttagctgagctgacagtgacctcagcc

SEQ ID NO: 4753 - DNA, 2000 bp, Oryza sativa
atttacgtataaattatatgggctgtaagatcatatacggcaatagatggatgcacagaagtaggcagactgagaaacttttatgacttggcatagtttatctgtatagtccttatatttgttgtgttattgaatttctcaaaagtttagatcatcctaaaaccaatagggattgctcaaacttttaaaagaatatacgtactttcaactaggaacctagttaattactccatatatcaccgccttttaatcatgaaaagattccctctactgagtagcagatgagattcttgataattgattaattgtattgagtagcaacctaagaatccaagtacatgatcactatttttaacttgacaattgtggtactagcatgcatgttcgtgatctcacgaagcttctcaatgttattcataaagagtttacaataatatgtaggtttgatttgcatagcaacccctgaatgatagcacttgttttttttttcggggaaatgatagtacttgttgttcggtgatggtgacacatctttgatgatgcattccatagctcttgacgtttcagataggttaagataaaacaattaaaacctagactatcaacaagttaatatttagtttaaaaacactagaaaacgatagatatatcttcttaaaactaattgaacatttaaatgtttacttacttttttcaatatgtaaatgaaaaatatagtcgaagatatattttgaagaccgcaacatcattcataatataaaaaattatgaaaccgcatagagtatactccgtataacaatatggcattttagaagtcaacagatataatactatatggcacaataaaatttagcgtacacattgatttaatcatagcactaagttaaactctcgtggaatcatatatacatatatagttatatttttgcatggacataccgtgtacactaactaacaaatatcatttttttagaaaaatatatatctatttaagataaaatcaaagtcaaattttaaaaatttgaccaaatcataaacctaaataataaacctaaatagatatggctaaatctttagaagtagggatgccacgggccattagccaatttcttacccacatctatctccgaatgaacaaaatataattttcagcttcttctacaagtatatttcctttatcctaaaataaatcaaacgaagggaatatatttttcagcttgtcctgaaagtacactcccttaatcctaaaataaattaggatatgacacaacctaatataataaatctagataaacatttgtctaaattcgttgtactggattttatcacattcgttagctaacttagtttattttgagacgaaggtattataattttaacagttgacaccacattgtctcgctaacacacgagaacgtgatcacccctgctgcaatctctgcattttccctcgttgcttccctgacagcttaaattagcgtattttagccatcgaggaacataaatagaaatggcgcgaaatctgtctgccgtagctttctttgggcgggtcggtggtggcagtggcagcaatggcagamtgccaggcgggtcacgttggttgacccctcttctctctctctctctctctctttctctctcctactcgcgcgtcgtcgcccataaatctggcgggaaccaagaggcctcgcgccattataggcgcgtgcgcgtctctcggttctgtgaattgtgagagattgcctccgcttccgttgctattttatcgtcttcaattttcttcccccccttggagagataaggccgtggcatcattgccgccatcaccaatcccatcatcacctctcctcatccagaggcagaggaggcattttctgttcgtcttcttgacccttcttctgcttcctttataaggtgaccaagatttcccctactttctgtttgcttcttcttgtatatgttggtgatctgctcacgtgcgttaggatcggcagattgca

SEQ ID NO: 4754 - DNA, 2000 bp, Oryza sativa
caaatctcatctctattattttctgtttggccctccaggccttggcatagctaatagtatacttgtatgtctcttcgatgtgtcggattattgaccttggtttatatgtgagattatcgatgacatgcgcatacatctcagatgcaacaaatgcacatgtaatgttcctgtggtatttctgaacaccaggtagaaaacatgtatgcttggtaacgactgacactgtccaataatccttccatttccccttatatgcgtgcactctccaaggacaaccatctttttccttaacacaccgaacttcatattgcgaccggttggacttggcaacccaaaactctctatgaagtgacactgcaaaatgttttaccrcctccttcatatcttctgctctagtataaatcgctccctgaataacctcattttctttgtactcccatctcacactatcctctttagagacgaccagaccagaaaattcctcactagcccattctgctggattaatatctgactcatcatctgatgaatcaccttcctctacacgcttgttgtcagaatcctccctctccatttcatccacaatggcaccgacagtctccctctcgtcggccactccacctggttgaatgcccactagagctactacgcccccgtcctctcgtgcgttgacctcttccacagaagtctcatttacttcagcacttggtccatcgccatcatccatgttcatctgcacacctggatccttcgggtgaacaaacggaaccatagctagaggccacccgcgttgcaatgcattttccacataccatctccacactcgagagttttgaactggcattagttcccaataaaaaccctcagttgcccgacttactataacattgattgttatgtcacttgtctgtggatcaactctcaagcccctcattaaccatccttttatagaaggtacactcctctcagccggtctatcaattccccctttctgatacaataaawtctgacagatctaccccagttgacccgtaacggatgtttcctgggccatggtaaacttggaatatttgtttgttcgacatatctgtcaacgaaataactagattatattactctttcatgcaataaacatctacaacgtaatatcttcttgtgtatgccaatgcaacggtaaagtattgattccaaactagcagatctacgtagttaccgatatctgcaatacgcacttctagattagtacaactaaaaccctaaaaatataatgcatttattcaaacaaagttttaaaaaatacacactatttaactcaatagtcacatataggatctatgaatattacctgaaatcggcgtctgaatccggtagggcttcgccccttcttctcttctcctcccctttcttcttttttttcactggatttgagaggggaggaatgagggctgggagctgggcggcaggccttttataggcagcgaggcctgccgcccggccagagggcggcaaggggccgcctgcaaaatgccggccccgactggttttttttgcattcaggccccttgccgccccaacagagggcggcaagggctttcctgcaaaaaaaccctccctccgtcaccgcccgtcccttccccgtttgccacgtcagcttgccgctccaaaggtgggcggcagggtctatttttgcaatttttttggccgatagattacttctgtaaatattttttaaaaaaaatctaaaaatgaaaaaaattcggggcgtcactccaagtcgcttcttttatttgggccgggcagtttctgggctagacccattttactgttttggcccggcccatttagccgccgctactttccagcttccaaggaggccacaccacgcaccgcagctgcagctcatccccacgaccaaatctcgccgtctccgcctcgccgccgccgccgccgccgccaccgccaagagggggggaagcaacccgcagccgccgcgcggcgag

SEQ ID NO: 4755 - DNA, 2000 bp, Oryza sativa
tycctgtggaggcagccgaagaggtttacgggtttgtcaagcgaagtgcacatcaatagagtccctcggatgcagtcgtcgcggcattgccgcagtaccctgtcgatttgctccttcattgctgcttagtttccattaggaagtttgcttcccttttttcagttaacctctctcttattatggttcaactcttatgtttatcatgggcgaagtattcgggatttcaattccctaaatgctgtcatttaataaagtgttatgtgttttcyttttttaaaaaaaacccmcggtgtatgatgaaaatgtttcctcccttttgacatgccactgagaattcccctaaaaaagacccgcattattccagacgaggaaaaactggaagattcttgcaacccaaactggatatgccgatttggtagagccagccgtcattagagccgtccaccaactcacgcagcatcaggtagtcaatcaggttcagtttttttcccgtcggaaatctctgaaatccaatcacaaaacggaacagcaaacggctgagcagtagggggacgggaagaatggtcgctttttttttttcgcatagtggaacctcctggcaagaacctattatttccgtgcgttggtagagacattgacataatggctatataatcatgttcttcgtgttgaaaattttggaaggcaaatagtttaatgagttgattttgtgattgggactacctatatttattccgtcgtatttttcataaaatatagttaacacgtacatacatcgtaagtccctaagttatatatgtaattttaatgtatttacaatgtaagttaagttgacgtaaatagatgtaaatagaaaatgctagtgcaaatttaatggaaaacttataactagccattagatcttgactataatcagtcataaaatgtgatgataacattttagcaaacactttgtgatttatatttgtttaaaattttattatatgacatgcagatggtagacttcagccggctattatagagagaacaaagagtgatatgtattattgaacttaccttgtaggacgctgatttcttattgttgttataggaatttgaattttttgaaactcgtggatatttccatgtaatttggagatatgttctttttcgcaaatttttcgtcttttacagagtataaaaccaatattttcaggagcaccgatgccctcgtacggagttgctacgaaaatcaatgtgacgtcgctggcatagaaaactcgacactagtaggacttaactgcaaaacgtaaataaaaaaaaacatagctaaggtaagcaaataattccgtttactactacttccctcctaaggcaccgttttccaatacatgaaaatttcatcctgagatatctaaattaattcattcacttacttttctctaaaaaaacatgacctaaattttcgaacggcgattgtaattggtagggcctattcagaatcatgttattttataccataccattatttagtaaaattgataaatatatgatattatttagtttgttactaaatatttatcatacctagagaattgatcatcatatttaaccagtccttaaaaccttgatagcgttagcaacttaccaaatatttttggtaataccaaattctggaaaaattaaaaatgaatataaagtgaacaggtccgttgttcgtaaaagccacacgaattcaaaagacagtagtcttccatcggctgaccaaacttcgcagtaaaccccctgtactctccagaaatcacaatccaacccctaacccctttcctctcctctcctctcctctgcttcgcttcttcttcttcttccccaaaaaattccaaaccgaaacctctcgattcttcctctccaagctgcctcgccgtcgccggcgacctcccgcccaaatccgacgccaccgcgcgccgccatgcctccggtggtggcccactagccctgctcgctccggcttccccgactcc

SEQ ID NO: 4756 - DNA, 2000 bp, Oryza sativa
gaaggtgacaacaagcccagttccactccaccgaagaaaaaaatgtagacttcgtccaccacctcgctggtatacaccaccatccacgtgaaaagcaagcaaagcatgaccatctatatactactccgtatttgtttagccataggcaattggattaatattttaaattattccctattttcaatgaattttaagttttcttggcaggcctcgttcaaggacaaagttataaccctaatccatataagaaaaaaaattaaagctactcaaaatctagtttttaacttgcaagattgggtcatgtatactactggtaaaagtggtgtcgtccttcttccatccctcatctcaccaaacgttgcgcgtccccatatattatacgtgaggagctatcaaatccaatgttttatcctcaatcaccattcagtccacgagaccacgagcatgttacttatagcttttaaaaagcccgctgaaaatctacatgctgatttaggctttaccttttgtcttacaatctgacatataaatagagcataaaattgtttagtatttcaaatattaaatatacgtgttgtttggagagcttaaaattctaaaaacaactagttagtagccaatttctaagaatttgataaaaggtatttcctcgttttttatgtctagtctattattttattctgtaactacagattatcataagctagatgaaaatttggattcttttatagattatcaaaagctagatgaaaatttggattgtttaaaagagttggagagatcccacgggaaattatagctgttataagctcctcaacaatggtagtaagcaatcaaaaagactttggataataaaatattggtccactatacgattactccgaattgtgcgaaacaactatgaattaggcgtctgattttttcaccccttatatagaaatgtttcagtggtcaatcaagcaatattttaactcaaaaagcagtgaaatacaattgaatcacaagatgaaacaaatgattttaagctattgaaacatctatatatccgagtaaaatcgaggacaaaaaaaataaaacaccatccaaaacccacatcaacattttttcgaactaacgaaagttccggatgcatggattgaaaacaatgaaaaattcacaagcatccatctcctcccatgtgtgcttttggcagtgaagcgatgacgtcgtcctcgaacatgctacccttctagaacatgagaggagaagaagggccaccgccatctagatctgagcaacacgttgtgggtctcgacattgtaaaacacggataagttcttggcaatgagccggaccatcggcggcggtgaagatctgccatgggtcctcctccccttgcctcttcgggtcgctctagaacaacaaccatagcttggagagcctacccatgaccttgcaatacaccttgcgagcaacacatgtcctcctcgctattgtactccgtggtcaccctaagccctggctgcctccatcgcggaggtggtagtggccgggggaaggggggcaggaaggtgaagaggcaacgagccatggctagaggttggggatttagaggaggcggcgaaggtcatgggggcggatgaagctacgcggagcgacagaggtagtggtgagaagaatcaaggagtgcccgatatttttatctttcgtcgagtgtccgagtaggagtgttttcgctgtgtacacgccgacgtgggtccatagaaaatcagaaaatgcctgggcaaatctcatgtgcacggtgcacggcatgacgtggcagaccgagcgcacgcacgttgctccacccccacgccggccccacgtgtcagcgagccagccaggcccatcgctgcccttccttctaacccgcggagagcgaatgaaccaagccgccttcgtttttttcctttcttcccagactttttctccaagttcaaactccgcctcctccctcctccctccccccgatctcgggagcc

SEQ ID NO: 4757 - DNA, 2000 bp, Oryza sativa
agttagttgccccaaaatccatgtagacatcactgcatcagatgctggtttcggtcgctttcatcagaaacaaaaaaaatgatcctttgctctttgaagtgttaaaaaatgcaataacattccagtctttacttaaacagatattcagggaggtaaagtagcccaaaacatgggataaaaagtgagctgaaacttctctgcaatccgagctgtatccattatcttatttggtagtggtaccgtggattgggggcttggaacaccacatgagatgttcttcttccttaggggagaagactgtgtcctcaagactgaaaagctttgtcaaccttttgggagcatgtgatggatgtcctctaaacacccagcttaaccatggcctacaaatacaatatttgatttcttattgtcatctgtcccagaaacatgcttgcaccggcatgcttcgtgttgcttctgtgtgaataccaaatttttgtcaaaaaaaaaaaagaagcaaagctttaaagcaatctatattccttattgctagtagctttgagcaaattgagctggacatcatcatcactcatagctcccccttaaacaatgttttgtttgcatcctatgcactcctagtagtgtacacgttgctttacttcatggttgttactcaccatctttctggaaaagcaaagcttcctttgtgtgcctgttactacttgttaacacaagttacactgtcaagttgcagatacattttttttttwactttgcatcatcttttgactgtcactgtgcccccttagctagatatctggacactgttggccattgatgctacatatcagattcaggtcagtatcagtataggtaggtggtatgccatcgacgagtagggttcttacgtccaaagggtgtgttaggaggtgtgctaccatcagccacatggataaattcctggaagaagccggaatgcatcaccatcagagtaccgagtgccaccaatgccatgataggatgaacccaagacgtgtagtactagttgcaccgtagcagcagcacatagcaaggccgtgtggttggcgatcgattgccgtgtgggtgtgcgcgtgtgtgcgccctgataatgcaccgactcttgcagaagaacaggagagttgcttggctgattccggttggaggatagtagtgatgattttccattaggatttaggaatcgtgcgccgactagtggactagtaatgcttcacggagaggagaagcagaagcagaagcagcagcatgggtggtgccggtgatgtaagtacgatacgctaagcatcctatcgcaagttcgaagcacctttgcaccgcgttttgtgaggccccacactaaaagaaatcatgtcatgtgccccccgtgtttgctttaatttgatgggcccttaggtccttttttttattaagatacatatttttatcttaattttaattcgagtactcctagctgctagacagtatatttcgtaaaaaactttctatatataagttactttaaaatatcaactaaatcaaaatttcaagtataaaataattaaaacataattaattgtatgctaatatatttttttcgtgtccacaccccatctttatatgctattttctcaaacggggccttaataagaaacttagaaacttgctcttcctatttctgctaaaatttgtactgtttgttcctttgagaaatccattactaattcatttctgtagaacatccagacaagaggttactgaaatgtagcataacgaatcttcaatccgtttgtatatgtgcagtgaaaccagcaggtggaggaggtggctgccgcttgtttccaatacagcagagagagagagcagaagagcccccaatcaaatccagctgacgcggtgtccatcaattaataacagaaagaagaagaggatccggttgccacccaaccacctcccccctycccctcccttgtttatataaacccgaccgcaccctggcgccagcc

SEQ ID NO: 4758 - DNA, 1835 bp, Oryza sativa
aaaattcaggagtgtatatatggagcacattcaattcatatttggttttgtcattcagaagatattcatgatctgtgtggagattcagggacccgtcatagcatatagtggagatttggtgctatgctgctatcagatacaaaatctatgaattgtatatttcatgagggcacctatgtatacaaatgttgacatatgaaaatggttagcatatggaggtatgtatatgcagctagaacctacaaggtcctgagaagtaggggccgtgtagagcgcacaatcactccgatgttctactgattcaaaggaaataattgaaaaacaaaatcttacccataaatgtttgaggttgaattgattatcataaaaagaattaggtcaaacattatgatacattctaagggggaggatccatgtgtataagctgggcctggaagtttgagacatgaaggccttactctggttgcggctcgtcgttttgaatttgtcatgccaaataccggtcatgaatatttgacatttagaacaatattcaatcaaacctttaaaaatccggccatcaatgttatattaaaataagtttataaaaaccaataagtttcaaagtatttgaggcaaatctaggcataccttttttttattaaaaaaactaagcattagagaaattataatcaaagtttttaattttgaccaaatctaacaccgaacatcaaatgtttgtgataaaagagagtaataaacaagtactgtgagccttgttttctccaagaagattcaagcctcatttggttgaaaggattttttttaaagtacataaatatgcaatcctttggaattgacactataccacagtgaatccaaaggaatccaccaaaaggaaaactacagtaaaacttgctatcccttcaccaaaacagaggaaaaaagaatccactcaattacaatcttttcgatcctttggcttggctcacgcaggaacgacataaaagattcctatgtttcacagtgcttattgtaatttgtaacaactctatctaaatctcattacatgaggctcctcttcgtcgccggccctgcgaaaaaacaagcaaaataaaatctcttaggcctattcggttcacgggatttcccaatcacaagaataggaaaaacatagaaataatgtaggaatgcacgtgcaaaaaaaatgattggaacatattaattttttctacactgagctaaacgagaggatggagtggatgtttttattcatatggaattagtacattttggagaattggcatagctttcctatgaaaaatcttcttttgaatcctatgaaccgaatgtataaataatgtttattgcaaaagaattaatatttcctttagaaatacttctcctggttttctgctccagaacgaacaattgaggcctcccatcggatggcctaaacagtcaaagaaaaagccaaattttagattttcaaacttaattttgagatattttcaatggagtttcttttacagcattagcttttaagtcacaagaacacatatatataaattttaccaataaatttatttttattccttaataagccgttttgtcttatcagtaaaaaagccaaacgatgtggcctgagcaaaacacaacagcacaaaggatttggagagggcccacatgtcatggacctgaaaaaatgttaggtcagcaagtgacagccgtcacccagcctcgcaattgccggccgagtcgatcaccacacaaccaaaaaaactccggcccacttggagttggagcccgtggcaaatccatccatccatcgcctctgcctcgcctccaccaccgag

SEQ ID NO: 4759 - DNA, 2000 bp, Oryza sativa
aaacaacgcagccatttcaataagcaggcatgacacttggattacacctagaaataatcaatgcaaggatgctcaaccaaggaagaaaaaaaaaagagagcaggataatacactattcaatggagaggatgagcatgcagagaaagagtgctgcaaaaatccaaaagtggatggggggagggaggtcatgtgaaagacaacacaacagtggctctctgctctctactaatctttgtttggcccttgttaaaggagatgttaattctaattctaattggggagcatttaaaggctgggttttagtgggggaggaagaaagggatccttccaaccaagacccacaggaagagagagagagggagagatgagatggagaaataaataaatccaaattcagccaaacttctctctcttcctcctcttacatcctctcatcaccaccaccaccccacctccttctctccctgtctttctccttctcctcctccttcctctcgctctctcctccttgacaaaatttcctccacccattcccttctccacccaccctgccgatctctctgaattcggtcgcctcctccgcaccatctttctctcctcctctcttctagcaatcggtcgtttcctccggttgttgtgctgattcttcgttctttctctccctctctctctctttctttcttcctctctctgccttggagaggatcaagaaacgaagggagggaggagaggagaggagaagggaaatcgagaaaagtctgttctttggtttggctcgtgtggttcttgagagctgctgtttggaaaatctctgcacctgttgctggtacggtttgctgcatctctctgtgtctatgtttttgtttaatttctcttgttcttttgattctgcatggtggcctgccatactctttggttggaawtcwatggttccttkgcaatacatgtcctttcttgtgttgattctttcgtggttcatcccacgagatgttttctacagtccggaatgtgtcaaatgctattaaaccgtgaaaaattcgtgtttttcyttttcataaacacatttcttcaaactttgtaaacggtacgtttctctttgcttggtgttacggtgagaaacagagatgacttggtgttcttggttggttaaattcctccctgtgttggttgcctttcaatttcgtcacgagaaaatcaacctgtcccttgaaaccgtggatcgccgcttctaccttttctttccgtttgtcttttttacttaaaacttcttytttttttgcaaaccgaaaaggaagggaattaaatgcaaataaaatgagagtagtagtagtatattttttggattgtccacagaggcaatggggcccatcttgcatgcagtccatctgtttaggtcgcatgcaatgtacaatcaccgtgtctcacactcattaaattgcatgcatcagcacaacctttgcttacaacagcccaaaccatcaagtttggtgcatccatatacctcaccaaatgcggttcatgccaagattgctacagtaaaattagttaatgctctcatcaatgacagaatgaattgctattctgtaaaacccaaactagtcttcctgcttctggatagtaacccttttatcaaaaagaataactttctgatagccgagtcatgaacaaaagatttgtctgttcacatttctatagatgttaattagttaaagatagtatataacaataggattagacttgcgttgttcagtaacataatgactgaaattcagcagaacctagcgtgtgatgaaccgtagcattcaacattccttcaatttgagactgtttgtttgcttcttctgtacgggcaatgctaagaacatattttttacccaaaattctaatatcttacaatctttcttacatttgcagaccacttgcttcaattgttgaaagagatgaacagcacctgagatgctattgccagacatcaattgataaagagcacatcttcagta

SEQ ID NO: 4760 - DNA, 2000 bp, Oryza sativa
gttgccgtccgagtcaccttctgatgggacggcccacaactacctccactttcgccgggagcagatgcgacgtggaatcgtggctgtctgctgacgacatgaccggtgtcagaccagtcacgtcggtcattcttgtccaccacgtgtcagcttagcaatctacatgttcgcccttcttcacacaacatcttgcctgtaatggttaggatgaagcctggcatatatctgaccaggactaacgtgccatctctgggaggtaacacgctagctccagctggggacgagcgcctagaagccctcgtcctgacgggacggggcgaggcgtgcgtcagatcgcctgtcgccacctaacccgcgatctgaccggtctgtgactggtcacagaccggataaacgagcgtgctgtactgcgatacaggcggcgtgacgcgctcgtcaaaactgcaataaatgtggttaggtgagccctgccatgctcacctaccccatatacgtggcgcaaagcccacaaggggtcggggcgcttcggccctcggggccgaaacgggarcggcccgaccccttggggagacaaagagaagggcggccgtatcaccctggggcccaaccccccccccccccaagggagttaggccacgtgggtgatcgtgtctgcctcaagtctctaagtcatgatactcccggtaaagaggagggcgaacacatcaccctcgggcccgacgccccctgacggtgcgaggccacgtgggcgattgtgtctgcctcaagcctctagtcatgatactcccggtcccatgtcaccgacaaattgcaaaataacataactaatatcttatcttttttttacggaaagaaataaattagtatctcaaacctccgtgtgttgagtagttatatatatagatactgtgatatgaatgatgacaacatcataaagaaataaacaccatgatatttgatgacagagttcgatcatactcccaccttttatagatgttagatttattctatattttgattttctttttcaaataagttaatcttatttgttgttttcatgtatttaaaatttaaataaagagacaaattaaatatttaatcagaatctgatgagttttcttaatactcattgattctatgcatgaacatactccttgatattttttacatgtaagataatataacttctcttttctcttgatgataaaagtaatatgtataactcttatagatacttatagatagaaggaagaagttccatatatacatctttgaaactctaatatcattattccaccctaattaacttagttttacattgattttaatctatattgttattaccgtttgaaatccaactataattttaatttctttcagaaacttttcaaattaaactttttttaagtatatgttaagtgaggcatcgagaaggaagtacattagtagtacatagagaggccggggactcggcgaaaggcagattcataggttgatcgatgccgcctgcagtatactgttccgaaatgctgctttttgcacgggtggttgtactccaagacggtggtcgtcgacctatacgatgtccggatgcaagttagccggtggacctaacaaattacgctgccgctcgctcagctcaggctcccctccaaacagcacagtacagtgctgccgtcgacgtcttcctcccgagctattttatcattatcgcaaccaaactctaatcataccaccccccacccacaaaatcccaatacaaataccacccatcaaatagatagcgagaaagaaaagagaagagaagaagaagccgcccaaccaacgccaaaagctactgctgcttgcacaggagagggcagagagagagagagagagagagagagaagagggcggctgcggcggcggcgcgcttcgctcatgcagggcgagtaccaccgctcctccagcgaggactcgctgcttctgctgctgctgctgcggcggcggcggctgcggct

SEQ ID NO: 4761 - DNA, 2000 bp, Oryza sativa
tgatggtactgcttatatttcagaatgtacagcaagattttgttgaattcacgtatggcttcagcatatctaccagaagaatatagcattagctaaaacaaccatcttgggcaatttcaagaaagtgaattaaaaaataaattcataaaatggggttttactgaaaagaatgcttatatcctaggtgtggctgtacaacatgactcaatctaattttactggaaataatgtttatatcctaggacgcatttcatgtgatttaagtacaatttgaacatagaagagcaaaaaactctgcgtctaacatggcactgtagattgaagtatccattgattccaaggcagtcaatgaactttagtacctgcgcatcataagatttgcaaagccatagtggtagatagcagagatgtgactcccaatcacaatggtgtagaccccctgctggttaaggtcgattggtgccaagcacttgaggccagtgcggtaatccccaaggaggcagtgtatcctgagcagcccaatcatgctgtaataaccgagcatcttgagcacattgctgccaccctggtagtcgtagccgtcggtggcagtgaactgctcgagcccttccttctccctctccagaatctgcgcgatcatggacttctccaccagcgcttgcaggtaattgagaaccccgtacacattccacgcctgcagcaattcagcaaaccacattagattgtacaccacggataagaacaaatcagaaaatcatattagattgtaccccacagctaagaacaattcagcaaaccggattgccgattatattatgcgccgcagataagaaagaaactgaattacatattagattaggctgcagctaagaaagaatagtagtaataatgcataatcaagaagcattggtggtgagctgggtgtgtcaccttgtcgaactgcttgagctggtggagctcgtcgtcggacttgttcttgagcttggcgcggtactggcagaagctctggaactggtagacgaactcgtcgaccatgtcccagagccactggttggggagctgcatgttgacgacgccgtggaggacgacgctgaagaggtcgcagtagttcgcccacgactcggcgcgctggccggcggtgagcggcgcggacgacgacgacgacgaggaggcccgcgcgtaggcgtggcggtaccagagctcccggtagaggaggaggaagacgtggtcgccgtcgcagtagggcgagacggcctccgccgccggccacggcgcgtcgcggaagaggcggtcggagagccgctggaacccgccctcgtacatctggtggatctcgtacacgttcttgtccctgacgtgcctgtacatgtgcgccacgaacgtcttcaccgagtccggcacgtagctcgggtcgtacaccgccccacctccgccgccgccaccctccgccgccgccgccgccattgctagggtttcgcgcttccggcggcgcgtgcggagggaggaagacgaagacgcctccccgctccaggttttcgtttttaatgggcctcagtgtttcggcccacgtagagtatgggccaaaatgggcctggtagtggaggcccacgttgagggaaaagtgacagttatgatgtgggggacagctcagatccatccgacaagccgccacctaccaaacgaactcgttaactttcctaaaaaaaataaaaaaaatgatttatttattcatttttattttttttgggagagctaatttggcggggagaaatttccaagaaaagaaaataggaggaaatcgttagacaaggcgggtgggggggcatcgcatctggaggtggaggccaatccgctcgctcgctcgctcgccggcgacccgaatccggccaggagggggggcggctggccggagctagggtgggtgggtggttggccgcaccaccttcctccgcgccgccggagcgtgggcagcggcggcggccggtgggaggaggggaagc

SEQ ID NO: 4762 - DNA, 1319 bp, Oryza sativa
aatggaattaytattatawcatttattttagaggttgtattattattattattaaaaagccaataattatgaaattggagggtgtattttaagatggaagaagcaatagcaccaaagttwggccctgtttagatcccaccctaaaattttttaccctattacatcgaaagtttaaacacctatatgaagtattaaatataggttaaaaaataactaattgcacatattgcaactaatttacgagatgaatcttttaaacctaattgctccatgatttgacaatgtggtgctatagtaaatatttgctaatgccagattaattaggattaataaattcgtctcatggtttactaacggattctgtaattagtttttttattaatacaccaataccccatacgacacctatataatactcgatgacacacgaaaactttacgtcccctggcctaaacactcttttagttcaaactccctggaatttattctaaaaaaaccactcttgcacagaggataccttgtacgaatagagaataaaaaagagtaataatagtaccagcgatccagcacagtgcttgctaccactaggacgctttacgtgtcatcaagagctccatttttttcttttttttaaaaaaaagctcggaaatggcggatgaccaagatgccctcttccccatactccctctccctctcctcctcctccctcccgtctctcttccccgtgttcctcctccaccgctgtagctgtacccctcctcctcctcctcctctcctcgatccgcacgcaccgccatctccgatccgcagcagcagcagcagcagcagccgcgaggccccggagccacgcgcatctcgctcgccgccggcgagaaggccccggtaaccggtgggccgcagagggggaaaaggttttggagggacgacgccgcgtgcgtccccgtctcggctgggaccgaaccggaggtgaggtgctcctcatccctctctctctctcgtccgctgctccatttgatgagagggttgggttgggttggtgtggtggagagattgggaatccatctggggctccggcttgctgctgatttccccttttctctccgatttgtttgatgcgtggtgtggtatcaatagctgcttgtgttgtagttttaattaaaaacagtttagcggtttgtttttccgatacaaattcgtgtggttcagctgattttttaccacttgtggttttgatcagctgaaaaccaaaagttgagtatactgagcttgtcgctaaccatgaaaaggtgaagcaggtgtgccatttttggaggctatcg

SEQ ID NO: 4763 - DNA, 2000 bp, Oryza sativa
ctctcctctttatctctggacgtggattgctgggagcctcaaatccgttcctgctatcctggggcatatagtgcacgcactcagggtaaaagtgagatcatggatggtgatgcgtggttgcgtacatacatggctcgtgatcgggttcgtttaattgcaggcacgggaacagcaacggcttaaccgacgggacaggctagagcttctcgtttctccggcgatctggggaattgagtgctctcttcctggttaagtgatgggctgatgtccatgcgatgggccgcataaaccagaactcgaggcccagttgtttctagcccaaaggcattcactgagacagttgctagttctgagggatatctgggcaatctagccctttgcagctgccggttgcaaagggcctgtcactgacagccttggcccttggtggattagtgttgtcccgtggctggtgccgaagaaggcctgaaaggctcagggcctgtttgattctagccactgccttaacatttttttttttkggtatggcaaggtttggcaattgctaaaattttggtagagttagtttggattgttgccaattcttcttttgtaagatttgagtaagcttcaatttgttgctatataggggtgccaaatgattggaaaggcattgattaagttgggctacaacccgaacacatcctgaaactgcagtggacgagggtagtagaagaaagagtgaagcactggggaatgatgcaaacttgcaaagatagaagttatactttggagtaaattttataaaactagagataaaatgaccaaactattgtaaaactacagatttaacttagtgttttataaaattatagatttaacatcaaatttattacaaaactacacatttattgcaaaaccatcataaaactacaggtttagaactattttagccacaatggtgataggtatttaaaccttgaaatgtgtagttttctgataatttcaatattgaatatatagttatatttatgataattggtcttaaatctttagttctgtgataaatttagtattagattatagttttgtgatataacaccttatgtagttttgtgatattttagtcacaataccagtagttttctgaaatgcactatatattttaatatgttaatggtgttggatagatattgtagctacttttaagtgcagctttatgttttcgtgtctaacatttgactgtctgtcttatttatttttttttatgattagtacttttattagatgataaaacttgaataatgctttatgtgtgacttaacttttttttaaaaaaaaattcataaactttttaataaaacagatggtcaaacattatacacgaaaagccacaactacacttaaaataggacagaggtagtattaggtagtataggtagtgctgcaacctgtacctattagcaccacggttttgctagtcctcgaaatgatttcagtgaatttcgttcaaaattcgacacaaaccgacaagtttgaatttctgtcgtcaaaatttgatggaattcacacgaatttagcaacttctcctacctgagacacaatagttcatatccactgcgcacgaacgcagtatttctggagccgattggcgataacaagcagcagaaccagagcaagtccaaacgaaatccagtatggcagtatgtgccatgcatcattggatggactatgcagaatgatcaatcgcgagtttagttccaaactattttttcaaacttttcacatcaaaactttttcacacacaaacttctaactttttcgtcacatcattccaatttcaaccaaacttccaattttagcacgaagtaaacacaccccaatttgcttctctccagactctctagactcctctgtttgacgtccttgtactgatccagctacctactccactccactaccatcaatcattcaatcatcgccgccttatctttcccaattcgatcgatcgaccacctgcc

SEQ ID NO: 4764 - DNA, 2000 bp, Oryza sativa
agtaccaatgtacattatgtagtaccatacaactcgcatcgctttcattatggacatatcttctgtgttttcgctgtatccattctgtcaggacaagaatccggccaaattaaaagccatgcaaactgacaagagtatgatctgtcgtaaatgttcaagattttgttttattttctctgctgtgattagagtcattctccattcttgtaatggggtgtacatgaactgcagcctgcaggtatttattttgttcagtgtgacgtataaataatgttggcaattaccgggtcactgtttatgatttttcagtgctgctagatcaagtttgctcttccgggctagtaatatttgacgatttcttcagttgtttgtgtaattctcgtaaaaacctgtacaatttacaggaagcaaacaccgcttcagatcgcatggactgggctttggcccatgcctaatgaataattatacctacagtgggccagatttggcccattgcaaattgttactggcgaaagcataattagacttcggacgtcggcgatggataagttgccgcaaaatttgtaactttgttttttggatttttctacacgtcttaaattttcttcagtaacttggttaaacacaaatacaatataattacattgtaacttacattttactatagtataatttttatatataactttaacatagttttggacagttagatttgctcagattcatgcaaatatggaaagaaaatattaatgtgttcaattgctcatggatgaggactttttgggggaaaaattcggatatataagattccctccgtcccaaaatatagtaatttttaggtggataggacatattctaatactacgaatctagataggggtatatccagattcatagtactagaatatatcacatccaaccaaaagttattatattttaggacggaggcagtagtccctttatttactagtaactccaagagggctcaacaagaaaattataccttcgtctaagttgtgagataatcgggtactactctactataacaaactctgtattttctggaccatagggtactgataatgaccatagggcactctattaaccttaggaggctgtgataattatgtcggccatgcaggagatgagaaccaaaacctaattttttttcataccaacaacatttatttttatacaccctcaacgaaagaaaatcccaatcatcagatttgctgtgattattctcaacatacacgaatattaattttactatcttacagtgaaacgagcgtaacttaactggttagatttcttatggtggaaccagtttatccgagtttaagtcctagacttgatacggagctcagatttatagctaattgtaggtgatatacccgtcaataacgagatgcccatggtgaacttagtcaatcttaaagtatgccggtctagtattataaaggtgctcatacttatgcccgtgatctcaaaatwtgaaaaaaaaaaatcagctcagacatccaaaagtactcgtaggggcaagatatgcgtttgtgccttcatgggtgagtccacgcgtattacatgatttttattccctatgtcctaaaatataagggattttggagagatatgacacctaaatatgaataatctgtctagaacaagattatgggcatgttagtggagcttaagattctgagaagcaactgctaagaagctagctggtgagaatctggagaagctggaaaacccagcttctgtcttctagttcattttccagattctacatctatagattcttagaatcttggtaaaaagatgggttgttagggagagcttttggtagctagagattataggagaagatgcaactgctaaaaactcctttaaataggtccttttagtaatgtgtcacgacctctaaaatcgcttacattttgagacggataggacaagaaaaagcctggaaaatcagaaaaaaaaaaggaagagcgaaa

SEQ ID NO: 4765 - DNA, 2000 bp, Oryza sativa
tgcttatattaaccacatgcgaaaacmaaaatttcaaaaataatcgcaaaaaatwaaaaggcgaaaacctagctgcatccccgctcatcatcgttgccatcgtcaccaccacaactcgtcgtcgtcgttgcctctctccgtggtctccactgcccctccaccgccggatccggacgggggargggcaccgctgctaggggagcgtgtggccgcgctgccgccgcccgccaccgctcccggccaccgcgctgtcgcttgctatcgctcccggccgccgtgctggcgttgcccgtcgccgccgtggcgtgctgcgcctgctcccatccgccgagctgctcgcgccaccccgcgcctgaagtggcacccaccgagcccaccgcccccgtgcgccaccaccatcgtgcaccgggccaccatcgggcgttgtgcatgagcgaatgagagagagaagaggagtggataaggttgaaataacaaggagagagagaggataaggatgaaaaatgttaaagtgttgagaagggaaaagaggaggggacttagactttaggcggattcttaaggggcctcacacgaaaatgggaggacgatttttgccgacgcgaccagttacggtccatctgcaatctaaagagatctttgtatagaaaaatcgcttttgtagtagtgaagttcactttagatctcaatcaccaagtttaaaattcttccctaaaccaaaatatccggtatagcctatcccccaactcaaaataccgtgtcaactttgatcccttgacaatatagtggtcagttttggcttacgcggcgagcgagacccacatgggccccacatgccagcgtcatgcagcgggccaggaatgccgttgtggcactcaagtgcctcgtcgtcctcaggatcctgctcgcacgccagctcatccggtgccccacccatccagctagttgttcttgtctagcccatcaactgcaagagcatggccatccattcgacatcgatcgacatcttgggctcgttcttggcatgctcaaggaaggaggcgaggaggagcaacacgatgacgcgacagagcgtgtaggtggagtggagttctagccacgtgccgatgtagttggtgtcgaattggtggcctcacagctggaggagccatgctccgtcgccgtcgtgaaactccacaatgtatatcgggcatcctgccaccgcctttccgccctggctgccgctagtgttgtcaccggagtacacaaacacgacagagacggcgcaatgtcctcttcccgcagctggcggttttgggttttgtgtttagggtttaggaacgcctcgataaggttatcggtgagcggtgatgtgtcctctaatgacacgcccgttgacaatgacagcgacccgcttcccggagaagaaccgccagaggtagaagaagatgaggaggaccatgagtagaatgcccccaaaagaattctcacggaaagaatgagagtccgaatctcaacccaccaactcggcccatcccatcccaaccgaacaaacacacccaggaaggcctccaggccttgcccggtctcccccagtccaatcccgcaaaatttttcgaattccacccaagccgaacgggggggaccatccgaaatcccgacaggcccggcccaaccagtatccatagccgatgcccccaccgcgtcgctctgcaccttcgcagccaagcaagcaaagcaaacgactctctctctctctctctctctctctagtctctactgcccccatctctctctctcttctctcgttctcgtctcgcccaaatccaccgcccccacgtctctcgtgcctcctcccccatcccatccccacgcagatttcaaacccgcgtcgcctcggccctggtcgccgccgccgccgccggccggtcgcagcagcagcagcagcgggagcccccgatccgtcgagatccggcgcggggagagggagagggagaggaagggcggggacgcgggagacg

SEQ ID NO: 4766 - DNA, 2000 bp, Oryza sativa
gcacaatcgcgggtgagtgcttgcgggatgtgtgtgagtgtaagagtgttgatgtaccatgtgtggatggacatttttctcataatggaaggaaaaaatattatgatgttttcagactggaacaagtttttcaatatatatatgaaatgttagctacaatgaggtacctggagagttcagagagtagttgtatcaccttaatgtaattaacttagattaataaatcgttaattatctaaagaaaacaacttttggcaactcctcaagttagtaccataaaatcgttctttcaaatacagtttcacttgctatatttattttgatagaaattgttagccccgtcggttgccctaaaaagaataagccaatgcgaaactttgaattttcaaacttaagttgattttaacatattttcattgtaatttatttttcaacattaactgttaagtcgctaagaacacatatataaacaatttacacataaattattttatatcgctaataagccgttacaacttatagttagcttttggacaaccaacgaggccatacataatactcttttattacaagattagtcctcagtttacataacaagatttataaaaaaataagcttaattttttttatggatcggggcagtgtttcatacctgggtccttattatacttcagatactagttgtacgactgaagggatacaatgttgttagttgcactagttccctctttcaatgctttcataattacatgaactatttccgtctttcagatattattcttcctgggtttcgcgatgttcgtccttgagacgttgctgagcatatgggtcatgcaggtaagcgcacacaaccgcattaattaactttgcctacatatataaacccagtgatataacttccttcaagacagaattttaatcatgggaaaacctctgcttctacttgcagaaagtatattggtatttccgcgggaaagggaaggaggccgagatgaggcctgatgctgcagcaggcggctcacggttctgacgacatagcaaccctgaacctgaagctgcagctaaggatagacaagatcaagcttgaaattgttgtgaagttgtaagtggatttgttggattgttgtggacttgtggttgatggaagtgcaagaactgatgatgtacttatagatcagaattgtttcacttgtcactcacatagatattttgtttgctcaacttactttccttgtctgatagtctgaaactacagttcctagaaaagaaagtagaagcccaatctgtgccttgttcagatgctagctagtagtagctgctacagagaaaatctttcggcaagcatatactactccatccaaaaaaaaaaacatttctagcaacgaactatatccaggttcataggtaagatagtttttttttagggagggggtatgttgttgcatcacgcatatatatactttctgtctttcttgacatcatgtcgcaatccaatggaaagaacagatacggggaaggccgttctcgcaaaatttcagctatgaactcgcgaaatcttgcaacatggatgaaattttgcgaatatctagtaaagtgtgtaatgtagaaacgtacgcggtcgctgtcagggtggcgtagagggggcggcaaagtgagagaaaaacattaggccgagtctgagtcgttgcaaggctgaggtgtttgacggcaacaaaaaaagtaaacacgacgggctgagcctgagcctgccaaatccacgcggagtccgctaaaatttttccactggttctagatgatcgccatcgatgatgcaacgaccaactgcttcctctgcggaatagctgaataaattcagagttcaggtccatctaggctgctgctgctgctcttcgtctttgctgacctcggcacaggcagagagagaagccaagaaaagggaaaagagaggaagaagagagggaagaggagaagggagacgcgcggtgatcggaggttgatcc

SEQ ID NO: 4767 - DNA, 2000 bp, Oryza sativa
catgccgtgtgtccatgtggatcggagtacgctagaaatttttaacctggaagctagagttaactgtgccattagcaaaagatcactttattaaccttgcaaacggcaaggtcaaaagctctttccaaaaaacgagaaatatacttttgacattttgacagatgagtgagctagcactagtgttcttcctgcttcgactactaccatatatgttgccttccatttgttgctcatgccactacaggcggctaaagaaacaattcacatgcattatgttattttttttcgcaaattgcatcagttacctaaccactcctcgttctgccatagtttcattagtttaatctctagtttaattgagctttctgtgcgttcattaagtaaagtacaaggacaggcaggccagaagtattctcgttggaccatgcatgtattaataagcagcagtgccggtatgcgtagtatagagtaattcgtctgaacctttctcttttgtgcaatgtgcgcggagaaaagaaatgcatggctgtgcttgatgtcgaccattgacgatgacccacctaccgtgtatgaacaatcgcggaaatagaggataattagagataagggtagacaaacttggatggaccatgatcccgaacaacacttggcattttggcaatgatattagggcccacatgttaatgagcagtattgtagtatgtattgtagtatatctctgtttccctattttgccaattccttttatctttgtcggttatgtttctataaaccggttgagtagataagggaggtttcgtgtctatatgtactccgcaccgatatcaatccaattttgtgttgagtctattccgcttttatggtatcagatttttttcgatctaccgctctaagcctaactccaccaacaccgccatgtcgacggctacctcccccctcttgccagagtccctcgtcaacgttgtttccacgtccgttgccgacgccgtccgcgcgtcttaccaagccctgcccggctcgacaattgatgacgccatggccaagacggtcaccgactccgccgctgatcgacagggcatccgccgccgacccgccgtacatgctgccctcaaacagcacctgccggcgctctccatagcgcccaccgccacctcgtctctccccaccatggacatcgctccttaattatctctctcggttctgtttctataaaccggttgagtggataatggaggtttcatatgtactccgcgccaatatcaatccaattttgtgttgagtctattccactttcagtttggttcatgagatgcattaagtctgaaaagtaatatttcttgaatataatataagggttggccttatctttaaaaaaaactagtggatcaatccagcccatttttctctatcactaacatgtgaaccgtcacttaaaaagtaggtcattttatctctcataccaaacggataaatgcgatcttcctattttcgaaatatggatgagttcaaccaatctcatctcgttctgaaatcaaatacctctgtgtaaaaaaaaaagcggccgctgtattttttcagtagatgaaggagaaaaagaaattcggaattctgaacgttcgtgtgtgatttgactgatttatcatctgaaatatctgaatgaataatgattaggatttctggaggaaacgaagaaacgagcgagcagaaaatgagtgaaaaggaacgaacacaaacgctgaccatcctctgctgcgtgtgtaaaactgcagccctgtccaacaaagcggccggccgcgtcgtccaaaagactgatcgctcatcgatccgtcacatgcaagttgccaaccatgcggtgaaatggtgatggttctctataaaaagagacccttccaacctcaccctgtcaattgtgcagcgagacaccgatagctagctaactaatcttccccttcgtctccggcattattccacttggacgaacactagctcaccggccggcc

SEQ ID NO: 4768 - DNA, 2000 bp, Oryza sativa
acgacgacgacattgatgatgtctttgcttgcatttgcatttgcataatgcagcaacgtgccgaaggcggtgtacttgcagcagctgatgggggtggacggcgtgatcgtcgacctggtggcggagatcgccgcggccgtgtccgagttcgccgccgccgccgccgcggcggtgccggtgccggagcgtgattcttcttcttcttacatggacggtggtggagatgtggggttgctggagatgacgtcgccggcggcgaggacgacggcgagcttctctcggcgggaggacgtctcgttcttgctgaggctcacacccgagcttgtgcagtagtagcgtgattgatgctgactgccttcttgtatatagcggtgtatataactaacactgatgatgtgtaaccagtgtaatcccccctctgtttgagatacatctaatgttgtcttgagagggcttctatagggctactagagaacgggattatgtccaaacgggacactttaagaaagactgatgtcatcccacgtatttactttcttcctataaatttagaatcatcctgctctactccacatgttcggcgcccctcacgtctggagctagctagcacctacaacgatgtaggtagcaacactagtcacaacagtagcagcaaggggtcgaaccgagggaaaggaagaagaagagagaaaacgttggtacttgatacttgatacttcacaggtgtcgaccctggtacctaaggcatacccgtgaatactagcgatgccgcaggtatactaagtttagcactgtgggtaccagtcatggtacccgcacgtactggatctgatacataggtatcagctatgataccaaagataccagacatgatacctatgggtattgattgtggatgatgtattggacgacgtacttacacacacttcggcaaggagcatgatggctcaccaagtcatcatcatgtggatgccaaatgaaagctctagttccacaagtttcattggttgcatccctccatcattatcaacaacatgtgcaagaaggaggccaaggaggttattgttacatttattaataccatttattagtaaaaacaatttataaataaaagttttatatatgtattttcagtgacacaaaagtaaatgctgcaaaataaatcatgatgaaaaaaacataaaatcaactttaaaaataagttttaaattcgtagttcatatctactattataaaaactgaaaatctttttttccagtaatttgatacgtcatccgtgtttgagtgagtttttaagttcattcgcttttagaaatacagattcccgtatgagtcggtttttaagttcgttttttttttgaaaatataaaaggaatcgtataagaaatctctttttttaaaaaaaactgacatgctaactttcgtctcctaattgtaactaaaaagaatccaagcgaattcccatggtgaatttcaccttagctaaaccgtataagattaaaatatcatttactcattgtaacgcacgtgtattttttctaggaagcataaatataagccaaaccatgagaacgatataaaaaggatatggttgttgctgaattgtttaattttcgtagaaagcctgcggtcaaaggaagagaattgaacattcgtcgcagagaggaatgcactgccgcgtggaagagaggggacagagggaggagagcgcaaatgggaagctaagcttggggaggacactgacaggtgggcccaccattttggaagaaacggaccaggcgcatgcgctccccctcccccttcctccacaatccagatctccattattactacctctctcttcttctcccacaagtcagagaaggaaggatccaatactagaaaagggaaaaaaaaataaatcaaaatccattccccttctccttccccaaacacggtgtggtctgcacgcgactcctcccccctccgccgccgccgccgccgcagcgagaccccggcga

SEQ ID NO: 4769 - DNA, 2000 bp, Oryza sativa
ttcggaattaaaaataaggaatactagaagtagagtatagagtccatatagaaatacaattaagaaaaaaatagaaattcgaaattaaaaaataaggaatattagaagtagagtatagagtctatataggaatttaaaactaactaaaattcggaaaaaaaaaggaacctccaatgttcgctctcatgacctagaaattctcacattaattagagaaaaagaaaaggcagagtccatatagaaatacaatttagaaatagctgaaatttggaattaaaaaataaagaatattagaggagactagagtccatatagaaatacaattcagaaattgttgaaattcgaaattaaaaaaataaggaatattagaagaggagactagagtccatatagaaatacaattaggaaataattgaaattcggaattaaaaataaggaatattagaaatagagtatacggtccatatagaaataaaattaggaaataatagaaattcggaattaaaaataaggaatattagaagtagagtatagaatccatatagaaatacaattaagaaaaaaaatagaaattcggaatctaaaaataaggaatattagaagtagagtatagagtccataagccgtataggaatttaaaactaactaaaattcggaataaaaaggtgcatctacgttcgctctcatgacctagaaattctcacattaatcagagaaaaagtaactaaaattcgaaattaagaaaaacatgggaagaagagtttaaagtcaatatagaaatacaatttagaagtaactgaaatttgaaattaaagattaaagaatattgaaagataagtttagagtccacataaaaatacaattaaaaataataaaaaatcagaattaaaaaatattaaaagacaagtctatagtccatataggaatatatataatttacaaataactaaaatttgatattaaaaaaaattaataactaacacgtatataaaatacaatatgaatattacacattagtagtttcgtaaggttattgcaaaatttaaaactatgttgtcattgtaatatattttaataatataatgagaaaacagatatgctattatatgagagaaaatataatgatgctagccgcgcaatctgcgcgggccgccatgctagttatatttacacacatttagaactagaacacactttcacgcgttaataagatgaaaagctactgaatttgtaatcaggagataggattcaaaaccaaaaggatataaatagttatatatacagtacattatcatcacaaaaaggttgccacttcaaatctctcccacacaactactccaaaagcctgcgccaaagctagaaattagcggcagctaagcacacgtgtaggatcgccaggcgcgctagcagcgagagaagggagcacgccgtggttaacaacccccgctacacatcaccgccgacgaacccgaccgccggccaggggccacacggcgtcgctttccagggacaggggtttggtaagcgcaatagtctcgtctcggaggtaggagtagaagagaacgggggagacgaacgagagagacagagatggggaggttgtcatccgtcatcatcacgtcggagagactaaaactgtttgggaagcttagctacaccttctttcaaaaccaaaataagaaatatctaaattatgagaaattgtagtgtaaaatccagaaaattaaccgaaagctaaaaattaagaaacccaattcttcaagattctcgaaaactaattaccaaccagttgtttctttagaatattaagactccaaacaagctataggaaggtgatagggagagggagaggagacagaacgccctgcccgtttcagacctcggcgcgtgcacatatataccaccccctcccggtctcccatgcgctctcgatcaccatcttctgcttcatccatcatccactgctactctgtccgggaaacgttcagacagaggtgggc

SEQ ID NO: 4770 - DNA, 1047 bp, Oryza sativa
gcaaatactttattatytgaaatatttttttatcacgcataagttgtaaccgttgaatgtcacmgaatatttaccgcaacatccaaaaagaatattgcatgcaacatttgtaaatgccatagtaaaacgttaagaaatacttatcgagacatcgaaataatattgtatgcaacattacaaacagatctattgaaaaaaaaagaagaatatttttctcaaaatatgatcatgtgagatcttgttgtaaagatttaattgtaacaaatataacgaaataatcagatccttgatcggatgaatagtttttgagaaaaagtatttaaaggttgttatatggccgcgtcagagataaaagagtaccgatttttctcaagccgccagtcgcgtgggccctggggtggagtattctcccgattgaaccaggataaactgttgaaccagatcagatggggaaaaataatttagtaatacgcatatcgaaggcttgcttgactttctcatagctcaagcttttcaataagccgacaatgaagggtgcgaattctgaaaatgtttgtgaatctgagcttactagcatcagtgtaaaaatggttgtttatgctcaaaaaaggtaaaaaggctgacctagtcttggtaggaaagaacacaggaagaagcacgcgcgcaggtggtgcaaacatgtacgcctcaaagttgtgatccgcggtgaggcaagcgaaatttcaaagccatgtcagccagtgaataaatggacgcgtgttcccttgaaaatttccttaccccaacctttcaagtttcaaagaagaaaactcctcaggtagtgtcagaatccagactccaggagcaaatcagcaaacgcgtcaagaactcggaagcacacgcgcttccaagaaaatttccactgcgatcctcttcaacatcttcgtttcccatccgatcgcatagcgtataaatatcaccagctacctgattcattattcatccatcactcgttcgatctctcccatataattctaagcagatcaattgtcacaactagctacgatc

SEQ ID NO: 4771 - DNA, 2000 bp, Oryza sativa
agagagctccaaagaatccacgcccaggccctcacacacggcctccaccccaaccagcagtccatctcctgcaaaatcttccggtcctatgccgagtttggccgaccggctgacgcaggcaggttgtttgatgaaatcccccaccctgacattatctccttcaccagcctcatgtcccttcatctcaagttagatcaccactggaaagctatatccgtgttctctcacgccattgcttctggccaccgccctgatggctttgctgctgtcggtgccctctcggcctctggtggattaggggatcagcgtattggtagcgtggtgcatggcctgatttttcggtgtggattggactctgagttggtcgtttgtaatgctttggttgatatgtattgtcgatgtggcaagtttgagcctgcacggactgtatttgatagaatgcttgtaaaagatgaggtcacttggggtagcatgctgtatggttacatgaagtgtgttggtgtggattcagctttgtcattcttttatcagatgcctatgaagagcactgtttcttggacagcactgatcactggtcatgttcaagacaagcagcctatccaagctcttgagctatttggtaagatgcttttggagggccacgtcctaaccatattacaattgtaggggtgctatcagcttgtgctgatattggtgctttggatcttgracgtgccattcatggatatggaagcaaatctaatgccaccaccaatataattgttacaaatgctctgatggatatgtatgcaaagagtggaagcattgctagtgcattttctgtatttgaagaagttcagatgaaggacgcattcacatggacaactatgatttcaagtttcactgtccagggtaatgggaggaaagctgttgagctcttttgggatatgctaaggtctgggatacttccaaacagtgtgacattcgtctcagttttgtcagcatgcagccatgctgggttaatacaagaaggcagagagttatttgataaaatgcgtgaagtctaccatattgatccccggcttgagcactatggatgcatggttgatctgttaggacggggtggacttctagaagaagcagaagctctgatagatcatatggatgtcgagcctgatattgttatttggaggtcacttcttagtgcatgcctagctcatggcaatgatagattagctgagattgctggaatggaaattataaagagagaacctggggatgatggggtttatgtgcttctttggaacatgtatgccttatcaaacagatggaaagaagctttggatatgaggaagcagatgttgagtaggaaaatatacaaaaaaccgggttgcagttggattgaagttgatggtgtcgtccatgaatttttggtagaggacaagacacatgatgctagaagggaaatttatgtcaccttggaaatcatggctaggcatctcaagatggatcccataccatctccattagtgttaactgatggagaacacatgctctagaaacacatattgtcctttttttttctttcctttgatgacctctaaccgaactgaggatgatatgctgatatttttttctttttgttagtgacaaggcaccatagttttgttttgatttgtttgattaaccaattagtgatagccagttgtaacacactgatgttatttcattgaaaatgcagaattgtagagatttattttagatgtcgacctgcagatatgctatacctgtattttgtttggtcactctgtcaaaaaaagagtaaagactgcaatgcgtcccagttcatgttatggacttctcctcattttacagctatcttgctgactacatcgctacctctgaatgttttacttgtttacttttttttatatataaatgacttatttatgtgtgccgaatttctaactatctgatttgcctactattagatgtgctctggagatgatattgatggagac

SEQ ID NO: 4772 - DNA, 2000 bp, Oryza sativa
gttttaaaatgtttgacaccgttgactttttagtacgtgtttgaccattcgtcttattcaaaaaatttaagtaattatttattcttttcatatcatttgatttattgttaaatatactttcatgtacacatatagttttacatatttcacaattctttttgaatagacgaacggtcaaacatgtgctaaaaagtaaacggtgtcaaacatttcgaaacgggggaagtataatacacactaagcatgcatttccataagaccaagcacattacgtggaagacaatcccgaatgaatcatttcctagaactcgctctgccatatatctaattgtctgcagtgaaggtaaaaagcatcacatgagaaatagagcacaatatctcagattgacatattctatgttgtgcatcagagtcccagcttaccatgactaactaaaattagaagtgaagcatatctattaccttccctagaaagaacagattgtgaaatagcgaacataaaaggaaatcatctttcataaaccgttgcatcaactttgttctatctatggtagaggaatagaccaaatgaaacctcctgtattacatgcacagtatcaaatggaaccaaatttcttgtttgcaattttttaacggcgagaatcttaagttgaacaacaaaaaaatatggggaagggaacactacaacctcatcaaggaaaaaagtggaagcaaggtatgctctgtcatagtggctggtggaatcagagaatgaaaatcagtcttcagaacttctctgtcaaggtagaagtggaaggaaaattgctccagcttctgtgttgtgcttctgaccacacaatttccatcatattgttaggctgtgccatccatcagctgatattgtgagacattgtatgcattatgagattgtagaacatattggcaggttggtagctgatattataccataaggaactatatgcattatgaaactgtagagcaaatgatttcagatctaacctgcattgtccagattaacttgctaggttattatatgccacttggacatgaaacatcagattgatcaagtctcaaccaccttctgttagtaattctcagaagataatgaccatcttctgttagtaattctcagatgataatgattaaatgaatgttgcaatttaggctgcatggattgattaaacaaaaagcagtaatgcaaacaaatgattcaatatttccatcctttattttacttcaatgggtaaattgaaattagaaataatctgcaacagagaagctacaaacagtagcctaggaagtataaagagaatgcagtggtgatcgattgatctagcctaaaagttgctttgacacatacatttcgaagtaccaacagataaaactcaactctgaagaccacattgcttaactcacaacttttgttattgtaaaaagaactgcaattcataaattgaataatggaaaacatagtgattcaacaaacgatggataaacagattactctgaggtgactgcagcagagccaccagctgctcaatgctaagccattgttgttgcttcatcagctatgtgtactctcttagctgcttaataagatagtagcagaaggagcaagcacggaagtccagattagccttaccatggaccagatctggtttcttctaataggaacgaccagcgcctgcccatgcggctccttcgctccaccacgcggggccacgctagcgtgggctctgctagtctgcttgtcttgaccgctggacactcaaggcatgcaccgccgtgaggactgcgaaagcagcttcgcccaaggcaccgcctgctgctgatgttgctgctccttccagcgcgagctctccgccacagtgaccgccggaggaatcatttctgatccgcgtgggagggtctcaccttgggacgctccggcggaggaggaaggggacggagaggattgcttggaggcaaccacggtggtggagcttcggcaaatctccacc

SEQ ID NO: 4773 - DNA, 2000 bp, Oryza sativa
tgtttgagactaacatcggtagatggtactatactccgaaactgtactagtaacagcatatggtgctcgatgaatcatcaatttcgtgagcacgtagaaactaaagctcccggtgagtaccaaacgaagtcagtgtagttaggcttctcatgacttttctttctcgtactcgtacaacgtataatgaaatcttttgctacaaataattgactcaaatttgtgcagtagtaagattttagaccttcggtcatgcctgttttcgaaatagttgcatcagttgtcatgatgcatcatttggtgacgactactggcgccaaaagaaaagccaacactcctggtctattcacagaaaagcatcacgtaagctttttttcttatcaccacgaaaacacaggaagcatcagtggcttccgaaaaccaaatattccaaatccgatgcgagcggcgagcgggtccgtctacgagcggcgtatctttgcttgcggcaccaaaatttccccgcacgacaaggttcctccccccaacacgcgccgctcagactcggctagctaaagttgacgatccgttggcgcgggaggcgtgcgcggaacacgacgacagcgtggagggtggtggccgccgcggcccacgtgtctttacgcgcaggccgcctgctgccgataccgatgccgacgccgacgctgcccccgcccgcgcctgaccccagctcgggacgcacggatcgtgatgcgtcgtcttcctcgccgtggggcccgcaccgcccgcgacgtgctcgcactacgtgccgccccccgctccaggtggggccgcgtcccgagcggcggctttgcttcctcctcccccctcctcgcttcgcttttgggataatctgggagcctttttccattctggcactcgcgttcggacgcttttccccgcgcgcccccggcggccggcggaagcatctcgttggttgcccagccgtttcatttcccaccagccaccattagggctccctgcaaaagcagagtttcactacataagacctgttgtttagttcccaactttttctttaaatttttaactttttcatcacatcaaaactttttcacacacataaatttttaacttttccgtcacatcgtttcaatttcaatcaaacattcaattttagcgtgaactaaatacaccctaaatttgattagtttaggtttcaattgattttttccttaaaaatataattaatcacttactccttccgtcctaaaatataagaatcttttattcaaattttctatcacgatacacataatattatattgattcatatgattatcattatttcaataatgctaaaaccaatcaaaagcctagaaagggaatctatgcaattcaaaatttaaaaattaacaagttgaaacaactaaaaataargcattttagctaaccttaatattttttaaataggctaaaaatcgttatattttgaaacacacttctttcgttaaaaaaaacaatcctgaagcggcgatagggaacggaaggagtatattttcggacggaggggtaatttcacataacaagctttgtggcatgctatacagtcccactagcgtgacagccaaaaattttaccgtaaaacaccataaatcatggggactgagatgcaaaactgaccctaacagctgccatacgtttccaaaattggtgcagttgtagtggccaaaacggaaaagcgctcgcctaattttaatgccgcctcgctaaagacgaggggcggcggcaaggagaggacagtcaaaccgctcgctgactgcgccgagttttattccctaccgccgctccaccactcgcttccctttttcccagctgcgttttttttaacccctcgcccttctataaatacggcctcccctgtctctccttatcctagacgccacacacacccaaacccaacctcccaaaacacccacccggtttaccagagatccgcgcccgccacttgtaaacctgctgcaccc

SEQ ID NO: 4774 - DNA, 2000 bp, Oryza sativa
ttgtagagtgcgcatggtgtttaattctactccggctcggcagagggcactgcgttgccggctggcttgccgccagtatgcgggactgcatgtggccatgccaccacagggagatggcggctgttcgctttggcgggaagagggacaccgaggaattccgccgccgacgaggacgaattgcgccgccggtagggctcatctctccctctcactcgcacgacggcatcaacagatagggattgatctgaaaagcgaattactaaattgcccttacatttttttagcatattccyataatacccttgaaaatacttgcagtatatactaacagtatattgaactgtaaaagttctcttaattaattacttgttaatctatcgctccgttttctatatggaggggaacacaagtagtgttcggttgctgccgaacgctgccgacgtcttcctcatcgccggtggcactgcaattctcgccgccaccgacgtcgtcgtcggcgtcgaggtccctgcgtatctgatccaacgagcggcggaccgcggcgcatcctcctcccggatgtcgcggataatctcgtggatctcctcgacgggtacggcgagtagccggagtcgacgatcttgagcagcgagtcgacgatggtgttcatgtagccgatcagctgcttggtctcctctaggctcatgcatctgggctccggatcatctgccaactcggacacctgcaccgccgacgactccctctcagtctcagtctcatccatggcgattcttggctcgttcggcgacaacgacgatggctgatacggtggttcgattgagtcgatgagatcgagaatttgagacggagcgttggtctggttatattggcacgcacgcaggccatgcacgattcgtacatggactccaagtcccaaaggaaaaggatttgtattggccggttctaaaaagaaaaggactcacgtgttcgacaaccgaaccacgatcatgcagtgggtggtgttcatggtccaccgtacagtacatatatgtatgagaatcagggtttaatctggcggaaaaccgacaaatcccgaaaaaatttcgcggaccaaaatttgaatacaaatccctaagcttactgatatgttcacaaaagccggtcagcttcggcaaaattccaatagaaaccatcaaaatttcaataggaaaccaaaaggtaaaacgtgctgaaaactgtccggttttatcgaaaagccgataggtatcttcgaaaaaccgataagaaaaccaagtttgttttttgttagaaaaatatagaaaaaaatgtgataattgggaaaaaaaatcgtgaaaacgttatttcctataaatttgataacctcccatcgacatacccacgatatgtaatatatattcataaaagacagttcatatcactcaccaaccatcggccaaatagaatgcccatcaccaaatacataactctgtgaccgatatattgcaagaattaatatatttccagttgtttttcttccctgaagaagcatgtcatacaagctgctccttcagaagttcactattcgccgggcttcagaagttcactatggggtgcattactgacaattcaaatttgccgcagttaattttgaaatttggatttgggttatgaaatttggatcgtagttacatcatgtattttctggactactgaaagttgctctactgccaaagtgccaatgctggtttgggcctctctcagcgaagccttcatttgggcgcaattttgcaaatcccccaaccaagccatttctaccgccggccgtcgcggcgttggacacaccgaacccccgagccgccgccaccgccaccgccgccgccacgcgaggtcggcacgtcgcagaatgtatctgggacgtcgacctgcggccgctgcctctgttgaggcctctactacagctgttcgccgtcgccgcgaccaggacgaattctcatcttcttccgctccgttctactcgcgct

SEQ ID NO: 4775 - DNA, 2000 bp, Oryza sativa
atttttcctatgtgaatgacaaatggtcccacatatatatttttaattttaatgccacgtaagcgccatgtaggacgaagaccaggtcaacatcgccacatcagcgccacgtcagcaaaaccattctcaaaaaccgctgagggagtcaaattgcactggtttcaatagttgggggagtcgttttatccggttttctggttgaggggtatgaataaaggagttaaagtggacttttttcaaaaagaaaagaaaaaggtcctaattagttgggccttatttgggctgtccgaacacttgcatcatgataattgtgggcctgtggaccgtgacaatagagggacctttacacgtaattaatcatttctccgaccaaagtgcttccaagtttttcgctgattcaatttagtgcacaaaattaaatttcagttgagcatctgcgttttcactgccctgactctctcatattgcgggtgcggccaaacgtggtccgtccatccgtgcatggccttgtatgaactaacaaaggacgtattacgtatagtctagcgaatatacgatgagtctatcaaaatatatcatcaaagaatttgtcctgatttctcttaataagaaaagaaaaatctcaaaacactttgatgtcattgatttggactcagaaaatccagaccggacaggcggacactactactttgcttacgaaagaactgaaagaggcaaaagaaagagtttaattttcttacggagagtggattttcaaactctttgtttgtatgtcacttaaatggtcataaaaaaattaaaaaattttaagaagatatattaatatgggatatatcaatctacaaacacgcaacttaaaatttaatttctacatgtcgcaacggaaaaacaaatttgactgtgaatgtacgttaactagctaatgttcaatttgtttttttgttgcgagatgtagaaattgaatttcaacttgcatagtttgtgtagtgatatatctcatattaatacatcttcttaattttttaaatttttttttcataaccatttgagtaacatgcaaacaacgagtaaacgtattaagagtttagaatactttcccttttcttacaaaagaacaggaagaggcaaaagaaagaatttatttttttagaattatagtataaacacagatactcacaacacgcgtacgttatctccagctgaatatgaatagtcatgtcaagtttaaaatttaacccggataggctgctggttacaccacaatgaacctaatgagttataagctatctcactttacaaagagtttaattgttagagtacattttttctatcatacagaaaattattaacacgcaagtaatcactatttacaatctacagataccactaaattccgtggttcacggctggaacggtggatgcatgccgcaaggcagcctctcgactttcggtctaatcctgacacatgcaccatgtacatctgctctttgtttttttgtcaattgggcatggaattctttttatcattccggtcgacagttgaatatgacggccaccataaaccttcatatggaactacaccaatatacggctacgtggtaaggaaaaatcccccgaaaggatgactttctcttgccagcactgcgcgacttcgcatggaattccaccgggtagacaggtaccgggtcgcaaacttccagatttaactctctccattttggtgctgcacttgcggttcccagctgcggcggcaacggctcgtgtcctatgactccctaagtgttggaatatgcggcgattctcgactgatctgcctagtcgcatgtacacggcggatgccgtagcgctagctcgagaacacgctagctactactagtagttctctcgccctataaaagccggacgcatgaccatgctacacatctcatcgaccatcacctctcccacacggggcgtacgtgctaagctgcagcacaacccaaagccatatatctccgata

SEQ ID NO: 4776 - DNA, 2000 bp, Oryza sativa
aatcaaacgatttttgaaaagcaaacagatatgaatatgttagaaatatgccatgggaaaaattcacagatgccgattgaaaatagcaggcaacgggaacgggataactatctccaattacactttcatttatctgaaaattctttcgcgcatattgcgacaactgacaggtttacatctccttttatagctctacagtgagtgactattagatcatcattcatcatacagtcgtgcactgctcgccgtgatgatgtttgactggcacgcactaccatcctagacatccacatgcacatcatactgccgcagaccgacgtgttaggtaaggataagattgataaggcacttgcgtgtctgcacctttttttttaaagactggtattatttgctttgtggacaagaatataaactaagaagtattatttgagatagtataagaagctagtaaccggaataaggacacattatattatcgcccccgcgtcgctctcgcgtgggcggcttggggacaaaaccctagccacccgcaccggcactcccctcacttctcctctccacctcgccaccgctagagcccgtcgcccgaaaccgagcggctagccgtaaaggtgacggcggggaaagcgacttcgacaatggtcctcctcggcgcgggagatggagcggtgcatgtcaagtgcagagccagcgaccggaatggttaatttggcgcggcagatccagccataccggaggcggatatggccttcgcggtggcaaatctggcctcccttaggctagatcggtataggaccgccacgatggcggcagagctcgtgacgacggcagtcccgtggatgtgcggggtggcacgaggagaggcgcgcagggcaaggaagtgccgtggggatggggaggggcaaacgaggccgtggctggcggagggctggcacgtcgcggccggtgacggaggaggaggacggcgcatgcatcgcctgcacggcaatgttagcagcgaggagggggacgatgcagatgatgatggagcgggcactgcaacctacgaccgcgagaggctggtgaggacgcttgcgacggttgggaggccgtagttgcgaatccggtggtggcgaaggccggcgagggcgacggcagggaggccatcgcggattgtgttcgcgagattcctttgtaggcttggctggcggtgtggcgctggtgcagatgaggtcgagttggcagaggttgtgtaggtggcagagctctgaagtggtggcaataggtgtggtgtggaggtttgtatgcaagcggctacgctttctccagttgaaaaccgagtccttctggacgggcaacagtgacggctaaaatcccatggccttcatgaaggcattgtctaggaggtcctattcctcgcaatctatgtcttctttttgattagtcattggcggctcttggttttcttcatcaggttgtgacaagggatgaatggatctccttctctatcaccctcttcctcctttcaactcctcttcgtgagtataactgaaaacctttcgacgtctttctgggttgagttggtgttatgcggggcgtttgcagcctctttgttggccttctggcgattgatcacgcttagggacggtcggcttggtgctagtgtcttctctattgtgtgttgtgaggagctgccaactcttgacggcgatgcgtttttctttgtttttacgggttacaacctcgcagagttgcatcgtcttgtgcgagtcgttcaaactctttttaaataaagaagctagtgccacattttcgaatgtactaaatgcgacaaaaaaagtcttttaattatctagtcatatttttagatgaatttttcagcccaaaagaatattctttcggttggagtggggatgaacaagtctatataatatcctcactggtcgatacacagtaaagtcaaactacattcactgaaacgaagagaaattgagacctctaggctccagccgtacatggcc

SEQ ID NO: 4777 - DNA, 2000 bp, Oryza sativa
cacatggacaccggcagtgacacacatgaatgcgtccttacaatttgcaatttgccagtggcatggcaactggcaaggcaccgcaccacctctcatgtactccctttttcgcgtgttgatgaaaaatccaactactagtattataagattaatattgccatgttcttttctccaacaaatattggataaacttttggataaaaatgacatgttttttaaactgctaaacggtgtgtttcgtgtgaaaactttttatataaaagttgttttaaaatataagattaatctatttttcaagtttgtaataattcaaacttaattaatcacacgttattaccaccttattttgcgtgaaacacttaatctttatcttcgtctttgtcttcgtcttcatgagattcaatcaccattatctgtatgattgtatctccttgttgcgtctgtggccctctcccctccacactatggtgatcagtgttcatccatctgctctccatcaatgccacttcaatgctctcggtccatatcagcatcatatcagagaactggtcataaatgaatgagtgagcatttaacatgctgagacatgcttcgacacaggaactaaggaaggaaactggtcattggtcaagtcatcgtcaagcttgggccactaagttcgacaacaaatcctgttctcaaacatggcaacaacagtattataaaaaaacatggcaacgagtgtttaacccagatttgggatttatatcacccaattttctgaaacataggatttatatcataccagattagcccttcaaaatgtggactgaccaactaatttgataaatttgcaatcaggaaggaatagatgtgtacaaaaactagaatatgacaaaaacaaagcagaacaaaaatctgacgggaagaaaaaacagcagacagacgtgtaggaagacaacgttcacaccagctgttcagcagaagctttttctatattgatcgcaatgagaaacacgaaagttatttacggaaagaacagatatccatgaaccaaaattataaatactgttagtcttggtaacactcaacatttcaacagatcagcaggcaattctaacactgacagtgctattcgccgatcaacatgaccagctaattttcttgcagcaacatttcttacccggtctctagaaacccacatgagagaaaacagggcagccaacttcaagattttggtcatcttcaaagggagatggtctggtcctgatcaaagtttgaaattattagcacagagaattttgaaacctcagcaaaatataatactagcaagtcttaaaagagtttctctgaacgaccggccacgttaaactaaggccaagtcaacgcagagcccccggagcttttgctgccaccagcaagccacaagtccaaaacacctttctttgacttcacactattcttagtttttaaatttatttcgcaacagaataaattactaagaggatagcatcatagcagatgttggcgtctctgttcacaaatgtgaatactaataaattactaagaggggacacgaatatcttcaatcctagaacacaagttgattagttgaacaggcagcaaaattaattaatactaggaacagtactatttcgcaagcaaaactgtagaaccaattttctgcacccctcctgcaaaaaaaccaaataaaacccaccatttaataattcaccacaactttaaacagaatattacatttcatattgattattcttctataaacaaacaccaggtcttcgggtatgtaccttttccacagaaccctctactgtgccaggtcaaagagcgttcattctgcaatatctcgtgaagtggagccttgctgtccatatgagttataagaccaagcttaccttcctctcaggttccaaccaccataatcaaattactccaaaggccaagctcagcttccattcgtcccaggttctcagccctggctgctctgccaagatccatcc

SEQ ID NO: 4778 - DNA, 2000 bp, Oryza sativa
cagaaacaaattttaggtttagagttttataattactagtaatatgcccgtactttgcaatggatcagacccatataattggagattggatgaattgagaataaacacgaatcaagctcatataattgagtaatggctgggtggatggattatggataataaagcagaggattcttcaatggttaccacacgagaaggagcagacgacctctactgctctacatggggcagatggaggacaactccgcttttaaagtagagagaatcccttatatatcactttaaattaactggctcctttatatgccacttcaaattggcttctcccttttatgccaccggttcaagtttctcctcccttttatgccattgccgtcagtccaccgtcagttgaccattaacttcattgtaaaaagacgcatttgcccttgagaattagtatacaaccaataataagtattttagtactaatatagctactggatacaacatatgaaaattgattttttctgcatcacatgcaattttagccattaccatcacaaataaattttcaatgtaagcatgaaacatgcagttttctaacaatatttttaatataaagagcatttttcactggttctgacaaaattttattcactcaaaaaggatttaaaataaattagttatgatttttttgaagtttacacattttttagttgagagggcatattggtcatttacgaaaaaaaactaatctttaactaacagtcaactaacactatagtggtgggtgtggcataaaagggtagaaaaacttgaactagtggcatataagggagaaaccaattttaagtgacatataaaaaaactggtcaaattctagtggtatataagggattctctcttttaaggtaacatagatactcctatagcttaactaaaaaccaaggcatagtgaaatcaaaacaaaattggatgtggcttttaatgcatggctcaaacaaccagtaccattgttgtgaccagaacccaaatatacaataagtatcctcctttttcttctctctatcaacatgtgcaaatctcttaacttttcagagtgaacgttgttgtaaccagaacccaaatatgcaatatatatctgcttttcttttttccttgaatgtcaaatatgtaatatatactgtatatccgccttttttctcctcaaaatctgcaaatctcttaacctctcggagcagatgtgtggatgcttattgctactaaaaaccacgtaaatatagtaaaatacaccaaccataatttttccccctcctcttcttttcccttatctccttttcctttcccccccccctaattttcttttctgtttttcgcttcttcctcctggattggtgactgcaaaccatgcaacttaattaaccgaagctgttagttaatttgtcttattttattcctttttatctacattaattcttttctcccacattggttccatgcatgctattatcatttccattattgctcgagagaaaatataattaagcacgtctcagtatgttatcctaattaaacgcgatctgcaagcattgcgaaattatatgacaagttgtagttgacgcagcacttgttaagtttcttctcaaactaagagcattttaatagatattcttttcaagaaaagttcaagcaaggcaccaaaccgttgaaaggaactgatgattaattaaagctaattaaacgatgttgtttattaggcttaatttttttttcttgatgaagtttttattagtcttagttggcaactgccggttagcctatgtatctctgcagctgacctggccaatctttgttccttgcttccttctgttgcaaacgtgcatgtctttataaaagaaccccaaattgcttgcttgccttcctgctaatcaccgccaatcttgcattgttctttctttcgttccataagtcgttgcatcaatattagcctgattttgagctatcaaagtagcaaaacg

SEQ ID NO: 4779 - DNA, 2000 bp, Oryza sativa
tataatgaacactttcatggtcaatagagacataaacccgaaaagaaaaatagtagtatggcaattttcttcaaatttttatagccatataagattctttgtgttaaaattttacttaattactaattttatatgttttaagatgttttgtagtatatcatagtatacttttggtctatattatttatatttgcattgtatatattagcatcgttatatttactacgtgtagaaaaaaaaatttggatcggaccacccatatcctaaatcatagatctgccactagtgtaaggacatgtttagcacatctctagccaagctgaagcctaatcaaacagtttcagcttcaaccaaaatagagtagagatggctagggtacagctctcagaaaatgaactagggatatgtgactgggtctaagttgttctataatttcaatccaaacaaaactagttaaatttagaagttaagccctaccaaacaagtgaaccctaatttccaggtggcaaggagaactagtgctagaacacgtgcaagacgacgagaaagaacaaccgagacacatagaggatatttggtgctgcgatctagctgctgccccatctttcttgtggttttcttaaaaatggaactcgcaggatgcaggaacaagcgtcgatcggtataatacgaaatccgcacacactaggtgcgtgcatacaaaggttttctgtcctgtatggggcgacggccgacgccgccgctgacacagtctccagtcagagaacgttttcagaccgatgctgaaaaacgtttgttagcagccacgtactgtgcatatggtttgacgacgggcgccatctactgaagttggtttcgtactgttccatgcttatttatatatatccaattccaaattggagcagcagagcaaacattgcaaacacacattcataccaattctctcgctgatcctccgatcaatcttgtagcaaaaaggttcgaaattttcagggaaattaaccatgtcgtcgcattgcctccgtttcctctcccacggtccggtacaaactatggcggtcgccgtgccgtatgttttgcgtgtccgtccgaaccgtgcttcgtttcggcgaagtagaacagcgctgcgaggacgtgcaagcatcgtcggcacacccgtcggcataccgtccggagaggatgaaataatcgctgctgctggaaaggaggcttctggttttgagccgtctgtgtggagggatttctttatcaactacgagccaaaaccattgcaggcatgtatatatatatgtaatacatttatatatttacatctttctatgtttaattatttawcttaattatgataaaaaaactgatgaactaatattaatccaattaaagattttgttgttatcataaaaataaaaaaaacaaggtagtgggtattttaatcatggcttacactttcaggaaggtcgaaatttcggtgaccaccgaaaatttcatgaatttcacgattttaaaacctttttgcacgaaattatttcaaattttaataaattttgactgaatttgaacaaaatttaaccaaattcacaaaattttgataagatacagaaaaaaacatgcgagatagttgcttaccggggtaagggcagtccgacttttcaatccctgcatgttaatgcatttacgtacaagctacaagtagttaatttagattggcatgcactgctcccttggtctttattattataagttcttgatctatcgtgtatcatatttgatgttgttattgtagttaattttatcttgtttctataagccattggttatctaacaagagttttgtgattatttacaacaactccactggaaccacaagttttttttttacaaaagaggaaaccattatgttgaaagtgttgttcttaatttccaatatattttgttctggtagattggttttgtaacgattcaaattgatgcatgcaagtaagcagagatcagagggatgg

SEQ ID NO: 4780 - DNA, 2000 bp, Oryza sativa
tagtgccaaagtttgcctagactttagcactaccaataaattggtagggtagagaaccaaacaagcccttcaggtccacgacccgtttaagcagaaagccaaagcggaaaagcaatcgctacctcggagctaacgcctcgtttacctcttcaaacacccggagggcccacctctcaacggtcaaacaccgcgaatcggacggaccagcttaccaccatatttgtccgggccccatgcaaggcagacgagaaaaacgagaaaaagacgagttgcttgctcggttgctgcgatgacttcttcacatcgttgagtatttttagcccctctctctctctattctttctagaaagaggagtattgcttttgctagcgtagtatacccggcttcctcaaccccaacttgtgtctcgaattgaaatgatgcagaccatcaggatgaaatctcaaggcggcaaaatcttttgagttaatttgttcaatacagccctgtacctttattttcattgatttttcaattaaaaatagattttagtttgattttcatcagaacacagttttcaactcagaggctctcttcagaagatgcccccactcccccagtttcatataaaaaacatgtggtgtaaacaaccatttatcctttgcatttcaagaatgcaaattgatgtaaattattttatgaatatttatttttgaagaagaaatgtatcttcaaatatttttccatatattgtttctttttcttttgtaaattggcacattttgcccaccggagaatttgttagtgtgaatacgtgctgacgaatttagtgtaagatgtacaagctgtggattttcaactttgcatttgatatttgttcctacgtgagaacgcactgcgttggtaaaagattatatatttattaattgatatatcgattgtcagcaacatcttgcagatatcaaaatgagccatctggccacttgtcacgctattataaagaggttaataaaagcacatagtaataattatatgcaaaacagttcaactcctgatcccctcagatatgccagctctcagacaatccgtcaacgggataaaaaaagagaaaggagggaggtggcgaaagttctcaaagtaggcgtgccaatgcctctatctgttattcaatgaaaaattaaagatgcaatatcttcaaagatatactaataaggaataaataatgctcctttttatcatgcatcacctttctaattaaaaaataaaacacactcattattattcccagaacctcacccctctccatagttgacttccaaggcaagacagatgagatatgcatttgtttctctctcagctagcaataaaggctttaaaaaatgaattttcttcttatctccaaagtccactatctgatggcaaaagaaagatgtcattgtcacaccccccatactgactcttttacacataaggcctgggatttcctcagtttttttttgtattgcaataagattttttttaaaaaatatatattttgaaacaggagcttttttattctctggatgccatattttttacagttaaaaaaaacgctctgtcactgttcactttgtataatttggcctgatatctactaccactactactacagtttgaattcaacatgcaagcatatagatttgagttgcttttgtctatgcagtttggtgaagctatactttttacagaaattttagagctatgttttgaatgcacagttcctataaaaaatgtgcactggcgtagtatcactttgccaaaggggacatatatcacgaattccgatggaatccaaggtgctttgcgaaaaaaagtcacagccctcattgactcgcatcttcttccacttctcccccatttccacctataaaggcagccatggcttccagccacacacctccatcctcccaacccaaaccgagcgcagcgcacggaccgagatctgcgcccggcagcggcggcgaactccggtgaaccaacc
